United States Patent Application Publication US 2011/0182862 A1 - sequence listing, part 5

SEQ ID NO: 6073 - DNA, 3024 bp, Muscodor strobelii
  misc_feature: SGI cDNA ID NO. 561755
  misc_feature: Encodes the peptide sequence at SEQ ID NO 6074
atgaaatttgcgaaagagctcgagcaagatctcgtcccagaatggcggataaagtatctcaattacaaggctggcaagaagtacgtcaaaggtgtctcgagggctatcaatcgcgccaatgccggtgtaggccggaagagcgacaacttgccacgccatgaggtcccgtctttcttccacagtcccttctcacgccatcagcgctcagctgaactgcggtcaggcagatctgatgaaagtgatggcctcacctccgcaccggcgcctgtgggacggaccccgcgttcagaacctggagctgtccctacgcctggtgaacaggaatcactaactaagccatcgagaaaccgaaacaactatgggagttttagtctgactccggctcatgatacgagcttggccaagcttgacagtcgccagacgacattcgaattaccgggcccagcaattcaggaacctcttggcggcaatggaagcggccattcgtcgcgggaatttgtgaccgcacgcttgacaccacagcgcagtgccaccgcagaatcaccagctgtcatgcggccacagggagccgcaacattaccgcgtttaggactatcaaaccaagccaccccgtctcctagtgggctgcgtcgcttattttctcacgatcagcgtttgaacaggactgagagcgcgaagattggccatgccatgcaggccattgacactgtcagacaaagagagagagatttcttcgactttatggacagtgaacttgacaaggtggaaacattttatcgccagaaagagacgcaagctggtactcgtttagaagcactacgagaacagcttcacgagatgcgaaatcgccgaacccaagagatcgctgagcttcggaggcacaaggaacaggcaaatggagcgggagaaggacgtatgggagactcttccggagctgaccagcacaacaaatggatcaaccccatcagatcaaaactattcaagcctggtgcgaattccaaggcattggccaaaatgcctcagactccgcaagtcagggcaaatgctgcggatgctgcaagagactatatcaggagacctcacgagcatgacgtaccctacaggacggccaagcgcaagctgaaactcgccctccaagagttctatcgtggtcttgagctgctcaaggcatacgcactgctaaatcgtacagctttcaggaagctcaacaagaagtacgacaaagctgtcaatgctagaccgcctctgcgctacatgaatgagaaagtgagcaaatcgtggttcgtcacgagcgaagtggtagatggtcgcattcgagcagttgaagatctctatgcccgatacttcgagaaaggaaaccacaaagtggcagccggaaagttgcgacgcatgacccgaagaccgggcgatgaatccagcattgcatttcgcaatggagttctgatcggggtaggaattgtactcgctatcgaagccgcgacttatgggggtgagctgctcttcgatccaaatcccactgtccgattacagacaagttacctattgcaaatatacggcggctatttcttgatgctcactctcttctcttacttctgtattgactgctacttctggacggccaataagatcaactatcagttcatattcgaatttgatccccggcaccagctcgactggaggcagctcgctagctttccaagcttttttcttttcctcttcggattggtcgcgtggttgaacttcacccgctatggccatagcgacctctggctgtacttcccagtcgtcctgataggcgtttcattgattatcatcttacttcccctgccgatcctttggcatagaagcagacggtggtttgcttactcacattggcgtttgttttttgctggcctttaccctgttgagtttcgcgacttctttttgggtgatatatactgttctctgacgtatgccacatccaacgcggagctcttcttctgtctgtatgcgaattactggaataatccgccacagtgtaattcgaatcactcacgactcatgggcttcctgatgactcttccaccgatttggcgtgcgctgcagtgtatacgacgatattacgataccaggaacgtatttccacatctggtcaattgcggcaaatacttcatgaccattcttgccggcgttttcctctcactctatcgtttgaataatacccacacgaacttgagcctcttcattttcttctcgtctgtgaacggcatatacacgtctgtatgggacttatttatggacttttcgctactccaagccgactcccgccatccctttttgcgcgatattctggggctcaaaggacatcggtggcgctactatttcatcatgatcctcgatccaatcctacgatttggctggatattctacgccattttcacgcacgatacacaacacagctcagttgtttcatttctagtctcgttttctgaggttactcgacgtggcatgtgggccctgctacgtgttgaaaacgagcattgcacgaatgtcggacagtacaaggcgagccgtgacgttccactgccatacgacatacatcacgaaactctgctcgagcgcccgagcttggaagagacaacgcagagtacaacacagaatacggcacagaaaactaccccaaaagcgtcgaatggacgcatcagccaggatcaaacggccaccggaacacagtcttctgcggttaggtccacgccagtcgaagagggcggattacgaagaagacgaaaatctgaagcagcaggcgccaaatcgattcgaggcatcatggcaagtgcacacaggcaagacttcgagaagaagcgaaagccgcgcgctgaggatgcaactcccgagcttgatggcgaatctgcagacgacattcgaagcgaagaagaggaagaggatgaagatgaagatgactcaggaagcatgatcgaagaacggttagaagtacagcgagttcacggtcttgtcagagcgaacgatagcgacgatgaacgctag

SEQ ID NO: 6074 - protein, 1007 aa, Muscodor strobelii
  misc_feature: SGI Peptide ID NO. 561755
  misc_feature (672)..(841): Pfam Id: PF03124 Pfam Desc: EXS family
  misc_feature (1)..(423): Pfam Id: PF03105 Pfam Desc: SPX domain
  misc_feature (1)..(284): Pfam Id: PF03105 Pfam Desc: SPX domain
  misc_feature (358)..(423): Pfam Id: PF03105 Pfam Desc: SPX domain
  misc_feature (1)..(950): NCBI GI: 255955853 Blast Desc: Pc21g16790 [Penicillium chrysogenum Wisconsin 54-1255] gi|211590390|emb|CAP96576.1| Pc21g16790 [Penicillium chrysogenum Wisconsin 54-1255]
  misc_feature (1)..(962): NCBI GI: 119183473 Blast Desc: CIMG_06671 [Coccidioides immitis RS]
  misc_feature (1)..(950): NCBI GI: 146324133 Blast Desc: signal transduction protein Syg1 [Aspergillus fumigatus Af293] gi|129558052|gb|EAL91669.2| signal transduction protein Syg1, [Aspergillus fumigatus Af293]
  misc_feature (1)..(950): NCBI GI: 159126559 Blast Desc: signal transduction protein Syg1, [Aspergillus fumigatus A1163]
  misc_feature (1)..(965): NCBI GI: 242790412 Blast Desc: signal transduction protein Syg1, [Talaromyces stipitatus ATCC 10500] gi|218718139|gb|EED17559.1| signal transduction protein Syg1, [Talaromyces stipitatus ATCC 10500]
  misc_feature (1)..(950): NCBI GI: 119479459 Blast Desc: signal transduction protein Syg1, [Neosartorya fischeri NRRL 181] gi|119407912|gb|EAW17861.1| signal transduction protein Syg1, [Neosartorya fischeri NRRL 181]
  misc_feature (1)..(966): NCBI GI: 225683459 Blast Desc: conserved [Paracoccidioides brasiliensis Pb03]
  misc_feature (1)..(948): NCBI GI: 212534532 Blast Desc: signal transduction protein Syg1, [Penicillium marneffei ATCC 18224] gi|210069821|gb|EEA23911.1| signal transduction protein Syg1, [Penicillium marneffei ATCC 18224]
  misc_feature (1)..(950): NCBI GI: 121713026 Blast Desc: signal transduction protein Syg1, [Aspergillus clavatus NRRL 1] gi|119402277|gb|EAW12698.1| signal transduction protein Syg1, [Aspergillus clavatus NRRL 1]
  misc_feature (1)..(950): NCBI GI: 239609841 Blast Desc: signal transduction protein Syg1 [Ajellomyces dermatitidis ER-3]
MKFAKELEQDLVPEWRIKYLNYKAGKKYVKGVSRAINRANAGVGRKSDNLPRHEVPSFFHSPFSRHQRSAELRSGRSDESDGLTSAPAPVGRTPRSEPGAVPTPGEQESLTKPSRNRNNYGSFSLTPAHDTSLAKLDSRQTTFELPGPAIQEPLGGNGSGHSSREFVTARLTPQRSATAESPAVMRPQGAATLPRLGLSNQATPSPSGLRRLFSHDQRLNRTESAKIGHAMQAIDTVRQRERDFFDFMDSELDKVETFYRQKETQAGTRLEALREQLHEMRNRRTQEIAELRRHKEQANGAGEGRMGDSSGADQHNKWINPIRSKLFKPGANSKALAKMPQTPQVRANAADAARDYIRRPHEHDVPYRTAKRKLKLALQEFYRGLELLKAYALLNRTAFRKLNKKYDKAVNARPPLRYMNEKVSKSWFVTSEVVDGRIRAVEDLYARYFEKGNHKVAAGKLRRMTRRPGDESSIAFRNGVLIGVGIVLAIEAATYGGELLFDPNPTVRLQTSYLLQIYGGYFLMLTLFSYFCIDCYFWTANKINYQFIFEFDPRHQLDWRQLASFPSFFLFLFGLVAWLNFTRYGHSDLWLYFPVVLIGVSLIIILLPLPILWHRSRRWFAYSHWRLFFAGLYPVEFRDFFLGDIYCSLTYATSNAELFFCLYANYWNNPPQCNSNHSRLMGFLMTLPPIWRALQCIRRYYDTRNVFPHLVNCGKYFMTILAGVFLSLYRLNNTHTNLSLFIFFSSVNGIYTSVWDLFMDFSLLQADSRHPFLRDILGLKGHRWRYYFIMILDPILRFGWIFYAIFTHDTQHSSVVSFLVSFSEVTRRGMWALLRVENEHCTNVGQYKASRDVPLPYDIHHETLLERPSLEETTQSTTQNTAQKTTPKASNGRISQDQTATGTQSSAVRSTPVEEGGLRRRRKSEAAGAKSIRGIMASAHRQDFEKKRKPRAEDATPELDGESADDIRSEEEEEDEDEDDSGSMIEERLEVQRVHGLVRANDSDDER

SEQ ID NO: 6075 - DNA, 3873 bp, Muscodor strobelii
  misc_feature: SGI EST ID NO. CUFF.15287.0
  misc_feature: Variant of the nucleotide sequence at SEQ ID NO 6073
ctgagttggacgaattgagtttttctggtgccgaccagtccatttcgtctctcttgcggcttgcttgcgtcgcgcgggttggaatctaaatcataccaatcacagcagcatgcttagattcatttttaggtactaggcacttcgtactggtgctcatttctcccgaccctctgacgtcatgaaatttgcgaaagagctcgagcaagatctcgtcccagaatggcggataaagtatctcaattacaaggctggcaagaagtacgtcaaaggtgtctcgagggctatcaatcgcgccaatgccggtgtaggccggaagagcgacaacttgccacgccatgaggtcccgtctttcttccacagtcccttctcacgccatcagcgctcagctgaactgcggtcaggcagatctgatgaaagtgatggcctcacctccgcaccggcgcctgtgggacggaccccgcgttcagaacctggagctgtccctacgcctggtgaacaggaatcactaactaagccatcgagaaaccgaaacaactatgggagttttagtctgactccggctcatgatacgagcttggccaagcttgacagtcgccagacgacattcgaattaccgggcccagcaattcaggaacctcttggcggcaatggaagcggccattcgtcgcgggaatttgtgaccgcacgcttgacaccacagcgcagtgccaccgcagaatcaccagctgtcatgcggccacagggagccgcaacattaccgcgtttaggactatcaaaccaagccaccccgtctcctagtgggctgcgtcgcttattttctcacgatcagcgtttgaacaggactgagagcgcgaagattggccatgccatgcaggccattgacactgtcagacaaagagagagagatttcttcgactttatggacagtgaacttgacaaggtggaaacattttatcgccagaaagagacgcaagctggtactcgtttagaagcactacgagaacagcttcacgagatgcgaaatcgccgaacccaagagatcgctgagcttcggaggcacaaggaacaggcaaatggagcgggagaaggacgtatgggagactcttccggagctgaccagcacaacaaatggatcaaccccatcagatcaaaactattcaagcctggtgcgaattccaaggcattggccaaaatgcctcagactccgcaagtcagggcaaatgctgcggatgctgcaagagactatatcaggagacctcacgagcatgacgtaccctacaggacggccaagcgcaagctgaaactcgccctccaagagttctatcgtggtcttgagctgctcaaggcatacgcactgctaaatcgtacagctttcaggaagctcaacaagaagtacgacaaagctgtcaatgctagaccgcctctgcgctacatgaatgagaaagtgagcaaatcgtggttcgtcacgagcgaagtggtagatggtcgcattcgagcagttgaagatctctatgcccgatacttcgagaaaggaaaccacaaagtggcagccggaaagttgcgacgcatgacccgaagaccgggcgatgaatccagcattgcatttcgcaatggagttctgatcggggtaggaattgtactcgctatcgaagccgcgacttatgggggtgagctgctcttcgatccaaatcccactgtccgattacagacaagttacctattgcaaatatacggcggctatttcttgatgctcactctcttctcttacttctgtattgactgctacttctggacggccaataagatcaactatcagttcatattcgaatttgatccccggcaccagctcgactggaggcagctcgctagctttccaagcttttttcttttcctcttcggattggtcgcgtggttgaacttcacccgctatggccatagcgacctctggctgtacttcccagtcgtcctgataggcgtttcattgattatcatcttacttcccctgccgatcctttggcatagaagcagacggtggtttgcttactcacattggcgtttgttttttgctggcctttaccctgttgagtttcgcgacttctttttgggtgatatatactgttctctgacgtatgccacatccaacgcggagctcttcttctgtctgtatgcgaattactggaataatccgccacagtgtaattcgaatcactcacgactcatgggcttcctgatgactcttccaccgatttggcgtgcgctgcagtgtatacgacgatattacgataccaggaacgtatttccacatctggtcaattgcggcaaatacttcatgaccattcttgccggcgttttcctctcactctatcgtttgaataatacccacacgaacttgagcctcttcattttcttctcgtctgtgaacggcatatacacgtctgtatgggacttatttatggacttttcgctactccaagccgactcccgccatccctttttgcgcgatattctggggctcaaaggacatcggtggcgctactatttcatcatgatcctcgatccaatcctacgatttggctggatattctacgccattttcacgcacgatacacaacacagctcagttgtttcatttctagtctcgttttctgaggttactcgacgtggcatgtgggccctgctacgtgttgaaaacgagcattgcacgaatgtcggacagtacaaggcgagccgtgacgttccactgccatacgacatacatcacgaaactctgctcgagcgcccgagcttggaagagacaacgcagagtacaacacagaatacggcacagaaaactaccccaaaagcgtcgaatggacgcatcagccaggatcaaacggccaccggaacacagtcttctgcggttaggtccacgccagtcgaagagggcggattacgaagaagacgaaaatctgaagcagcaggcgccaaatcgattcgaggcatcatggcaagtgcacacaggcaagacttcgagaagaagcgaaagccgcgcgctgaggatgcaactcccgagcttgatggcgaatctgcagacgacattcgaagcgaagaagaggaagaggatgaagatgaagatgactcaggaagcatgatcgaagaacggttagaagtacagcgagttcacggtcttgtcagagcgaacgatagcgacgatgaacgctagcaaagtggcctcgtcacgatgttggataacggtatttgatctgagctctaagggtgttccaacgttgtcttatcagcgacttcataagcttttcgcgatttgacacccatgagctgacattgacaacggagttcagttaccttactagccggtttgcctgccaggctgcatctgcataggctggcacccgattgatcaacgacttgaaacagcaaacaactagttacagagattcgctcgggatggcttgtaacctgcaactcgtcgggccattactcaggcttaaaacatccagatcacgtgtttccacgactaaggtccttacggatcaaggtagttggacatctcaggggctttactatgtaattgcacgcagcgcagttctcgaccagcattgcaacagctatgtgtcacctattattattatttcctacagacacatttcaccatacgtaatgcctgttaggaacgcgaggctccagatcctcttctgtatgaagactcctatagttgtcgggcctcatacttctactctggtagcagactaggtggctcttcattgctctaacacttacacatgcacggagtacccagccagaatctgtcggggaaccgactgatagcacagctattgatattcatagtgaagtagatcaactttgaaaccgtca

SEQ ID NO: 6076 - DNA, 219 bp, Muscodor strobelii
  misc_feature: SGI cDNA ID NO. 561756
  misc_feature: Encodes the peptide sequence at SEQ ID NO 6077
atggcaagtgcacacaggcaagacttcgagaagaagcgaaagccgcgcgctgaggatgcaactcccgagcttgatggcgaatctgcagacgacattcgaagcgaagaagaggaagaggatgaagatgaagatgactcaggaagcatgatcgaagaacggttagaagtacagcgagttcacggtcttgtcagagcgaacgatagcgacgatgaacgctag

SEQ ID NO: 6077 - protein, 72 aa, Muscodor strobelii
  misc_feature: SGI Peptide ID NO. 561756
MASAHRQDFEKKRKPRAEDATPELDGESADDIRSEEEEEDEDEDDSGSMIEERLEVQRVHGLVRANDSDDER

SEQ ID NO: 6078 - DNA, 3873 bp, Muscodor strobelii; identical to SEQ ID NO: 6075
  misc_feature: SGI EST ID NO. CUFF.15287.0
  misc_feature: Variant of the nucleotide sequence at SEQ ID NO 6076

SEQ ID NO: 6079 - DNA, 1614 bp, Muscodor strobelii
  misc_feature: SGI cDNA ID NO. 561757
  misc_feature: Encodes the peptide sequence at SEQ ID NO 6080
atgtggactggaaaagcagcacataacacgaacgtcacgagtttatcgccaccatatggtggctacccgaaatttgtcgagaatggcttcaacgagaattatcttcccatttggcttcaaagtgcgggttacaacacgtattatgttggcaaattcctcaactcgcagtctgtgaataattacgataaaccacatgcggcaggatggacagggtcggacttccaactagacccattcacatacgagtactataacgcaacattccagcggaatcacgatccaccagttaatcatgaaggcgaatactctgtcgatattgtcaagaataagtcgctgaactttttagacgaagcagttgcatccgagaagcccttcttcttgacagcagcaccaattgcacctcacagccacgttatcgtaggtggatattgggtcaatagtacttattataatcagacatcatcgacgcaagcacctccacagccagcacagcggcacatcaaccttttccctgacgtggtagttccacggacaccaagctttaatccgcctgagcccaacggtgttgcatggatttccacattgccacgacaaaatcaaactgtcgttgacgacaacgattcatggtatcgaaacaggcttcgtgccttgcaatctgtggatgagatgattgctgagcttatcacaagattagacgatcacggagtactagacaatacatacatattcttctcaactgataacggataccatattggacaacatcgattacagccaggaaaacagtgtgcatatcgcgaagatgtcaacatcccattaatcgtacgaggccctggtgtcccacagggagcgaggtcatcacaagtgtcttcacacacagatttagtaccgactttcttggagttggccggcgctcaggggccggcaaactactttgacggtcgagtcatcaattttaccgccccgaacatggaagatggtcgtggtcacggtgacgagcatgtcaatattgaaatgtggggcatcattgtgcctgagggaaagtatggtcaaatcctatatcctaatcacacgtataaggctctgcgtcttgctggagacggatacgattttttgtatactgtatggtgtacgggtgagcatgaactatacgacctgattcatgatccatatgaaactaaaaatctttacccgaaccacacgcagatttttgcgccgtacaataccacaggtcgttcgacttcaactcttctcagctctattatccagcacagctacagctcatcttcacgcacgagcagtttagatgattcaagcgtgcagggcaagtccgatatcttagaaacagcaaacctcaaacaacttgtctcccggctcgactctttagttctagtacttaagacttgcgtggctcggacatgtactcacccttgggaagtgcttcatccagctggtgacgtacagagtctggcggaagccctcaacccagcctatgatcatttctatgagatccaacagaatcgtgtaagatatgatgcatgcttatcaggatatctcgtgagtaatgagttgccgatcagagtcgtaccatatgagggagatgatggggcatga

SEQ ID NO: 6080 - protein, 537 aa, Muscodor strobelii
  misc_feature: SGI Peptide ID NO. 561757
  misc_feature (1)..(395): Pfam Id: PF00884 Pfam Desc: Sulfatase
  misc_feature (1)..(525): NCBI GI: 2873363 Blast Desc: arylsulfatase [Neurospora crassa]
  misc_feature (1)..(534): NCBI GI: 154293528 Blast Desc: BC1G_13903 [Botryotinia fuckeliana B05.10] gi|150845284|gb|EDN20477.1| BC1G_13903 [Botryotinia fuckeliana B05.10]
  misc_feature (1)..(533): NCBI GI: 169779723 Blast Desc: [Aspergillus oryzae RIB40] gi|83773065|dbj|BAE63193.1| protein product [Aspergillus oryzae]
  misc_feature (1)..(525): NCBI GI: 145251061 Blast Desc: An15g05130 [Aspergillus niger] gi|134082572|emb|CAK42487.1| protein product [Aspergillus niger]
  misc_feature (1)..(533): NCBI GI: 238500393 Blast Desc: arylsulfatase, [Aspergillus flavus NRRL3357] gi|220693184|gb|EED49530.1| arylsulfatase, [Aspergillus flavus NRRL3357]
  misc_feature (1)..(525): NCBI GI: 171680767 Blast Desc: protein product [Podospora anserina] gi|27764278|emb|CAD60558.1| protein product [Podospora anserina] gi|170940011|emb|CAP65237.1| protein product [Podospora anserina]
  misc_feature (1)..(525): NCBI GI: 261354177 Blast Desc: arylsulfatase [Verticillium albo-atrum VaMs.102]
  misc_feature (1)..(525): NCBI GI: 256726163 Blast Desc: NECHADRAFT_94512 [Nectria haematococca mpVI 77-13-4]
  misc_feature (1)..(525): NCBI GI: 6822089 Blast Desc: Arylsulfatase [Colletotrichum gloeosporioides f. sp. malvae]
  misc_feature (1)..(523): NCBI GI: 255939408 Blast Desc: Pc16g00510 [Penicillium chrysogenum Wisconsin 54-1255] gi|211585096|emb|CAP92721.1| Pc16g00510 [Penicillium chrysogenum Wisconsin 54-1255]
  misc_feature (1)..(397): SWISSPROT Homolog: EC 3.1.6.1 Arylsulfatase
MWTGKAAHNTNVTSLSPPYGGYPKFVENGFNENYLPIWLQSAGYNTYYVGKFLNSQSVNNYDKPHAAGWTGSDFQLDPFTYEYYNATFQRNHDPPVNHEGEYSVDIVKNKSLNFLDEAVASEKPFFLTAAPIAPHSHVIVGGYWVNSTYYNQTSSTQAPPQPAQRHINLFPDVVVPRTPSFNPPEPNGVAWISTLPRQNQTVVDDNDSWYRNRLRALQSVDEMIAELITRLDDHGVLDNTYIFFSTDNGYHIGQHRLQPGKQCAYREDVNIPLIVRGPGVPQGARSSQVSSHTDLVPTFLELAGAQGPANYFDGRVINFTAPNMEDGRGHGDEHVNIEMWGIIVPEGKYGQILYPNHTYKALRLAGDGYDFLYTVWCTGEHELYDLIHDPYETKNLYPNHTQIFAPYNTTGRSTSTLLSSIIQHSYSSSSRTSSLDDSSVQGKSDILETANLKQLVSRLDSLVLVLKTCVARTCTHPWEVLHPAGDVQSLAEALNPAYDHFYEIQQNRVRYDACLSGYLVSNELPIRVVPYEGDDGA

SEQ ID NO: 6081 - DNA, 1140 bp, Muscodor strobelii
  misc_feature: SGI EST ID NO. CUFF.15290.0
  misc_feature: Variant of the nucleotide sequence at SEQ ID NO 6079
tccacattgccacgacaaaatcaaactgtcgttgacgacaacgattcatggtatcgaaacaggcttcgtgccttgcaatctgtggatgagatgattgctgagcttatcacaagattagacgatcacggagtactagacaatacatacatattcttctcaactgataacggataccatattggacaacatcgattacagccaggaaaacagtgtgcatatcgcgaagatgtcaacatcccattaatcgtacgaggccctggtgtcccacagggagcgaggtcatcacaagtgtcttcacacacagatttagtaccgactttcttggagttggccggcgctcaggggccggcaaactactttgacggtcgagtcatcaattttaccgccccgaacatggaagatggtcgtggtcacggtgacgagcatgtcaatattgaaatgtggggcatcattgtgcctgagggaaagtatggtcaaatcctatatcctaatcacacgtataaggctctgcgtcttgctggagacggatacgattttttgtatactgtatggtgtacgggtgagcatgaactatacgacctgattcatgatccatatgaaactaaaaatctttacccgaaccacacgcagatttttgcgccgtacaataccacaggtcgttcgacttcaactcttctcagctctattatccagcacagctacagctcatcttcacgcacgagcagtttagatgattcaagcgtgcagggcaagtccgatatcttagaaacagcaaacctcaaacaacttgtctcccggctcgactctttagttctagtacttaagacttgcgtggctcggacatgtactcacccttgggaagtgcttcatccagctggtgacgtacagagtctggcggaagccctcaacccagcctatgatcatttctatgagatccaacagaatcgtgtaagatatgatgcatgcttatcaggatatctcgtgagtaatgagttgccgatcagagtcgtaccatatgagggagatgatggggcatgaatgagccgatactgttatttaggaggggcgtggagtgcaaaaggtactcctccaagttctcgtgaaaatctggaaacgttttctataccgacgatgttcgag

SEQ ID NO: 6082 - DNA, 1320 bp, Muscodor strobelii
  misc_feature: SGI cDNA ID NO. 561758
  misc_feature: Elevated expression when VOC is produced
  misc_feature: Encodes the peptide sequence at SEQ ID NO 6083
atgccttcccgtatagaagagctgtcagcggaggccatactctgctccaggcattcgatatcgaacaacggatttttgccttctgctcagcctctcaaacgccttcccgacagctcctacaagccttgggaggaaatagtacagaatctgcctactttcatagccgatggtaccatccgacagataatcgatgacacaccaattttatcaacttcgagactaggaacagaaagggaatggcagcgcgcatataacgttctaccaccgccagttgctgtgccgtatctcgaggtttcaaagcatttggagctgcctccagtagcaacatacgctgctgtcaacttgtggaactttagtagttcacatgatgatttcacaacaccagacaacttagaatcattacagacatttaccggaactccagacgaatcatggttctacgtattgtcggtcgcaatcgaggcgcagggggccccaattataccccttatgcttcgtgcaatggcagccgtggacgagaacgacagagatactataacaagcgctctcgtcaagatggctagttatattcggagattgacgaagctgttagatcgaatgttcgacaagtgcgaccccatggttttttaccacaaaattcggccctttttagccggcacgaagaacatggcgtctgccgggctcccaaatggcgtgttttttgatgagggggacggagttggcaactggcaacagcttcgaggcggtagcaatggacagagctcgctggcattaagtgatctgatccaatttctcgatattgtgctcggcatcgaacacacttccactgggaaccggccgccccagacggcagggcccaaaagcagggaaatgaattttcacgaagaggtcaggttatacatgccggctccacatcgcgagttcctccgcgaggtgtcgaagatgagtagcataaaagaattcgccatgtctaattctgtcatctcaatagagcaggatcagttacgtggggcatatcaagatgttacaagggtccttggcgagttccgaacagcacacatgcaaatggtaacgcggtacatcatcgtgccatcaaggaagtcagcgccgtcgacggggttaaatcttgctacctcttcgtcgcaatccagcggtagcgagttgactggaactggtggaacggcactcatccccttcctccgaggcacccgagacgatacgtatcgcgccgggatggaggtggcgacgaatgatgttaagcccaaaccggacactactttcacaagatcacacatggggggcctgcagtctgggatataa

SEQ ID NO: 6083 - protein, 439 aa, Muscodor strobelii
  misc_feature: SGI Peptide ID NO. 561758
  misc_feature (11)..(412): Pfam Id: PF01231 Pfam Desc: Indoleamine 2,3-dioxygenase
  misc_feature (86)..(412): Pfam Id: PF01231 Pfam Desc: Indoleamine 2,3-dioxygenase
  misc_feature (12)..(84): Pfam Id: PF01231 Pfam Desc: Indoleamine 2,3-dioxygenase
  misc_feature (20)..(411): NCBI GI: 261361129 Blast Desc: indoleamine 2,3-dioxygenase [Verticillium albo-atrum VaMs.102]
  misc_feature (1)..(411): NCBI GI: 256722634 Blast Desc: [Nectria haematococca mpVI 77-13-4]
  misc_feature (13)..(411): NCBI GI: 171681068 Blast Desc: protein product [Podospora anserina] gi|170940492|emb|CAP65720.1| protein product [Podospora anserina]
  misc_feature (7)..(411): NCBI GI: 46120362 Blast Desc: FG04828.1 [Gibberella zeae PH-1]
  misc_feature (8)..(411): NCBI GI: 70993992 Blast Desc: indoleamine 2,3-dioxygenase pyrrole 2,3-dioxygenase) [Aspergillus fumigatus Af293] gi|66849477|gb|EAL89805.1| indoleamine 2,3-dioxygenase pyrrole 2,3-dioxygenase) [Aspergillus
  misc_feature (8)..(411): NCBI GI: 119500548 Blast Desc: indoleamine 2,3-dioxygenase pyrrole 2,3-dioxygenase) [Neosartorya fischeri NRRL 181] gi|119415196|gb|EAW25134.1| indoleamine 2,3-dioxygenase pyrrole 2,3-dioxygenase) [Neosartorya
  misc_feature (23)..(411): NCBI GI: 145258522 Blast Desc: An04g07210 [Aspergillus niger] gi|134074689|emb|CAK44721.1| protein product [Aspergillus niger]
  misc_feature (21)..(407): NCBI GI: 154317134 Blast Desc: BC1G_03469 [Botryotinia fuckeliana B05.10] gi|150844886|gb|EDN20079.1| BC1G_03469 [Botryotinia fuckeliana B05.10]
  misc_feature (21)..(407): NCBI GI: 156049031 Blast Desc: SS1G_08222 [Sclerotinia sclerotiorum 1980] gi|154692621|gb|EDN92359.1| SS1G_08222 [Sclerotinia sclerotiorum 1980]
  misc_feature (21)..(407): NCBI GI: 67522803 Blast Desc: AN1858.2 [Aspergillus nidulans FGSC A4] gi|40745867|gb|EAA65023.1| AN1858.2 [Aspergillus nidulans FGSC A4] gi|259487211|tpe|CBF85705.1| TPA: conserved [Aspergillus FGSC
  misc_feature (13)..(373): SWISSPROT Homolog: EC 1.13.11.52 Indoleamine 2,3-dioxygenase
  misc_feature: Useful for introducing or modulating the production of volatile compounds
MPSRIEELSAEAILCSRHSISNNGFLPSAQPLKRLPDSSYKPWEEIVQNLPTFIADGTIRQIIDDTPILSTSRLGTEREWQRAYNVLPPPVAVPYLEVSKHLELPPVATYAAVNLWNFSSSHDDFTTPDNLESLQTFTGTPDESWFYVLSVAIEAQGAPIIPLMLRAMAAVDENDRDTITSALVKMASYIRRLTKLLDRMFDKCDPMVFYHKIRPFLAGTKNMASAGLPNGVFFDEGDGVGNWQQLRGGSNGQSSLALSDLIQFLDIVLGIEHTSTGNRPPQTAGPKSREMNFHEEVRLYMPAPHREFLREVSKMSSIKEFAMSNSVISIEQDQLRGAYQDVTRVLGEFRTAHMQMVTRYIIVPSRKSAPSTGLNLATSSSQSSGSELTGTGGTALIPFLRGTRDDTYRAGMEVATNDVKPKPDTTFTRSHMGGLQSGI

SEQ ID NO: 6084 - DNA, 3117 bp, Muscodor strobelii
  misc_feature: SGI cDNA ID NO. 561759
  misc_feature: Encodes the peptide sequence at SEQ ID NO 6085
atggcttcgaattacatttcgccgaggtttgggcatcgtctctttcctacagtgatagatgatgctgcacgagatgaaccagatcgtgtgtttttttatactcctcgcggcaataagacctccaacggctaccatgaggtcaccgcgaagattttcagtaactccgtcaacaggttatgttggtggctcgagtcggaattgaactatagttcagagcccaaaacgataggctatatcggacaaaatgatttgaggtactttttattgatggttgcctcttgcaagacggggaataggctcttgctctcttcacctcgaaacagcaccgaagggcacatctcgttgaacaaacaatccagttgcgagttttggttcacttcttcgggggttgataacatcgacttcatagaggaacttcagctgccgtgtgtcgaggttcccgagctgagtgacattctagctaccgccgacgtacctccatacgtgtatcaaaagaactttgatgatgggcgactagacattctggcctatcttcacacctccggtacaacggggctcccaaaacttgtaccaatgtaccttggggccttggcgagaattgatgcatttcatcttgttgaacccatcgatgggaagatgccaaatgccgtggaatggtcaggcacgaggatgttgtgtgcaatgcctctattccacgtcgccggtatctgtcttgggttcataacgactgtattctttcgatggatcatagtcctcacaccgactggtcctctagttcaatccgttgttgaagatgcgctggacagcattgcattggactctgcattcatctccccaagtgtggtccaagatatgtctaaatctgtgagctcaatggataaactcgcgaaactgcagtttctcacttcaggtggcggtccaatagctccgtccgtgggcgaggcgatccatcaacggtgtccaatctaccagaccatgggttcgaatgagacgcaatggatgcattccgtcgtaacacatccagagcactggcagtactattgcttccacccagctacaggtttttcgatgcgaccttactctgatacactgttcgagttgataatcaccaaggaggaggaatatacttcaacgcagcccatatttgtaactttcccagatcgcgatatatacgaaacaaaggacttgtattcgaggcatcctacagtttctactctctggaagtacgaaatgcgtgcggatgatcttattgtcttgtcaaatggggagaagttcaacccggtttctgcggaagaaatgctgattcgacatccgtgggtctctgcagcctacataaccggcagaggccgattccaggctgcggccctcctcaatccgattcagactgtcgaagaaagcgagctcgatatagttgccagtgtttggcctttcatcgaacaggctaatcaacgtctccccgcatatgcccaactccatcgagattttgtcaaggtcgtacgaagtccgttccctcgcacgcctaaaggaacgatatcacggaacgagatggagaaacagtttgcacagaacatcggcaacatttacgaggcacaaagtaataaccaatcatccatagtgatagatgacactagcgaggaaacaatacgtgctggactcagagaggcaattcagatggtactcgacgtcccaaatatcgaggatgatgataacatactcaccaagggtttcgactcgctgggcgtaatccgtctagagaggctcctcaaaccggcacttgctccgcgcttggagttgcgggcgagcatgatttatacgaacccgtcgatcgcggaccttgccagtacgctgtggtcacaattaagccaggggccactttcatcgtcctcgccaagcgctccaagcgcgcaagtaacatctcaaatgtattccaagtatctgagttccttcaagcgcggcagagaacatatcctgattactggcacaaccggctcgatcggaccgtatttactagacttctttagtaagaacgaatatgttgcggggatttggtgcctcaaccgcggcgagaatgctagggaaaggcagatcgagttagcaaagaaaaagggcctgccgcacgattggagcgacaaggtgcaatttattcgctatgatcttgcgtcgaagactctcggcttggaattagacctacttgaggaaatcaagaatcaggcaactgctattatacacaatgcttgggaggtcaatttcaatttgccgctatcttccttcgagccgcaattcgttggattgaaggggctcgtcaatatctgccggaagtcccgaaacagaattcggttttacttcacctcgtctgtcagcaccgcgatgaactggcagttcgctaagttaggtcctgttcccgaagatgagataactgatttcaatgcacctgtcaatggttatggcgcatcaaagttagtagcggaacttctgctccagagggccgctgaatcaggctggttgagcttctcagcttttcgtgtgggtcaggttgcaggtccagtgaagacgatcagcagcggtggtgcttggaatagaagggattggttacctgcgttgatcgatgcctctgcatatctcaaacaactaccatcggatttgggaactgctaacaatcttgactggatccccgtcgaccatctcgtagatatcatcggtcaagtcatcgtcaataacatacagggtgagcacgagcagaagatgtattacaacttgttaaatcccagcaagtgtagctgggaggatattctttcaataatcaaagaacgcctggacggagcactgtcagctagtgtgcaggtcgtgccattccaggagtggatagagcgcttgcgagacgctggcccgtcaatcatccaagaggtcgatactgggtcatcggtgacggcgggcagggcgcagcatggtctagcactagttgcgttctaccaagggctcgttgatggcgttcaatctggcgcccagatgctcgagtggaacatgaagaacttgcctttacagagtgagagttttgcgaatttgcccgccgtttccgaagaatgggtaaccacatggttggatcagtggggctattaa

SEQ ID NO: 6085 - protein, 1038 aa, Muscodor strobelii
  misc_feature: SGI Peptide ID NO. 561759
  misc_feature (656)..(909): Pfam Id: PF01370 Pfam Desc: NAD dependent epimerase/dehydratase family
  misc_feature (658)..(899): Pfam Id: PF07993 Pfam Desc: Male sterility protein
  misc_feature (173)..(331): Pfam Id: PF00501 Pfam Desc: AMP-binding enzyme
  misc_feature (656)..(848): Pfam Id: PF01370 Pfam Desc: NAD dependent epimerase/dehydratase family
  misc_feature (811)..(839): Pfam Id: PF02719 Pfam Desc: Polysaccharide biosynthesis protein
  misc_feature (7)..(1036): NCBI GI: 156063804 Blast Desc: SS1G_02020 [Sclerotinia sclerotiorum 1980] gi|154697354|gb|EDN97092.1| SS1G_02020 [Sclerotinia sclerotiorum 1980]
  misc_feature (7)..(1037): NCBI GI: 154318668 Blast Desc: BC1G_02723 [Botryotinia fuckeliana B05.10] gi|150857853|gb|EDN33045.1| BC1G_02723 [Botryotinia fuckeliana B05.10]
  misc_feature (11)..(1037): NCBI GI: 156055522 Blast Desc: SS1G_05113 [Sclerotinia sclerotiorum 1980] gi|154702897|gb|EDO02636.1| SS1G_05113 [Sclerotinia sclerotiorum 1980]
  misc_feature (6)..(1038): NCBI GI: 119173348 Blast Desc: L-aminoadipate-semialdehyde dehydrogenase [Coccidioides immitis RS]
  misc_feature (10)..(1038): NCBI GI: 240111808 Blast Desc: conserved [Coccidioides posadasii C735 delta SOWgp]
  misc_feature (10)..(1038): NCBI GI: 238840114 Blast Desc: ochratoxin A non-ribosomal peptide synthetase [Microsporum canis CBS 113480]
  misc_feature (13)..(1038): NCBI GI: 255938806 Blast Desc: Pc14g01790 [Penicillium chrysogenum Wisconsin 54-1255] gi|211584794|emb|CAP74320.1| Pc14g01790 [Penicillium chrysogenum Wisconsin 54-1255]
  misc_feature (11)..(1038): NCBI GI: 145248269 Blast Desc: An13g02460 [Aspergillus niger] gi|134081134|emb|CAK41644.1| protein product [Aspergillus niger]
  misc_feature (7)..(1038): NCBI GI: 171679130 Blast Desc: protein product [Podospora anserina] gi|170937636|emb|CAP62295.1| protein product [Podospora anserina]
  misc_feature (3)..(1038): NCBI GI: 115437254 Blast Desc: conserved [Aspergillus terreus NIH2624] gi|114188579|gb|EAU30279.1| conserved [Aspergillus terreus NIH2624]
MASNYISPRFGHRLFPTVIDDAARDEPDRVFFYTPRGNKTSNGYHEVTAKIFSNSVNRLCWWLESELNYSSEPKTIGYIGQNDLRYFLLMVASCKTGNRLLLSSPRNSTEGHISLNKQSSCEFWFTSSGVDNIDFIEELQLPCVEVPELSDILATADVPPYVYQKNFDDGRLDILAYLHTSGTTGLPKLVPMYLGALARIDAFHLVEPIDGKMPNAVEWSGTRMLCAMPLFHVAGICLGFITTVFFRWIIVLTPTGPLVQSVVEDALDSIALDSAFISPSVVQDMSKSVSSMDKLAKLQFLTSGGGPIAPSVGEAIHQRCPIYQTMGSNETQWMHSVVTHPEHWQYYCFHPATGFSMRPYSDTLFELIITKEEEYTSTQPIFVTFPDRDIYETKDLYSRHPTVSTLWKYEMRADDLIVLSNGEKFNPVSAEEMLIRHPWVSAAYITGRGRFQAAALLNPIQTVEESELDIVASVWPFIEQANQRLPAYAQLHRDFVKVVRSPFPRTPKGTISRNEMEKQFAQNIGNIYEAQSNNQSSIVIDDTSEETIRAGLREAIQMVLDVPNIEDDDNILTKGFDSLGVIRLERLLKPALAPRLELRASMIYTNPSIADLASTLWSQLSQGPLSSSSPSAPSAQVTSQMYSKYLSSFKRGREHILITGTTGSIGPYLLDFFSKNEYVAGIWCLNRGENARERQIELAKKKGLPHDWSDKVQFIRYDLASKTLGLELDLLEEIKNQATAIIHNAWEVNFNLPLSSFEPQFVGLKGLVNICRKSRNRIRFYFTSSVSTAMNWQFAKLGPVPEDEITDFNAPVNGYGASKLVAELLLQRAAESGWLSFSAFRVGQVAGPVKTISSGGAWNRRDWLPALIDASAYLKQLPSDLGTANNLDWIPVDHLVDIIGQVIVNNIQGEHEQKMYYNLLNPSKCSWEDILSIIKERLDGALSASVQVVPFQEWIERLRDAGPSIIQEVDTGSSVTAGRAQHGLALVAFYQGLVDGVQSGAQMLEWNMKNLPLQSESFANLPAVSEEWVTTWLDQWGY

SEQ ID NO: 6086 - DNA, 2046 bp, Muscodor strobelii
  misc_feature: SGI EST ID NO. CUFF.15329.0
  misc_feature: Variant of the nucleotide sequence at SEQ ID NO 6084
gatcttattgtcttgtcaaatggggagaagttcaacccggtttctgcggaagaaatgctgattcgacatccgtgggtctctgcagcctacataaccggcagaggccgattccaggctgcggccctcctcaatccgattcagactgtcgaagaaagcgagctcgatatagttgccagtgtttggcctttcatcgaacaggctaatcaacgtctccccgcatatgcccaactccatcgagattttgtcaaggtcgtacgaagtccgttccctcgcacgcctaaaggaacgatatcacggaacgagatggagaaacagtttgcacagaacatcggcaacatttacgaggcacaaagtaataaccaatcatccatagtgatagatgacactagcgaggaaacaatacgtgctggactcagagaggcaattcagatggtactcgacgtcccaaatatcgaggatgatgataacatactcaccaagggtttcgactcgctgggcgtaatccgtctagagaggctcctcaaaccggcacttgctccgcgcttggagttgcgggcgagcatgatttatacgaacccgtcgatcgcggaccttgccagtacgctgtggtcacaattaagccaggggccactttcatcgtcctcgccaagcgctccaagcgcgcaagtaacatctcaaatgtattccaagtatctgagttccttcaagcgcggcagagaacatatcctgattactggcacaaccggctcgatcggaccgtatttactagacttctttagtaagaacgaatatgttgcggggatttggtgcctcaaccgcggcgagaatgctagggaaaggcagatcgagttagcaaagaaaaagggcctgccgcacgattggagcgacaaggtgcaatttattcgctatgatcttgcgtcgaagactctcggcttggaattagacctacttgaggaaatcaagaatcaggcaactgctattatacacaatgcttgggaggtcaatttcaatttgccgctatcttccttcgagccgcaattcgttggattgaaggggctcgtcaatatctgccggaagtcccgaaacagaattcggttttacttcacctcgtctgtcagcaccgcgatgaactggcagttcgctaagttaggtcctgttcccgaagatgagataactgatttcaatgcacctgtcaatggttatggcgcatcaaagttagtagcggaacttctgctccagagggccgctgaatcaggctggttgagcttctcagcttttcgtgtgggtcaggttgcaggtccagtgaagacgatcagcagcggtggtgcttggaatagaagggattggttacctgcgttgatcgatgcctctgcatatctcaaacaactaccatcggatttgggaactgctaacaatcttgactggatccccgtcgaccatctcgtagatatcatcggtcaagtcatcgtcaataacatacagggtgagcacgagcagaagatgtattacaacttgttaaatcccagcaagtgtagctgggaggatattctttcaataatcaaagaacgcctggacggagcactgtcagctagtgtgcaggtcgtgccattccaggagtggatagagcgcttgcgagacgctggcccgtcaatcatccaagaggtcgatactgggtcatcggtgacggcgggcagggcgcagcatggtctagcactagttgcgttctaccaagggctcgttgatggcgttcaatctggcgcccagatgctcgagtggaacatgaagaacttgcctttacagagtgagagttttgcgaatttgcccgccgtttccgaagaatgggtaaccacatggttggatcagtggggctattaatgattatctgtacttctaacaggtgttcgggttagtacttacaaagcctgagacattttgtagctctggtgttgtcgagcgttctgttgaggcctttgatttgaaaactgttacagatgaattgagcaaataggaagcgaaaggaacccaatgtgcgcacataggttctgg

SEQ ID NO: 6087 - DNA, 900 bp, Muscodor strobelii
  misc_feature: SGI cDNA ID NO. 561760
  misc_feature: Encodes the peptide sequence at SEQ ID NO 6088
atggcgatccacgcactgcctccgactaacctcagcgctcagaatctgggtgatctgaccggcatggtggccgtggtgacgggaggtgggacgggtatcggcctggctatcgcaaagggtcttgaggccaatggtgccaaggtttatatcggtgcaagacggttagaaaagttgcaacaggctgcgaagcaatccgtatacgggaatctcatccctctccagatcgacgtaaccgaccgcaacgatcttcaacgggcagtggatgttgtcacacagaatgatggccgcctcgacttgttagtaaacaacgctggcatggctggccatgactggagtgaaaatgcccggccactgccgactcctcagtcctccgttgcagagattcgcgattattacttcaactatcgtccggaaaccctatgggatgatatgttgacactcaatacaagatcggtattcatgacctccatggcgttcctcgaactgctcgacgctggcaaccggaaacgtgatccaaaattgccacggagtcagattatcacagtgggaagcgtgggtggtgtatgccgtttcacggacgagttcatctacaatgcctcgaaggcgggatcgcacatcctaatgcaaaatttgggtgcatatttggcccccaatcatatcaggaccaacacgatcttaccaggatggttcccctccgagatgacagtcggctccatcgccaagtacgagaagactggaggcgttatgcctaacgacttagttccgcaggaacgcatgggtacagaagaagagatggcagggacgattctttacttagcaagtaaagccggaggttactgtaatggcaatatgatcatcgtcgatggcgggatcttacacatgaaggcgggaacattctag

SEQ ID NO: 6088 - protein, 299 aa, Muscodor strobelii
  misc_feature: SGI Peptide ID NO. 561760
  misc_feature (22)..(216): Pfam Id: PF00106 Pfam Desc: short chain dehydrogenase
  misc_feature (22)..(110): Pfam Id: PF00106 Pfam Desc: short chain dehydrogenase
  misc_feature (1)..(299): NCBI GI: 238846056 Blast Desc: short chain dehydrogenase/reductase family protein [Microsporum canis CBS 113480]
  misc_feature (9)..(299): NCBI GI: 169765484 Blast Desc: [Aspergillus oryzae RIB40] gi|83765068|dbj|BAE55211.1| protein product [Aspergillus oryzae]
  misc_feature (6)..(299): NCBI GI: 154312001 Blast Desc: BC1G_06034 [Botryotinia fuckeliana B05.10] gi|150850684|gb|EDN25877.1| BC1G_06034 [Botryotinia fuckeliana B05.10]
  misc_feature (14)..(292): NCBI GI: 256722810 Blast Desc: NECHADRAFT_97506 [Nectria haematococca mpVI 77-13-4]
  misc_feature (12)..(299): NCBI GI: 256729314 Blast Desc: NECHADRAFT_95809 [Nectria haematococca mpVI 77-13-4]
  misc_feature (9)..(290): NCBI GI: 156060395 Blast Desc: SS1G_02336 [Sclerotinia sclerotiorum 1980] gi|154699744|gb|EDN99482.1| SS1G_02336 [Sclerotinia sclerotiorum 1980]
  misc_feature (11)..(299): NCBI GI: 169614674 Blast Desc: SNOG_10483 [Phaeosphaeria nodorum SN15] gi|111060757|gb|EAT81877.1| SNOG_10483 [Phaeosphaeria nodorum SN15]
  misc_feature (10)..(299): NCBI GI: 189205264 Blast Desc: short chain dehydrogenase/reductase [Pyrenophora tritici-repentis Pt-1C-BFP] gi|187986066|gb|EDU51554.1| short chain dehydrogenase/reductase [Pyrenophora tritici-repentis
  misc_feature (9)..(292): NCBI GI: 46114952 Blast Desc: FG03318.1 [Gibberella zeae PH-1]
  misc_feature (1)..(292): NCBI GI: 256724230 Blast Desc: NECHADRAFT_64691 [Nectria haematococca mpVI 77-13-4]
  misc_feature (45)..(291): SWISSPROT Homolog: EC 1.1.1.100 3-oxoacyl-[acyl-carrier-protein] reductase
MAIHALPPTNLSAQNLGDLTGMVAVVTGGGTGIGLAIAKGLEANGAKVYIGARRLEKLQQAAKQSVYGNLIPLQIDVTDRNDLQRAVDVVTQNDGRLDLLVNNAGMAGHDWSENARPLPTPQSSVAEIRDYYFNYRPETLWDDMLTLNTRSVFMTSMAFLELLDAGNRKRDPKLPRSQIITVGSVGGVCRFTDEFIYNASKAGSHILMQNLGAYLAPNHIRTNTILPGWFPSEMTVGSIAKYEKTGGVMPNDLVPQERMGTEEEMAGTILYLASKAGGYCNGNMIIVDGGILHMKAGTF

SEQ ID NO: 6089 - DNA, 2212 bp, Muscodor strobelii
  misc_feature: SGI EST ID NO. CUFF.15349.0
  misc_feature: Variant of the nucleotide sequence at SEQ ID NO 6087
agcatctacggcaggttgtggagcccccagtgttcatgcatgatgcatcgcaaatttcggatgtgtggtacctgcagctctgccaactgctagcgctgatcaaggagaccagtttgggccaatatttgcaataacttttgcgccttctcatccggtgtcgcggtatttgccaatgttctcggcgaatccatgtccgaggccggcttcttaagacatttccgcggagcggcacgaaacctgacccatatcggggacttcaacagcagctcagcaactcgggtccgacttggtcagacaaagagacgtcgcacgcttttgcttgtaattgtttacatgatagggagttaggtgtgacgccacaaagcttctttctcacgccgcggggtacggggttcaagtcacttttctcacgatactcgtgatattatacaattgcagacgaggcagcctcgtctagcgcgcgactggcccggttcactaaccgcacccctgcccaccagtacttgggcctttgtcatcctgtttcgtcccatgtaccgaaggcaattggttttctctacatgatcgcggggaacattcgtgctccaccatcccccgtggaacaatggaaaactaatgtctgacttcgatggactctgcggattgagtgctgattaacggacgccatcggacgtaatgccggagcaatacacaatgtaccagccgggctctatgttatgagtgttgtcatgcgcgggaatatatagacggtggaatgtcgaatttctttgggataccgtaaactttaccatcctttcccgaatatacgacataatcaacgaaacaatggcgatccacgcactgcctccgactaacctcagcgctcagaatctgggtgatctgaccggcatggtggccgtggtgacgggaggtgggacgggtatcggcctggctatcgcaaagggtcttgaggccaatggtgccaaggtttatatcggtgcaagacggttagaaaagttgcaacaggctgcgaagcaatccgtatacgggaatctcatccctctccagatcgacgtaaccgaccgcaacgatcttcaacgggcagtggatgttgtcacacagaatgatggccgcctcgacttgttagtaaacaacgctggcatggctggccatgactggagtgaaaatgcccggccactgccgactcctcagtcctccgttgcagagattcgcgattattacttcaactatcgtccggaaaccctatgggatgatatgttgacactcaatacaagatcggtattcatgacctccatggcgttcctcgaactgctcgacgctggcaaccggaaacgtgatccaaaattgccacggagtcagattatcacagtgggaagcgtgggtggtgtatgccgtttcacggacgagttcatctacaatgcctcgaaggcgggatcgcacatcctaatgcaaaatttgggtgcatatttggcccccaatcatatcaggaccaacacgatcttaccaggatggttcccctccgagatgacagtcggctccatcgccaagtacgagaagactggaggcgttatgcctaacgacttagttccgcaggaacgcatgggtacagaagaagagatggcagggacgattctttacttagcaagtaaagccggaggttactgtaatggcaatatgatcatcgtcgatggcgggatcttacacatgaaggcgggaacattctaggtatacgaacaagataccaaaggaagatcacgattgagggatggccacctgagcaacggagctgcacagtagacaacgaaggcagaacacgagcaagacaacgacttgcacgaacgagagtctaaatgttccgagctaccgatagaacacaatcccgatcactagtagcgttatatgtccgctcaaaaagcaccatggaattgacagagtccgacgatacatcattccgacatcctctaagagccgctgtctcgatcctgctgtgctcacttcgcacgtcgccgagcacttatacgggagcactgcccccgggagatggcgaaaaaggatccggtcatttagctgtgtgtggttgtagatgagaatctgcagctcgagtaggagggatacgttcgggtatatgggagggaagcgtcatacatatagaacagagatatgagagtagaaataatttatcgtgactcatctgtcattatatcacagcgta

SEQ ID NO: 6090 - DNA, 1545 bp, Muscodor strobelii
  misc_feature: SGI cDNA ID NO. 561761
  misc_feature: Encodes the peptide sequence at SEQ ID NO 6091
atgttatacacaaaactgcgacatttcccaggacctccaggcgtgggtctcaccggcttcttccatttcaaggccatggttggtctagagaggcatctggtttatgaggagattaatgataaatacggcccagtcgcaaggatcgctccgaatgttctactcacctcgtcaccccagctgtggcagtacatcagcatgaagaccaattacgtgcgggcaaattggcactatcgggcgttccgtttcgacaatgtgcacgacagcatctttagtcagacagatgaagagaaacatgggaagcggcgcaaacagatggcgcctggctatgcaggacgggagaacccagaactcgagaagtctgttgacactttagtcgatgattttctttccctgttgaaaaacaagtatctctccactccatccgaaatcaaggccgtggaccttgcgaggaaaactcaatacttcacactcgatgtgattagcggttatatgttcactcttcattccagcatgagctacaggtggccaagtgtaaaggtcagcttcggcgaagaatttgggctccttgcagccgatgacgaccccgacgattttatcccggctcttgagactggcctcaaaatcgccaacacagtcatctcactaaagatagtcgagttcttgcaaaatccgctgatcggccctcgtctagcagcatcgcccaaagacgctggcggtttcggtcacattatgcggacatgctacgaatgtgtcgacaagcgctacgcagacatgatagccgaaggcggggcgatcgaggacatcccgcgttctgacatgctcgcatccttcatgcgccacggacttaagggcgaggaccttcgttgcgaagttctggagcaggtattcgccggctccgacacatctgccacaggtattcgggctgtgcttctatatcttttaacaaacaagcgcgtgtacactaagctgcagcgagagatcgatgacgccgccaaattcaacgacgaaaagacctccgttatatccaatacacgagcaaagcagctaccctatatgcaggccgtaatcagggaagcactgcgcctcttccctcctgccgtcaacgagtttacgcgggttgttccccctgaaggtgacacggtcacgctgacgacgagcggcgagtacggagtggatgagaagcagactgagttcttcttgcccggtggtacggaaatttgtgtctctctgcgcgcactgcagcgggacaagcgcgtgtttggggcagatgcaggctcgttccgccccgagcgttggacagaagagagtgacaccgggaagctggccgccatgacacgggcgagtgaccttgttttcggacatggcaggtttcaatgtgttgggaagaatattgctctaatggagataaataaggtcactttcgaagcattacgtcgattcgatcttgcgttggtaaaccccgacgtgccttggaagatcacagtcaacaccggtatcttcgtcatgtctgatatgtgggtgcaaataatggcgcgagacagttag

SEQ ID NO: 6091 - protein, 514 aa, Muscodor strobelii
  misc_feature: SGI Peptide ID NO. 561761
  misc_feature (10)..(511): Pfam Id: PF00067 Pfam Desc: Cytochrome P450
  misc_feature (285)..(493): Pfam Id: PF00067 Pfam Desc: Cytochrome P450
  misc_feature (1)..(512): NCBI GI: 256735641 Blast Desc: NECHADRAFT_103282 [Nectria haematococca mpVI 77-13-4]
  misc_feature (3)..(512): NCBI GI: 255938213 Blast Desc: Pc13g14720 [Penicillium chrysogenum Wisconsin 54-1255] gi|211584497|emb|CAP92541.1| Pc13g14720 [Penicillium chrysogenum Wisconsin 54-1255]
  misc_feature (3)..(512): NCBI GI: 116204147 Blast Desc: CHGG_09957 [Chaetomium globosum CBS 148.51] gi|88176085|gb|EAQ83553.1| CHGG_09957 [Chaetomium globosum CBS 148.51]
  misc_feature (3)..(512): NCBI GI: 261354174 Blast Desc: cytochrome P450 52A11 [Verticillium albo-atrum VaMs.102]
  misc_feature (3)..(514): NCBI GI: 171679852 Blast Desc: protein product [Podospora anserina] gi|170939552|emb|CAP64779.1| protein product [Podospora anserina]
  misc_feature (3)..(513): NCBI GI: 189204898 Blast Desc: pisatin demethylase [Pyrenophora tritici-repentis Pt-1C-BFP] gi|187985883|gb|EDU51371.1| pisatin demethylase [Pyrenophora tritici-repentis Pt-1C-BFP]
  misc_feature (3)..(513): NCBI GI: 189207507 Blast Desc: pisatin demethylase [Pyrenophora tritici-repentis Pt-1C-BFP] gi|187976180|gb|EDU42806.1| pisatin demethylase [Pyrenophora tritici-repentis Pt-1C-BFP]
  misc_feature (3)..(476): NCBI GI: 238502047 Blast Desc: benzoate 4-monooxygenase cytochrome P450, [Aspergillus flavus NRRL3357] gi|220691067|gb|EED47415.1| benzoate 4-monooxygenase cytochrome P450, [Aspergillus flavus NRRL3357]
  misc_feature (3)..(476): NCBI GI: 169776848 Blast Desc: [Aspergillus oryzae RIB40] gi|83771626|dbj|BAE61757.1| protein product [Aspergillus oryzae]
  misc_feature (1)..(514): NCBI GI: 67904618 Blast Desc: AN9296.2 [Aspergillus nidulans FGSC A4] gi|40747207|gb|EAA66363.1| AN9296.2 [Aspergillus nidulans FGSC A4] gi|259488130|tpe|CBF87351.1| TPA: cytochrome P450, (Eurofung)
  misc_feature (6)..(484): SWISSPROT Homolog: EC 1.14.13.12 Benzoate 4-monooxygenase
MLYTKLRHFPGPPGVGLTGFFHFKAMVGLERHLVYEEINDKYGPVARIAPNVLLTSSPQLWQYISMKTNYVRANWHYRAFRFDNVHDSIFSQTDEEKHGKRRKQMAPGYAGRENPELEKSVDTLVDDFLSLLKNKYLSTPSEIKAVDLARKTQYFTLDVISGYMFTLHSSMSYRWPSVKVSFGEEFGLLAADDDPDDFIPALETGLKIANTVISLKIVEFLQNPLIGPRLAASPKDAGGFGHIMRTCYECVDKRYADMIAEGGAIEDIPRSDMLASFMRHGLKGEDLRCEVLEQVFAGSDTSATGIRAVLLYLLTNKRVYTKLQREIDDAAKFNDEKTSVISNTRAKQLPYMQAVIREALRLFPPAVNEFTRVVPPEGDTVTLTTSGEYGVDEKQTEFFLPGGTEICVSLRALQRDKRVFGADAGSFRPERWTEESDTGKLAAMTRASDLVFGHGRFQCVGKNIALMEINKVTFEALRRFDLALVNPDVPWKITVNTGIFVMSDMWVQIMARDS

SEQ ID NO: 6092 - DNA, 1179 bp, Muscodor strobelii
  misc_feature: SGI EST ID NO. CUFF.15347.0
  misc_feature: Variant of the nucleotide sequence at SEQ ID NO 6090
cttcggcgaagaatttgggctccttgcagccgatgacgaccccgacgattttatcccggctcttgagactggcctcaaaatcgccaacacagtcatctcactaaagatagtcgagttcttgcaaaatccgctgatcggccctcgtctagcagcatcgcccaaagacgctggcggtttcggtcacattatgcggacatgctacgaatgtgtcgacaagcgctacgcagacatgatagccgaaggcggggcgatcgaggacatcccgcgttctgacatgctcgcatccttcatgcgccacggacttaagggcgaggaccttcgttgcgaagttctggagcaggtattcgccggctccgacacatctgccacaggtattcgggctgtgcttctatatcttttaacaaacaagcgcgtgtacactaagctgcagcgagagatcgatgacgccgccaaattcaacgacgaaaagacctccgttatatccaatacacgagcaaagcagctaccctatatgcaggccgtaatcagggaagcactgcgcctcttccctcctgccgtcaacgagtttacgcgggttgttccccctgaaggtgacacggtcacgctgacgacgagcggcgagtacggagtggatgagaagcagactgagttcttcttgcccggtggtacggaaatttgtgtctctctgcgcgcactgcagcgggacaagcgcgtgtttggggcagatgcaggctcgttccgccccgagcgttggacagaagagagtgacaccgggaagctggccgccatgacacgggcgagtgaccttgttttcggacatggcaggtttcaatgtgttgggaagaatattgctctaatggagataaataaggtcactttcgaagcattacgtcgattcgatcttgcgttggtaaaccccgacgtgccttggaagatcacagtcaacaccggtatcttcgtcatgtctgatatgtgggtgcaaataatggcgcgagacagttagcctgtatatatttagaatagagaaacggcaaacataaaccgttgtacgattaaagggattttatgagctgatagcacgttggaccagtcgtgcgtctacatgttggaactatggaagtggccagttgaaaacgaagagcattgacgaaattatcaatagcaataagacactcgcca

SEQ ID NO: 6093 - DNA, 1425 bp, Muscodor strobelii
  misc_feature: SGI cDNA ID NO. 561762
  misc_feature: Elevated expression when VOC is produced
  misc_feature: Encodes the peptide sequence at SEQ ID NO 6094
atgaacggccttcggataatcacttacttgcttcttttatttgactttacggttagtctctgcctgtctcaaaagattgaagcctactataatggacaaggtgtaccgtgggtcgctacatacaacttcacgtcaggcatcgtccgaacgagtctcctctgtagcagcacgaccatacccatcttcacagacgacaacacttcagtactgccttttgatcaggaccttggccctcaacatggttatttcccggcttcctctcttgcactttccaaagacccatttgactttgacatccctccagccattgatcttcttgaatcctataggattgcttattatccggataatcatgatagtaacaacagtgctggtcccaatgcagggcatgtctaccagctgggccttacgtctaatcataactgggacgactatggcaatctcacacaagatgcccctcaagtcgacgtatatgaattcagtgctgcttatggcggtttcggtttgtggactattgcgaaagtcagagacaataaaaatatcgagatagccaccttaagatccgaagactgggagatcacgactttttcacagcctcttcaactagtggatggcaagaaccccacgaatgcaactaacgcaacatctttcactctagatgatggtcacttaccaacgtggcaattagacgcattccatgcacttgttgcggacgtgcgacctgtatactatagcaatggtagcagaaccatattctatccaggcgatgattcttacctgcgacaagtcacagaaattgatggagaatggcagcaggcgccccgacggaactctactatctggcccaaatttgattactccctcaggttcggacttgcctctaatagtaccaacaacttgatatggatttactacattagtggcggaggtatgacgcaggttcacatggatggtttggactcagatgggcaaggaatatggcgaccggcaacacgtttgcccacatcactggagtctatggagtctagcagtccaactccacaggctacaagctcgcctaccggtgtatctacaggagtcaaggctggtgctgtagtcggagctgttgtgggaatatcgattataggctttgttgctttccttttttggcgaagacagaaacaaaagaaaattgccaataatagcacggctggaagcgcaatagaaagcccgcagaccaacgagccgaaggtacacgagttacagaatgacaccaaaatggtccacgaaattcacacaccggcacatccgcaggagatagactcagacgttgttctgagcccaacagagcaacctgcgtcaggaactattgatcaagacgtacaagctttcgagatgccggcagactctccgcagaaggcaaatgactcagaaaacatgagttga

SEQ ID NO: 6094 - protein, 474 aa, Muscodor strobelii
  misc_feature: SGI Peptide ID NO. 561762
  misc_feature (102)..(445): NCBI GI: 46105162 Blast Desc: FG00209.1 [Gibberella zeae PH-1]
  misc_feature (142)..(386): NCBI GI: 256723605 Blast Desc: NECHADRAFT_52084 [Nectria haematococca mpVI 77-13-4]
  misc_feature (109)..(391): NCBI GI: 116193101 Blast Desc: CHGG_06268 [Chaetomium globosum CBS 148.51] gi|88182181|gb|EAQ89649.1| CHGG_06268 [Chaetomium globosum CBS 148.51]
  misc_feature (107)..(389): NCBI GI: 171694469 Blast Desc: protein product [Podospora anserina] gi|170947183|emb|CAP73988.1| protein product [Podospora anserina]
  misc_feature (129)..(389): NCBI GI: 171683899 Blast Desc: protein product [Podospora anserina] gi|170941910|emb|CAP67562.1| protein product [Podospora anserina]
  misc_feature (131)..(448): NCBI GI: 46139679 Blast Desc: FG11354.1 [Gibberella zeae PH-1]
  misc_feature (107)..(397): NCBI GI: 149209797 Blast Desc: MGCH7_ch7g380 [Magnaporthe grisea 70-15] gi|86196335|gb|EAQ70973.1| MGCH7_ch7g380 [Magnaporthe grisea 70-15]
  misc_feature (177)..(388): NCBI GI: 256730395 Blast Desc: NECHADRAFT_82851 [Nectria haematococca mpVI 77-13-4]
  misc_feature (177)..(363): NCBI GI: 46115172 Blast Desc: FG03428.1 [Gibberella zeae PH-1]
  misc_feature (107)..(390): NCBI GI: 39970375 Blast Desc: MGG_02654 [Magnaporthe grisea 70-15] gi|145017558|gb|EDK01921.1| MGG_02654 [Magnaporthe grisea 70-15]
  misc_feature: Useful for introducing or modulating the production of volatile compounds
MNGLRIITYLLLLFDFTVSLCLSQKIEAYYNGQGVPWVATYNFTSGIVRTSLLCSSTTIPIFTDDNTSVLPFDQDLGPQHGYFPASSLALSKDPFDFDIPPAIDLLESYRIAYYPDNHDSNNSAGPNAGHVYQLGLTSNHNWDDYGNLTQDAPQVDVYEFSAAYGGFGLWTIAKVRDNKNIEIATLRSEDWEITTFSQPLQLVDGKNPTNATNATSFTLDDGHLPTWQLDAFHALVADVRPVYYSNGSRTIFYPGDDSYLRQVTEIDGEWQQAPRRNSTIWPKFDYSLRFGLASNSTNNLIWIYYISGGGMTQVHMDGLDSDGQGIWRPATRLPTSLESMESSSPTPQATSSPTGVSTGVKAGAVVGAVVGISIIGFVAFLFWRRQKQKKIANNSTAGSAIESPQTNEPKVHELQNDTKMVHEIHTPAHPQEIDSDVVLSPTEQPASGTIDQDVQAFEMPADSPQKANDSENMS

SEQ ID NO: 6095 - DNA, 1629 bp, Muscodor strobelii
  misc_feature: SGI cDNA ID NO. 561763
  misc_feature: Encodes the peptide sequence at SEQ ID NO 6096
atgactgatttatctgcagattacgttgttgtgggaggtggtctgacagggtgcctcgttgcctcgcgtctcagccagagaccccaaaagccgcaagtcatcctacttgaagcaggatctgatccgtcctcagaacctgctgcagcaggtctattgagtggtctatcgttgcttggcggggagttcgactatgctgatcgaagtgagcctgtcgctacaacggcgaatcgagtgcatgttctaaactccggcaaagcccttggcgggggaagcattctcaactttggtggttggctgcatgcggatgcaccggattatgatgagtgggccgcgatagttaaagatgatcgttggagctatgaaggcatcaagccctggttgcgcaaagtagaacgcttcgagcgttctgatgctagagcagatgccgaccaaaatgggtttgaggggcccatgaatgtcacatcgatctctgctgccgagtcgggagagcgtcaatacccacttcgtgagtctgtcaagcaggcatggacggagcttggcgtacctctgaatctcgagaggaagaatggctcgattactggggtgaccgagttttgcgaaaactcgcgcgagggtatgcgacagccatcccagatggcctttccgctcgacaaagtgcaagttttgaccaggactaccgcaagtagagtagtattcgacagcactacagcgatcggagtggaattagctgatggtcgcaagatcactacgcgtaaggaggtgatcgtctgcgctggtgcttatcgcacacctcagttcttaatgctctcaggcattgggccgtcttcagtccttgctgagaatggcattcctgtagtgtacgaagctcctgaggtcgggcagaatctgcacgatcatttcgccatatacttggcgtttcgtttgcgagacccatcgctcggatttgccttgggaagtgctggatggaaaagtccggcgctcttcaagggtctaccgttcgactgggtcgtgaacgggtcacttccagcaaagaccttgtcaaagtaccaagcggatccggacaaatcaaaacgaaacctctgggagatcatcacagcctatgttccgcccgggatgccaggtataccaatggacggcacccatatcgcaacttcaactatgttactactgccaacatcgcgagggaccgtatcaattcgttcaagcaacccgaacgactctccactggtgaagccaaactacttctctaacccattggaacgtgatacactcattcacgcaactcgcgagacattgagactcatgatggagactaaaaccatgagtggtattgttgccggcgagactccgccttctggtgaaggtcttgacggtctggagcctttgacacttgagtccagtgacgccgaaatcgaagagagaatcagacgcactggcatgcagcacttccattctggtggaaccgcagccatgggccgtgtagtcgatgcagagggcaaggtgatcggcgttaatcgattgagggtcatggatgcgagtatcgtacccattcctctcggaggtcatccacaagcgacgctttatgctatggcggaacaacttgtaaatcttgtcgtcgatcctgcttga

SEQ ID NO: 6096 - protein, 542 aa, Muscodor strobelii
  misc_feature: SGI Peptide ID NO. 561763
  misc_feature (7)..(368): Pfam Id: PF01266 Pfam Desc: FAD dependent oxidoreductase
  misc_feature (384)..(534): Pfam Id: PF05199 Pfam Desc: GMC oxidoreductase
  misc_feature (6)..(314): Pfam Id: PF00732 Pfam Desc: GMC oxidoreductase
  misc_feature (7)..(54): Pfam Id: PF01266 Pfam Desc: FAD dependent oxidoreductase
  misc_feature (220)..(314): Pfam Id: PF00732 Pfam Desc: GMC oxidoreductase
  misc_feature (6)..(155): Pfam Id: PF00732 Pfam Desc: GMC oxidoreductase
  misc_feature (7)..(42): Pfam Id: PF05834 Pfam Desc: Lycopene cyclase protein
  misc_feature (4)..(539): NCBI GI: 238501768 Blast Desc: glucose dehydrogenase, [Aspergillus flavus NRRL3357] gi|220692355|gb|EED48702.1| glucose dehydrogenase, [Aspergillus flavus NRRL3357]
  misc_feature (4)..(532): NCBI GI: 154308157 Blast Desc: BC1G_07824 [Botryotinia fuckeliana B05.10] gi|150852909|gb|EDN28101.1| BC1G_07824 [Botryotinia fuckeliana B05.10]
  misc_feature (1)..(539): NCBI GI: 67900560 Blast Desc: AN7267.2 [Aspergillus nidulans FGSC A4] gi|40741948|gb|EAA61138.1| AN7267.2 [Aspergillus nidulans FGSC A4] gi|259483387|tpe|CBF78736.1| TPA: conserved [Aspergillus FGSC
  misc_feature (7)..(542): NCBI GI: 46115062 Blast Desc: FG03373.1 [Gibberella zeae PH-1]
  misc_feature (7)..(539): NCBI GI: 242779381 Blast Desc: glucose dehydrogenase, [Talaromyces stipitatus ATCC 10500] gi|218723050|gb|EED22468.1| glucose dehydrogenase, [Talaromyces stipitatus ATCC 10500]
  misc_feature (5)..(539): NCBI GI: 145244078 Blast Desc: An11g05600 [Aspergillus niger] gi|134079234|emb|CAK40717.1| protein product [Aspergillus niger]
  misc_feature (7)..(539): NCBI GI: 212535270 Blast Desc: glucose-methanol-choline (gmc) oxidoreductase, [Penicillium marneffei ATCC 18224] gi|210070190|gb|EEA24280.1| glucose-methanol-choline (gmc) oxidoreductase, [Penicillium ATCC
  misc_feature (1)..(539): NCBI GI: 67526147 Blast Desc: AN3531.2 [Aspergillus nidulans FGSC A4] gi|40739666|gb|EAA58856.1| AN3531.2 [Aspergillus nidulans FGSC A4] gi|259481951|tpe|CBF75954.1| TPA: GMC oxidoreductase nidulans
  misc_feature (7)..(534): NCBI GI: 145259027 Blast Desc: An04g08890 [Aspergillus niger] gi|134074864|emb|CAK38976.1| protein product [Aspergillus niger]
  misc_feature (7)..(539): NCBI GI: 145234543 Blast Desc: An03g00130 [Aspergillus niger] gi|134057591|emb|CAK37991.1| protein product [Aspergillus niger]
  misc_feature (1)..(538): SWISSPROT Homolog: EC 1.1.99.1 Choline dehydrogenase
MTDLSADYVVVGGGLTGCLVASRLSQRPQKPQVILLEAGSDPSSEPAAAGLLSGLSLLGGEFDYADRSEPVATTANRVHVLNSGKALGGGSILNFGGWLHADAPDYDEWAAIVKDDRWSYEGIKPWLRKVERFERSDARADADQNGFEGPMNVTSISAAESGERQYPLRESVKQAWTELGVPLNLERKNGSITGVTEFCENSREGMRQPSQMAFPLDKVQVLTRTTASRVVFDSTTAIGVELADGRKITTRKEVIVCAGAYRTPQFLMLSGIGPSSVLAENGIPVVYEAPEVGQNLHDHFAIYLAFRLRDPSLGFALGSAGWKSPALFKGLPFDWVVNGSLPAKTLSKYQADPDKSKRNLWEIITAYVPPGMPGIPMDGTHIATSTMLLLPTSRGTVSIRSSNPNDSPLVKPNYFSNPLERDTLIHATRETLRLMMETKTMSGIVAGETPPSGEGLDGLEPLTLESSDAEIEERIRRTGMQHFHSGGTAAMGRVVDAEGKVIGVNRLRVMDASIVPIPLGGHPQATLYAMAEQLVNLVVDPA

SEQ ID NO: 6097 - DNA, 2117 bp, Muscodor strobelii
  misc_feature: SGI EST ID NO. CUFF.15383.0
  misc_feature: Variant of the nucleotide sequence at SEQ ID NO 6095
tttctcgattccttcctcttgccttgcatctcatagtgccgtgtctctaaaacaaagacaatatttgtatcaacatgactgatttatctgcagattacgttgttgtgggaggtggtctgacagggtgcctcgttgcctcgcgtctcagccagagaccccaaaagccgcaagtcatcctacttgaagcaggatctgatccgtcctcagaacctgctgcagcaggtctattgagtggtctatcgttgcttggcggggagttcgactatgctgatcgaagtgagcctgtcgctacaacggcgaatcgagtgcatgttctaaactccggcaaagcccttggcgggggaagcattctcaactttggtggttggctgcatgcggatgcaccggattatgatgagtgggccgcgatagttaaagatgatcgttggagctatgaaggcatcaagccctggttgcgcaaagtagaacgcttcgagcgttctgatgctagagcagatgccgaccaaaatgggtttgaggggcccatgaatgtcacatcgatctctgctgccgagtcgggagagcgtcaatacccacttcgtgagtctgtcaagcaggcatggacggagcttggcgtacctctgaatctcgagaggaagaatggctcgattactggggtgaccgagttttgcgaaaactcgcgcgagggtatgcgacagccatcccagatggcctttccgctcgacaaagtgcaagttttgaccaggactaccgcaagtagagtagtattcgacagcactacagcgatcggagtggaattagctgatggtcgcaagatcactacgcgtaaggaggtgatcgtctgcgctggtgcttatcgcacacctcagttcttaatgctctcaggcattgggccgtcttcagtccttgctgagaatggcattcctgtagtgtacgaagctcctgaggtcgggcagaatctgcacgatcatttcgccatatacttggcgtttcgtttgcgagacccatcgctcggatttgccttgggaagtgctggatggaaaagtccggcgctcttcaagggtctaccgttcgactgggtcgtgaacgggtcacttccagcaaagaccttgtcaaagtaccaagcggatccggacaaatcaaaacgaaacctctgggagatcatcacagcctatgttccgcccgggatgccaggtataccaatggacggcacccatatcgcaacttcaactatgttactactgccaacatcgcgagggaccgtatcaattcgttcaagcaacccgaacgactctccactggtgaagccaaactacttctctaacccattggaacgtgatacactcattcacgcaactcgcgagacattgagactcatgatggagactaaaaccatgagtggtattgttgccggcgagactccgccttctggtgaaggtcttgacggtctggagcctttgacacttgagtccagtgacgccgaaatcgaagagagaatcagacgcactggcatgcagcacttccattctggtggaaccgcagccatgggccgtgtagtcgatgcagagggcaaggtgatcggcgttaatcgattgagggtcatggatgcgagtatcgtacccattcctctcggaggtcatccacaagcgacgctttatgctatggcggaacaacttgtaaatcttgtcgtcgatcctgcttgatcatgggtgagagagagtcaactccagaggttgcccaattactagacagtgcactggaaatagcgacttcccatgcagcagatggttggctggatcacggtctttgagtatcttcacacttatgtggtgtactgtcgttgtatctaactagcacggcgctggtgattttgtttgcccaattcaagactcttccgccgatccgcaaacagttattttattcaagtttcacgagtgatcagcttacctgatggtgcaggtctccctcgagcttggtcactcaagctccccaatggcgccagcttgttcggccgtgtcacactaaccctgcatgcagtgggtatagaatgagcggacagtgtttcgttatggtcgcatgacaaatttgtaatgtattagggagcaactcgatactat

SEQ ID NO: 6098 - DNA, 801 bp, Muscodor strobelii
  misc_feature: SGI cDNA ID NO. 561764
  misc_feature: Encodes the peptide sequence at SEQ ID NO 6099
atgtcaaaatctgccgaaatcctcgaattcccagtgttccccatgctcgcggggaaagtagcgctaatcaccggcggcgcgcagggcatgggaaaagcaacagcctcgacattcttgcgagcaggcgcaaaagtagtcatctgcgacatcaacgcctctctcgggatttcaaccgccgagtctctatcctccttgggagagatatacttcaagccctgcgacatctcaaagtcctcctcagtccaggacctcatatccttcaccgtagaaaaattcggtcgtctagacgcagctgtcaacaacgcagcgatagggactgataagacaactttaagcgaaatggacgaggaatactgggggaaggtgatagatgttaatgttaccggcacggcgttgtgtacgaaatatgagatgcagcagatgaagagacaaggcggtggaggcagtattgtgattgtggctagtgttaatagctttatacctgtcgttaagatgcctgcgtatactacgagtaaacatgcgcttctgggcttggcgagacatgcggctatggagggtggcgagtttggggttagggttaatgctgttgccccggggggtattgctaccgatttcgcgatcgagggcctcaagaatatgaatacgactgaggaggagtttggcaagaggactacgttcatgggtagattcggaagagatcatgaagttgcgcagggctcactctggctggcgtccgaggcgtcgtcttatgttacgggcattgtgctcccgattgacggtgggtatttgattaagaagtag

SEQ ID NO: 6099 - protein, 266 aa, Muscodor strobelii
  misc_feature: SGI Peptide ID NO. 561764
  misc_feature (19)..(187): Pfam Id: PF00106 Pfam Desc: short chain dehydrogenase
  misc_feature (6)..(265): NCBI GI: 256723039 Blast Desc: NECHADRAFT_81149 [Nectria haematococca mpVI 77-13-4]
  misc_feature (6)..(263): NCBI GI: 156061191 Blast Desc: SS1G_02738 [Sclerotinia sclerotiorum 1980] gi|154700142|gb|EDN99880.1| SS1G_02738 [Sclerotinia sclerotiorum 1980]
  misc_feature (8)..(257): NCBI GI: 67525605 Blast Desc: AN3260.2 [Aspergillus nidulans FGSC A4] gi|40743979|gb|EAA63161.1| AN3260.2 [Aspergillus nidulans FGSC A4] gi|259485773|tpe|CBF83079.1| TPA: conserved [Aspergillus FGSC
  misc_feature (6)..(255): NCBI GI: 154293270 Blast Desc: glucose 1-dehydrogenase [Botryotinia fuckeliana B05.10] gi|150845576|gb|EDN20769.1| glucose 1-dehydrogenase [Botryotinia fuckeliana B05.10]
  misc_feature (13)..(262): NCBI GI: 23100638 Blast Desc: glucose 1-dehydrogenase [Oceanobacillus iheyensis HTE831] gi|22778872|dbj|BAC15139.1| glucose 1-dehydrogenase [Oceanobacillus iheyensis HTE831]
  misc_feature (15)..(262): NCBI GI: 51893442 Blast Desc: short-chain dehydrogenase [Symbiobacterium thermophilum IAM 14863] gi|51857131|dbj|BAD41289.1| short-chain dehydrogenase [Symbiobacterium thermophilum IAM 14863]
  misc_feature (16)..(261): NCBI GI: 169775087 Blast Desc: [Aspergillus oryzae RIB40] gi|83769874|dbj|BAE60009.1| protein product [Aspergillus oryzae]
  misc_feature (16)..(253): NCBI GI: 145236889 Blast Desc: An06g02710 [Aspergillus niger] gi|134075556|emb|CAK45086.1| protein product [Aspergillus niger]
  misc_feature (16)..(265): NCBI GI: 146275768 Blast Desc: short-chain dehydrogenase/reductase SDR [Novosphingobium aromaticivorans DSM 12444] gi|145322459|gb|ABP64402.1| short-chain dehydrogenase/reductase
  misc_feature (15)..(264): NCBI GI: 119491428 Blast Desc: NAD-dependent epimerase/dehydratase [Lyngbya sp. PCC 8106] gi|119453423|gb|EAW34586.1| NAD-dependent epimerase/dehydratase [Lyngbya sp. PCC 8106]
  misc_feature (12)..(261): SWISSPROT Homolog: EC 1.1.1.47 Glucose 1-dehydrogenase
MSKSAEILEFPVFPMLAGKVALITGGAQGMGKATASTFLRAGAKVVICDINASLGISTAESLSSLGEIYFKPCDISKSSSVQDLISFTVEKFGRLDAAVNNAAIGTDKTTLSEMDEEYWGKVIDVNVTGTALCTKYEMQQMKRQGGGGSIVIVASVNSFIPVVKMPAYTTSKHALLGLARHAAMEGGEFGVRVNAVAPGGIATDFAIEGLKNMNTTEEEFGKRTTFMGRFGRDHEVAQGSLWLASEASSYVTGIVLPIDGGYLIKK

SEQ ID NO: 6100 - DNA, 609 bp, Muscodor strobelii
  misc_feature: SGI cDNA ID NO. 561765
  misc_feature: Reduced expression when VOC is produced
  misc_feature: Encodes the peptide sequence at SEQ ID NO 6101
atgtcgtccttcgagtctgttgtcgtcatcgatggcaagggtcatctccttggccgcctggcctccatcgtcgccaagcagctcctcaacggccagaagatcgtcgtcgtccgctgcgaggacctcaacatctccggcgagttcttccgcgctaagctcaagtaccacgcctacctgcgcaagcagacccgattcaaccctacccgcggtggtcccttccacttccgtgctcccggcagaatcttctacaagaccgtccgcggcatgatcccccacaagacggcccgcggtgctgccgctctcgagcgcctcaaggtcttcgagggtgtccctcccccctacgacaagcagaagaagatggtcgtcccccaggccctccgtgttctcagactgcagcccggccgcaagtactgcaccgtcggccgtctcagccacgaggttggctggaaataccagagcgtcgtcgagcgcctggaagagcgccgcaaggccaagggtgccgcttactacgagcgcaagaagctggccgcccgccaactgtccgaggccaagaagaacgccaaggtggactccaagacggccaagaccctcgagtctttcggctactaa

SEQ ID NO: 6101 - protein, 202 aa, Muscodor strobelii
  misc_feature: SGI Peptide ID NO. 561765
  misc_feature (7)..(124): Pfam Id: PF00572 Pfam Desc: Ribosomal protein L13
  misc_feature (1)..(202): NCBI GI: 116198555 Blast Desc: 60S ribosomal protein L16 [Chaetomium globosum CBS 148.51] gi|88178712|gb|EAQ86180.1| 60S ribosomal protein L16 [Chaetomium globosum CBS 148.51]
  misc_feature (1)..(202): NCBI GI: 171692595 Blast Desc: protein product [Podospora anserina] gi|170946246|emb|CAP73047.1| protein product [Podospora anserina]
  misc_feature (1)..(202): NCBI GI: 261360516 Blast Desc: 60S ribosomal protein L16 [Verticillium albo-atrum VaMs.102]
  misc_feature (1)..(202): NCBI GI: 85103730 Blast Desc: 60S ribosomal protein L16 [Neurospora crassa OR74A] gi|30316294|sp|Q9P720.1|RL16_NEUCR RecName: Full=60S ribosomal protein L16 gi|7635796|emb|CAB88562.1| ribosomal protein l13a 60S
  misc_feature (1)..(202): NCBI GI: 39941074 Blast Desc: 60S ribosomal protein L16 [Magnaporthe grisea 70-15] gi|145022102|gb|EDK06122.1| 60S ribosomal protein L16 [Magnaporthe grisea 70-15]
  misc_feature (1)..(202): NCBI GI: 46110435 Blast Desc: RL16_NEUCR 60S ribosomal protein L16 [Gibberella zeae PH-1]
  misc_feature (1)..(202): NCBI GI: 256728609 Blast Desc: [Nectria haematococca mpVI 77-13-4]
  misc_feature (1)..(202): NCBI GI: 242784707 Blast Desc: ribosomal protein L16a [Talaromyces stipitatus ATCC 10500] gi|218720591|gb|EED20010.1| ribosomal protein L16a [Talaromyces stipitatus ATCC 10500]
  misc_feature (1)..(202): NCBI GI: 212527810 Blast Desc: ribosomal protein L16a [Penicillium marneffei ATCC 18224] gi|210073460|gb|EEA27547.1| ribosomal protein L16a [Penicillium marneffei ATCC 18224]
  misc_feature (1)..(202): NCBI GI: 240281531 Blast Desc: 60S ribosomal protein L13a [Ajellomyces capsulatus H143]
  misc_feature: Useful for introducing or modulating the production of volatile compounds
MSSFESVVVIDGKGHLLGRLASIVAKQLLNGQKIVVVRCEDLNISGEFFRAKLKYHAYLRKQTRFNPTRGGPFHFRAPGRIFYKTVRGMIPHKTARGAAALERLKVFEGVPPPYDKQKKMVVPQALRVLRLQPGRKYCTVGRLSHEVGWKYQSVVERLEERRKAKGAAYYERKKLAARQLSEAKKNAKVDSKTAKTLESFGY

SEQ ID NO: 6102 - DNA, 1986 bp, Muscodor strobelii
  misc_feature: SGI EST ID NO. CUFF.15433.0
  misc_feature: Variant of the nucleotide sequence at SEQ ID NO 6100
ctggcgggcaattttcaattgtgagtggcatttcgtgagcctccgcccagccgacgactgacaacaccagcacaacatcacggctttactaacgactacagcgaggatccaaacaggtagctcttgcaggaagcacatctcggttgtgcctctcttgagctgatctcctcctccccgatttcattcccgtcttttccttactgtccacctcccgtcccgcggtgacaatccggaaagatgtcgtccttcgagtctgttgtcgtcatcgatggcaagggtcatctccttggccgcctggcctccatcgtcgccaagcagctcctcaacggccagaagatcgtcgtcgtccgctgcgaggacctcaacatctccggcgagttcttccgcgctaagctcaagtaccacgcctacctgcgcaagcagacccgattcaaccctacccgcggtggtcccttccacttccgtgctcccggcagaatcttctacaagaccgtccgcggcatgatcccccacaagacggcccgcggtgctgccgctctcgagcgcctcaaggtcttcgagggtgtccctcccccctacgacaagcagaagaagatggtcgtcccccaggccctccgtgttctcagactgcagcccggccgcaagtactgcaccgtcggccgtctcagccacgaggttggctggaaataccagagcgtcgtcgagcgcctggaagagcgccgcaaggccaagggtgccgcttactacgagcgcaagaagctggccgcccgccaactgtccgaggccaagaagaacgccaaggtggactccaagacggccaagaccctcgagtctttcggctactaattttgtcttgtctgcttttctgtccgcattctcctccgatacaccaacaaccaacaaatccaaacaatcaatgaaccaatcgatccgtaacatgaacttgcaactagatccggcgtgtgggaaagggaaacaactttgatcatcgcatttgcctttgtgtcgttccacgcaagttttcgagggaaaggcaaggggggtcattgggatggggttaacgtttagtactggctccggtcccgtgttcaggcaattcgtcgtctaggtaccgaatgaaaaaatgaaccaaatcatgaacacaaaaagaaaaagagcaagaactcgagtcttttgcattttggacgggcttgtgacggtgtggtgggcactattgactactaaaacagctaggaaataggcttgcgaaacctgatgcgatatcatattccgcccgacctgaacctcttcgagcccctttcacgactcaaggcccgcacacgacgatatcacgaaacaactacgacatgacggactacttgatcggaaatgaaccgtgaagtcgtggcgagctgctggtgttgatcgacagtgtattgtcacaaaatctaggactttttggtagagcgagccatacacagaggatccaactgagcaactggaatttctggaagcacaaggcgaaatttgatcacaagcaagcctcttttgaccgcacttcagtcaaccaccacgtcccgaccagcagactctcgaggtcatcatcgctccattacgtagaacgtagcgaaggaagatactgagcatccacatcagcactcaggcgacaattcgcgtagtgactctggcattggtattttgtaaaggagtagcgaggtcatcggattcctggtcgcttcatcgttgacttctgcagtgtctgtatagtgtactgtattttgatttacacggatatatggtgccttgacgacaacttgtcaatgcaggagatgttcgcgctaccatgtatgacactctcgggttgtagttgatcttcaggacaggacagacactgttctttcaccctccagtagtggaattcgacagagagacgtattcgtgccggcctgggcgagactcgactgacatttgaactattgacgcattcacggtgtgactagacaggag

SEQ ID NO: 6103 - DNA, 663 bp, Muscodor strobelii
  misc_feature: SGI cDNA ID NO. 561766
  misc_feature: Reduced expression when VOC is produced
  misc_feature: Encodes the peptide sequence at SEQ ID NO 6104
atggacttgagctcgcgtcgagccagtcggatcaagatactgtacaagggccgccatctcaaagaggccgagattccgattcgcgactacggcgtgaagcccaacagcgaattgatggtggtagtccccgagggcagactcacagacgacgaggatagcagcggaacacctgaagaggtcgtcgtcctggagagggaagagcggactccgaaaaagaagaagaacaagaatggcaaagtcaagaagcctaagaagccgatcaaagacagcgccgctaaccttgaagtgcccggacaggagaacggagacagcaaacgcaccagcccggacccgtccagacacccatcccgcgtgccctcgcccgcagtcccatccggaccactcgagaagctggcagccatccgatcacactttgagaaggagctcctcccgctctgcgacgactttcgtcggcatccaccgaaggatgccaagaagaaggaagatgagcaccgcaagattagcgagacggtgatgcagcacgtgctgctgaagctggacgaggttgacacgggaggcgacccggacatccgagccaagaggaaagacttggtgaactacgtgcaagaggtactcaaggagattgacgacgtgatgccgccgggatccaagatcaacagatga

SEQ ID NO: 6104 - protein, 220 aa, Muscodor strobelii
  misc_feature: SGI Peptide ID NO. 561766
  misc_feature (130)..(212): Pfam Id: PF02179 Pfam Desc: BAG domain
  misc_feature (153)..(212): Pfam Id: PF02179 Pfam Desc: BAG domain
  misc_feature (1)..(209): NCBI GI: 261360515 Blast Desc: BAG domain-containing protein [Verticillium albo-atrum VaMs.102]
  misc_feature (1)..(215): NCBI GI: 171692593 Blast Desc: protein product [Podospora anserina] gi|170946245|emb|CAP73046.1| protein product [Podospora anserina]
  misc_feature (1)..(213): NCBI GI: 145615221 Blast Desc: MGG_05448 [Magnaporthe grisea 70-15] gi|145022101|gb|EDK06121.1| MGG_05448 [Magnaporthe grisea 70-15]
  misc_feature (1)..(209): NCBI GI: 116198557 Blast Desc: CHGG_07434 [Chaetomium globosum CBS 148.51] gi|88178713|gb|EAQ86181.1| CHGG_07434 [Chaetomium globosum CBS 148.51]
  misc_feature (1)..(209): NCBI GI: 256728608 Blast Desc: NECHADRAFT_101954 [Nectria haematococca mpVI 77-13-4]
  misc_feature (5)..(212): NCBI GI: 85103726 Blast Desc: NCU01220 [Neurospora crassa OR74A] gi|7635797|emb|CAB88563.1| [Neurospora crassa] gi|28923133|gb|EAA32350.1| [Neurospora crassa OR74A]
  misc_feature (1)..(209): NCBI GI: 46110433 Blast Desc: FG02098.1 [Gibberella zeae PH-1]
  misc_feature (1)..(213): NCBI GI: 154312812 Blast Desc: BC1G_05107 [Botryotinia fuckeliana B05.10] gi|150849809|gb|EDN25002.1| BC1G_05107 [Botryotinia fuckeliana B05.10]
  misc_feature (10)..(209): NCBI GI: 238503810 Blast Desc: LMBR1 domain protein [Aspergillus flavus NRRL3357] gi|220690608|gb|EED46957.1| LMBR1 domain protein [Aspergillus flavus NRRL3357]
  misc_feature (1)..(213): NCBI GI: 156051674 Blast Desc: SS1G_07244 [Sclerotinia sclerotiorum 1980] gi|154705022|gb|EDO04761.1| SS1G_07244 [Sclerotinia sclerotiorum 1980]
  misc_feature: Useful for introducing or modulating the production of volatile compounds
MDLSSRRASRIKILYKGRHLKEAEIPIRDYGVKPNSELMVVVPEGRLTDDEDSSGTPEEVVVLEREERTPKKKKNKNGKVKKPKKPIKDSAANLEVPGQENGDSKRTSPDPSRHPSRVPSPAVPSGPLEKLAAIRSHFEKELLPLCDDFRRHPPKDAKKKEDEHRKISETVMQHVLLKLDEVDTGGDPDIRAKRKDLVNYVQEVLKEIDDVMPPGSKINR

SEQ ID NO: 6105 - DNA, 2984 bp, Muscodor strobelii
  misc_feature: SGI EST ID NO. CUFF.16069.1
  misc_feature: Variant of the nucleotide sequence at SEQ ID NO 6103
gtccgctagaagtttgtcaatgccacattcgttacccaggtatatgtccaatctctatgagcaattgcccatatccattgaacttgatgctacccctcatcgattgaaccccccaatgtcaatttggaaatgacaatcattgcaggtgggaatttggcacttggctccacctccgaacaaattccagggtccctcccctgtgttatttttgtcggccaaagactgggtttggacacattgctcgagtccaagtgagtgaaggactgcgagtatccatactatcatatctcttatatcaccgtcgaggcatacatacatctaggtaggttacattcattcttataatggcatagtctggtcttccactccatgctctacagcgtgattgcgtgctggccacagatgctggcccgtctggggaaaaacgcatctggtcatagatgcacacacgcctccatcgtggcacgttggtgttcggtgtctttgcatcatccaatgaaccatctcgtcactggccgcattccacacaagtacctctgatcttgcagtagcagctgacgtgaatgcattgcagtgacaacgcatcgtcaaaccggcgttccagcgttccaaccagttccgccgagcccttcgcaccagtcacacaggcttgtcgcaaacacgattgtctctcgatcacgtagctattggactgtcaggcgtagcctacttgcgcggcgcgtagtcatctgagcaataggtagccccacgatatcaatccgtcaactgtacctacagtctctgcgcacgagtagcggacgagcaggaggggccacagcggacgagcgcagagcgactcgactaacgaccaatagctaggctaaggtacaccggcattttggattccggcccccaaacccactgcaagttccaacgacggccacagtcgctggccatagaaagacggtcccatctgtacactgctgtggacacacctgatagtcaccaggtctctggccatcccactgtctggcactcgttcgcttgtccagtcgcatgcgccgctactgcgacgtctgcctcgtcccggccgctctggcgagttacagcgcccgagtcgccatcccgccaacagggccaacagggccaacagggtgcattcctgctgcccgtcattccatcgctgcatcgctgcatcgctgcatcacctgtcgtaatcgagcccgcctctgggtcgtgtctccatcagattagcatcccgccgtagacaaaaagtacattcccgactcctcctctccttctcctcctgctgggtgtcctggattcccagggccacccaactcctcgtcacggtggcttccagtcaggcagtgctcgcatcttctggtgccttccagaacatcaccgcgctactgccgccgcagctgcaatcttacgtcctcaccactgccgcccacctgtccgacgcctttgccgtgcccaccgagtatctgctatctaagggtgcttcccccaccgtggtctactcgactctagccggcgctactgtcgcactgccctttctcatgtcacgatacggttggccgtcccctcgagagggcctttctccctttgcatcacaccccaacagccaagatggcaaccatgtcaccgacgatgacttcgactacatcacctccgaggacatcgtgacctacgaccaacaccgggctcccgaacggacctacgatagacacagtagccggcgtcatgatgcatcgcccatgcgacctaacgacattctttacatccggcataagggcactccctacgaactggacttccccggtggctgcatcaacaatggcaagctatatgtaggagacgtcaaagagcgcctgggactagtgatggacttgagctcgcgtcgagccagtcggatcaagatactgtacaagggccgccatctcaaagaggccgagattccgattcgcgactacggcgtgaagcccaacagcgaattgatggtggtagtccccgagggcagactcacagacgacgaggatagcagcggaacacctgaagaggtcgtcgtcctggagagggaagagcggactccgaaaaagaagaagaacaagaatggcaaagtcaagaagcctaagaagccgatcaaagacagcgccgctaaccttgaagtgcccggacaggagaacggagacagcaaacgcaccagcccggacccgtccagacacccatcccgcgtgccctcgcccgcagtcccatccggaccactcgagaagctggcagccatccgatcacactttgagaaggagctcctcccgctctgcgacgactttcgtcggcatccaccgaaggatgccaagaagaaggaagatgagcaccgcaagattagcgagacggtgatgcagcacgtgctgctgaagctggacgaggttgacacgggaggcgacccggacatccgagccaagaggaaagacttggtgaactacgtgcaagaggtactcaaggagattgacgacgtgatgccgccgggatccaagatcaacagatgatggaatgtttacaattggcaaggctgcagcttggcacgtcacgctcctatcaactagtctaagacataattacgtttagaatgagacacagctctccgtgcgagatggcgattgatttcgagacattgcatataagagttcaagaggcatagcagtcaggtttggcggtaaagccggagacaacacggtatcaaagaaacctcagagagtttgactcgactactggaagagaagctggtgtgatgtagatatactgtctctacagacgatggtgggaggatggtgagaggattgagaggtggctaaatgattagggagactcactcaattgaccaagcaagtcaaacaaccaacccactgcgaggctttgcctccctatgcatgcaattgtatccttagagacggcgggatgcctataaaaaacatggatagcaattaatattgacatctaac

SEQ ID NO: 6106 - DNA, 372 bp, Muscodor strobelii
  misc_feature: SGI cDNA ID NO. 561767
  misc_feature: Elevated expression when VOC is produced
  misc_feature: Encodes the peptide sequence at SEQ ID NO 6107
atgaacttcattcgcaagattttcacctcgtcggtatcagaagaagccatgtctgccgctaaagtcaaagcccaggaggtcatcgacaagtaccctgtcgctgtgttctccaagtcgtactgcccctactgcaccgcctccaagaacctgctcaaatccatgggtctgaaggagggcgacaagatggaaatcctcgagctcgacacgatgaaggacggtagcgccatccaaggcgccctcgccgaactctccaagggccagaccaccgtccccaatatctggatcggcggacagcacatcggcggcaactccgatctccaggccaggtccggcgagcttaagagtctccttaccgaggctggcgccctttga

SEQ ID NO: 6107 - protein, 123 aa, Muscodor strobelii
  misc_feature: SGI Peptide ID NO. 561767
  misc_feature (33)..(100): Pfam Id: PF00462 Pfam Desc: Glutaredoxin
  misc_feature (1)..(123): NCBI GI: 169617213 Blast Desc: SNOG_11783 [Phaeosphaeria nodorum SN15] gi|160703361|gb|EAT80827.2| SNOG_11783 [Phaeosphaeria nodorum SN15]
  misc_feature (17)..(123): NCBI GI: 212527788 Blast Desc: glutaredoxin Grx1, [Penicillium marneffei ATCC 18224] gi|212527790|ref|XP_002144052.1| glutaredoxin Grx1, [Penicillium marneffei ATCC 18224] gi|210073449|gb|EEA27536.1| glutaredoxin
  misc_feature (17)..(123): NCBI GI: 189188082 Blast Desc: glutaredoxin domain containing protein [Pyrenophora tritici-repentis Pt-1C-BFP] gi|187971986|gb|EDU39485.1| glutaredoxin domain containing protein [Pyrenophora Pt-1C-BFP]
  misc_feature (17)..(123): NCBI GI: 119496571 Blast Desc: glutaredoxin, [Neosartorya fischeri NRRL 181] gi|119413221|gb|EAW23162.1| glutaredoxin, [Neosartorya fischeri NRRL 181]
  misc_feature (17)..(123): NCBI GI: 242784653 Blast Desc: glutaredoxin Grx1, [Talaromyces stipitatus ATCC 10500] gi|242784658|ref|XP_002480432.1| glutaredoxin Grx1, [Talaromyces stipitatus ATCC 10500] gi|218720578|gb|EED19997.1| glutaredoxin
  misc_feature (17)..(123): NCBI GI: 70991020 Blast Desc: glutaredoxin Grx1 [Aspergillus fumigatus Af293] gi|66847991|gb|EAL88321.1| glutaredoxin Grx1, [Aspergillus fumigatus Af293] gi|159130833|gb|EDP55946.1| glutaredoxin, A1163]
  misc_feature (17)..(123): NCBI GI: 67527943 Blast Desc: AN4215.2 [Aspergillus nidulans FGSC A4] gi|40740124|gb|EAA59314.1| AN4215.2 [Aspergillus nidulans FGSC A4] gi|259481178|tpe|CBF74465.1| TPA: glutaredoxin Grx1, nidulans
  misc_feature (17)..(123): NCBI GI: 238503814 Blast Desc: glutaredoxin Grx1, [Aspergillus flavus NRRL3357] gi|220690610|gb|EED46959.1| glutaredoxin Grx1, [Aspergillus flavus NRRL3357]
  misc_feature (17)..(123): NCBI GI: 169764915 Blast Desc: [Aspergillus oryzae RIB40] gi|83764783|dbj|BAE54927.1| protein product [Aspergillus oryzae]
  misc_feature (17)..(123): NCBI GI: 119187315 Blast Desc: [Coccidioides immitis RS] gi|240108235|gb|EER26409.1| glutaredoxin, [Coccidioides posadasii C735 delta SOWgp]
  misc_feature (9)..(122): SWISSPROT Homolog: EC 1.8.1.9 Thioredoxin-disulfide reductase
  misc_feature: Useful for introducing or modulating the production of volatile compounds
MNFIRKIFTSSVSEEAMSAAKVKAQEVIDKYPVAVFSKSYCPYCTASKNLLKSMGLKEGDKMEILELDTMKDGSAIQGALAELSKGQTTVPNIWIGGQHIGGNSDLQARSGELKSLLTEAGAL

SEQ ID NO: 6108 - DNA, 1092 bp, Muscodor strobelii
  misc_feature: SGI EST ID NO. CUFF.16448.0
  misc_feature: Variant of the nucleotide sequence at SEQ ID NO 6106
cgcatggaatccgcctcaccactcctaggaagcgcttgacaaatacccgcaaattgctgtagatgtgctgtagtctagctctgcaaccttcgtcgcgccttacattgccgtctcttgtctgcacatatgacctgtctctcgccttccgatatccattcagttgcgtctcatcgaccccgctatccctggagtgcatattaaacccccgatcccccctcccggtcaagatcaagacaacattctccatgaacttcattcgcaagattttcacctcgtcggtatcagaagaagccatgtctgccgctaaagtcaaagcccaggaggtcatcgacaagtaccctgtcgctgtgttctccaagtcgtactgcccctactgcaccgcctccaagaacctgctcaaatccatgggtctgaaggagggcgacaagatggaaatcctcgagctcgacacgatgaaggacggtagcgccatccaaggcgccctcgccgaactctccaagggccagaccaccgtccccaatatctggatcggcggacagcacatcggcggcaactccgatctccaggccaggtccggcgagcttaagagtctccttaccgaggctggcgccctttgactaccccaaacgtcaagcgacccgaaattgtaaatatctgaatcaacaatcgtgtcgaggtttcatcgcacgcagtacccacgtggcctcggcagggctctaaatgttattagatgggaacaatattttgccaacgacatcatgacgtcagacagtcgaccacgcgatatataagatgcatactgcaaacattgcctctgcgcttctacactacacataaatatgagaacaaatagagaatagatatcccgcgcaatcaaacagacatcacattgccgtcactttacttccgtgaaaagcatcaggtcttcccaagttaggatagacatttatctacatagagtgaaaaatatcaggtgctgtgatttgctgcgatacatgataactgcaaagggccaatgtttgtgtcagtagaatactactgccaaatgaattctgacggtgattctgactagatggattcgtggtaaaagca

SEQ ID NO: 6109 - DNA, 498 bp, Muscodor strobelii
  misc_feature: SGI cDNA ID NO. 561768
  misc_feature: Encodes the peptide sequence at SEQ ID NO 6110
atgccctccctcttccaacgctcaaatccaggtgaagaaaacatggccaaggaacctaaagacaaagacgcagctctgaagcatgcacgtgccaagtcaactggaacgatcaacctcctcgtcgagacacgtcgccaagcatcagaccaatacatgcgagcgcaacgcgccgaaacagcctaccgcacgcgcaaaaacgctaccatcgcacgagcaaacttcaatgagaccaaaacacatttcaaggaaggattttcgcatctcggctcgggcttcaagggattattttctgtccttcgcgctacgccatctctgatcggggaacgacgagaacaatggcgacggaagagcgacgcaaagaaacgcaagagagccgaggagcagcggaagaaattggaagagaagattgcgcgagattacgcggatgctgggagcgtagaaggagaggataaggacaatgcttctgcgagtactggcacggtcaaaggcaagaagtaa

SEQ ID NO: 6110 - protein, 165 aa, Muscodor strobelii
  misc_feature: SGI Peptide ID NO. 561768
MPSLFQRSNPGEENMAKEPKDKDAALKHARAKSTGTINLLVETRRQASDQYMRAQRAETAYRTRKNATIARANFNETKTHFKEGFSHLGSGFKGLFSVLRATPSLIGERREQWRRKSDAKKRKRAEEQRKKLEEKIARDYADAGSVEGEDKDNASASTGTVKGKK

SEQ ID NO: 6111 - DNA, 244 bp, Muscodor strobelii
  misc_feature: SGI EST ID NO. CUFF.15396.0
  misc_feature: Variant of the nucleotide sequence at SEQ ID NO 6109
aatacctagttatcgtacctctcaacatcaccatattccgctattcatgccctccctcttccaacgctcaaatccaggtgaagaaaacatggccaaggaacctaaagacaaagacgcagctctgaagcatgcacgtgccaagtcaactggaacgatcaacctcctcgtcgagacacgtcgccaagcatcagaccaatacatgcgagcgcaacgcgccgaaacagcctaccgcacgcgcaaaaac

SEQ ID NO: 6112 - DNA, 633 bp, Muscodor strobelii
  misc_feature: SGI cDNA ID NO. 561769
  misc_feature: Encodes the peptide sequence at SEQ ID NO 6113
atgaaatcattcgttgctatgcttctcatggccgtaacgatggccattgccacgagaaccaaccttggagaaagtagactacttcactcaagtctccccgataattatacactaacaaacataacgtggatcttgcccatcgacgagaatgggcagaatcgcacctttactggtactgtagaggatgtcattactggtctcaactcaacaagaattaatctaggcctctcacctctcttcatcccccctgaaaccccgacggacgagaattcgtcggagagcgcaaatatgctacgcgactggaaggggtttaattgccgcaaaggtctgagctactgggctgccactgggcccataaaatccggaatacactatctccaaaaattgaaggggagatgcggtatgcatggcccgaaggcttgtggacgtatctcatgtagttggaattccgctattttttggtgtgttgacaatgacgaatatctggaatacgactgttcttacttcgctaaatacgcggggtatgtggtggataactgtgcgattgagaggaccgcaggcgacaaggtcgtttggggccagacatatgatacagacaatttccgcgtcatggttggttgggattcctgttaa

SEQ ID NO: 6113 - protein, 210 aa, Muscodor strobelii
  misc_feature: SGI Peptide ID NO. 561769
  misc_feature (1)..(210): NCBI GI: 256723698 Blast Desc: NECHADRAFT_86628 [Nectria haematococca mpVI 77-13-4]
  misc_feature (1)..(208): NCBI GI: 171680404 Blast Desc: protein product [Podospora anserina] gi|170939829|emb|CAP65054.1| protein product [Podospora anserina]
  misc_feature (27)..(169): NCBI GI: 171690460 Blast Desc: protein product [Podospora anserina] gi|170945178|emb|CAP71289.1| protein product [Podospora anserina]
  misc_feature (12)..(210): NCBI GI: 238839568 Blast Desc: [Microsporum canis CBS 113480]
  misc_feature (35)..(210): NCBI GI: 170940149 Blast Desc: protein product [Podospora anserina]
  misc_feature (25)..(210): NCBI GI: 121717032 Blast Desc: conserved [Aspergillus clavatus NRRL 1] gi|119404141|gb|EAW14558.1| conserved [Aspergillus clavatus NRRL 1]
  misc_feature (1)..(210): NCBI GI: 46133985 Blast Desc: FG09132.1 [Gibberella zeae PH-1]
  misc_feature (104)..(210): NCBI GI: 171693291 Blast Desc: protein product [Podospora anserina] gi|170946594|emb|CAP73396.1| protein product [Podospora anserina]
  misc_feature (1)..(210): NCBI GI: 171680406 Blast Desc: protein product [Podospora anserina] gi|170939830|emb|CAP65055.1| protein product [Podospora anserina]
  misc_feature (119)..(185): NCBI GI: 171690458 Blast Desc: protein product [Podospora anserina] gi|170945177|emb|CAP71288.1| protein product [Podospora anserina]
MKSFVAMLLMAVTMAIATRTNLGESRLLHSSLPDNYTLTNITWILPIDENGQNRTFTGTVEDVITGLNSTRINLGLSPLFIPPETPTDENSSESANMLRDWKGFNCRKGLSYWAATGPIKSGIHYLQKLKGRCGMHGPKACGRISCSWNSAIFWCVDNDEYLEYDCSYFAKYAGYVVDNCAIERTAGDKVVWGQTYDTDNFRVMVGWDSC

SEQ ID NO: 6114 - DNA, 858 bp, Muscodor strobelii
  misc_feature: SGI cDNA ID NO. 561770
  misc_feature: Elevated expression when VOC is produced
  misc_feature: Encodes the peptide sequence at SEQ ID NO 6115
atgtctatctcgaagaaatcagtgctcataacaggatgcagccaaggaggtcttggatattcaatcgccaaaataatgcacgagaaaaactaccatgtcttcgcgactttgcggaacgcctctaaagctgggaatttgagcgagcttggagacgttgaggttctcgaacttgatgtctcgtcgaaggattcgatcttcgaatgtgccgaaaaggttaaacgtcgcacaagtacattagacatcctgatcaataatgctgggagcgactttcatatgcccattcttgatactgacgttgaaaaagctaagaagttcttcgatgtgaacttttggagtgttctacttatgacacaagcgtttacagatccaatagtcaaggctcggggggtcgtcgtcaactgtagcaccgttctttggaatattgctactccctgggcaggcatatacaccactgccaaagcggcagttaagcaaatgtcagagactatgcgtgttgagatggagccgctcggcgttcgggttgtcactgcaatcatcggcgcagtgggaacaaacttcttcgccaacgcccttgctgagccatttgagttgccagaaaactcctactaccagcccgtcgcagaacttattgaagatcagcgtggaggaaagaatcatccaccacgagagcatgttgatatcacggctcgtaacttagtaaatgatatattagccggtgcaagtggtcttgtgtggcgcggtgcaaaatcctttgacgccaaatggcttacctggctgctcccaacatgggccgtcgagtggattgcaaatagttcgagggctacagaggaactaaggtactactacttgagtaaatag

SEQ ID NO: 6115 - protein, 285 aa, Muscodor strobelii
  misc_feature: SGI Peptide ID NO. 561770
  misc_feature (6)..(168): Pfam Id: PF00106 Pfam Desc: short chain dehydrogenase
  misc_feature (3)..(278): NCBI GI: 242774205 Blast Desc: short-chain dehydrogenase/reductase, [Talaromyces stipitatus ATCC 10500] gi|218722013|gb|EED21431.1| short-chain dehydrogenase/reductase, [Talaromyces stipitatus ATCC 10500]
  misc_feature (6)..(279): NCBI GI: 39956189 Blast Desc: MGG_09068 [Magnaporthe grisea 70-15] gi|145016457|gb|EDK00887.1| MGG_09068 [Magnaporthe grisea 70-15]
  misc_feature (3)..(278): NCBI GI: 212531875 Blast Desc: short-chain dehydrogenase/reductase, [Penicillium marneffei ATCC 18224] gi|210071458|gb|EEA25547.1| short-chain dehydrogenase/reductase, [Penicillium marneffei ATCC 18224]
  misc_feature (7)..(278): NCBI GI: 116204291 Blast Desc: CHGG_10029 [Chaetomium globosum CBS 148.51] gi|88176157|gb|EAQ83625.1| CHGG_10029 [Chaetomium globosum CBS 148.51]
  misc_feature (3)..(262): NCBI GI: 121700480 Blast Desc: short-chain dehydrogenase/reductase, [Aspergillus clavatus NRRL 1] gi|119396647|gb|EAW07079.1| short-chain dehydrogenase/reductase, [Aspergillus clavatus NRRL 1]
  misc_feature (6)..(280): NCBI GI: 238492093 Blast Desc: short-chain dehydrogenases/reductase, [Aspergillus flavus NRRL3357] gi|220695777|gb|EED52119.1| short-chain dehydrogenases/reductase, [Aspergillus flavus NRRL3357]
  misc_feature (6)..(279): NCBI GI: 169782478 Blast Desc: [Aspergillus oryzae RIB40] gi|83774445|dbj|BAE64568.1| protein product [Aspergillus oryzae]
  misc_feature (3)..(278): NCBI GI: 145236096 Blast Desc: protein product [Aspergillus niger] gi|134075146|emb|CAK39156.1| protein product [Aspergillus niger]
  misc_feature (6)..(278): NCBI GI: 145241480 Blast Desc: An09g00620 [Aspergillus niger] gi|134077924|emb|CAL00322.1| protein product [Aspergillus niger]
  misc_feature (1)..(265): NCBI GI: 145240005 Blast Desc: An08g05320 [Aspergillus niger] gi|134077163|emb|CAK45504.1| protein product [Aspergillus niger]
  misc_feature (2)..(266): SWISSPROT Homolog: EC 1.1.1.101 Acylglycerone-phosphate reductase
  misc_feature: Useful for introducing or modulating the production of volatile compounds
MSISKKSVLITGCSQGGLGYSIAKIMHEKNYHVFATLRNASKAGNLSELGDVEVLELDVSSKDSIFECAEKVKRRTSTLDILINNAGSDFHMPILDTDVEKAKKFFDVNFWSVLLMTQAFTDPIVKARGVVVNCSTVLWNIATPWAGIYTTAKAAVKQMSETMRVEMEPLGVRVVTAIIGAVGTNFFANALAEPFELPENSYYQPVAELIEDQRGGKNHPPREHVDITARNLVNDILAGASGLVWRGAKSFDAKWLTWLLPTWAVEWIANSSRATEELRYYYLSK

SEQ ID NO: 6116 - DNA, 1166 bp, Muscodor strobelii
  misc_feature: SGI EST ID NO. CUFF.15421.0
  misc_feature: Variant of the nucleotide sequence at SEQ ID NO 6114
caacgcctcacttgattctctaagtcattagttacttgtccatattctgaattttatcattactccaaagacgacgtgacacaatgtctatctcgaagaaatcagtgctcataacaggatgcagccaaggaggtcttggatattcaatcgccaaaataatgcacgagaaaaactaccatgtcttcgcgactttgcggaacgcctctaaagctgggaatttgagcgagcttggagacgttgaggttctcgaacttgatgtctcgtcgaaggattcgatcttcgaatgtgccgaaaaggttaaacgtcgcacaagtacattagacatcctgatcaataatgctgggagcgactttcatatgcccattcttgatactgacgttgaaaaagctaagaagttcttcgatgtgaacttttggagtgttctacttatgacacaagcgtttacagatccaatagtcaaggctcggggggtcgtcgtcaactgtagcaccgttctttggaatattgctactccctgggcaggcatatacaccactgccaaagcggcagttaagcaaatgtcagagactatgcgtgttgagatggagccgctcggcgttcgggttgtcactgcaatcatcggcgcagtgggaacaaacttcttcgccaacgcccttgctgagccatttgagttgccagaaaactcctactaccagcccgtcgcagaacttattgaagatcagcgtggaggaaagaatcatccaccacgagagcatgttgatatcacggctcgtaacttagtaaatgatatattagccggtgcaagtggtcttgtgtggcgcggtgcaaaatcctttgacgccaaatggcttacctggctgctcccaacatgggccgtcgagtggattgcaaatagttcgagggctacagaggaactaaggtactactacttgagtaaataggcgtacgggacatgtacaagagcgtaaggagataccagaatccatgggctcatgcgaggtgcatgtcgcgttgagtcacaaacattgcctcagcaaaatactacccgtaattgaataagcaggaaggccatattgaatggtgctatggcctatcacgatgtttccaacagaatagcgtaacattttcgaacagatatgtttaatgaattatcaataccgatgaac

SEQ ID NO: 6117 - DNA, 999 bp, Muscodor strobelii
  misc_feature: SGI cDNA ID NO. 561771
  misc_feature: Encodes the peptide sequence at SEQ ID NO 6118
atgaaggtagcgacaattcttgcggctcttgtcgccgcggccacggcaacaccaacccccacagtggacgaagtacctgccggtgcccatctggagaagcgtgccaccatttctgaagttgcaactctcggctacgcaacacagaatggaggtactaagggtggcgcaggaggaactgtgactactgtctcaacgctggcgcagtttacggctgctgttgacgaaaaggacacttcgtccaagattgtggttgtgcagggcaccctttctggcaatgtaaacgtccgtattgggagcaacaagtctgtcatcgggcttaagggcgcaacttttgatggtgttggattgtacattagacgccaaagcaacgttattgttcgaaacatcatttcgaaaaatgttcttgcctcaactggcgacggtatcaagatcgatgaaagtaccaatgtctgggttgatcactgcgaattctactccgccttgattgatgacaaggactactacgatggtcttatcgatgcctctcatgctgcagattttatcaccttgtcatacatttatttccatgatcactggaagacatcgttgattggacatagcgagaacaacggcgccgaggacactggccacttacgcatcacctacgctaacaactactggaagaacattggctcccgcggtccttctcttcgcttcggaacaggacatgtctataatagctactacgaaaatgcggactcagcgatcaactcccgtcagaacgcgcagatcctcgctcagagcaacgtgttcaaaaatgtgacgagtccgatcatgaccaaggattctgacattgtcggatacgtcgtggctattgacaatgatctaggaggtgcttcgaacactgcccctgttggcacactcactgctaactcgcctccttacccttactccctaatggggtcttcaaaagtcgccgccaccgttcctggccaggccggtgccattcttagcttttaa

SEQ ID NO: 6118 - protein, 332 aa, Muscodor strobelii
  misc_feature: SGI Peptide ID NO. 561771
  misc_feature (78)..(264): Pfam Id: PF00544 Pfam Desc: Pectate lyase
  misc_feature (1)..(332): NCBI GI: 261357288 Blast Desc: pectate lyase B [Verticillium albo-atrum VaMs.102]
  misc_feature (3)..(332): NCBI GI: 5453412 Blast Desc: AF156983_1 pectate lyase 1 [Colletotrichum gloeosporioides f. sp. malvae]
  misc_feature (18)..(332): NCBI GI: 116195526 Blast Desc: CHGG_04361 [Chaetomium globosum CBS 148.51] gi|88180274|gb|EAQ87742.1| CHGG_04361 [Chaetomium globosum CBS 148.51]
  misc_feature (7)..(332): NCBI GI: 171678381 Blast Desc: protein product [Podospora anserina] gi|170937260|emb|CAP61917.1| protein product [Podospora anserina]
  misc_feature (1)..(332): NCBI GI: 256727718 Blast Desc: NECHADRAFT_58553 [Nectria haematococca mpVI 77-13-4]
  misc_feature (18)..(332): NCBI GI: 46134303 Blast Desc: FG09291.1 [Gibberella zeae PH-1]
  misc_feature (1)..(332): NCBI GI: 154323139 Blast Desc: BC1G_00912 [Botryotinia fuckeliana B05.10] gi|150848246|gb|EDN23439.1| BC1G_00912 [Botryotinia fuckeliana B05.10]
  misc_feature (18)..(332): NCBI GI: 5453416 Blast Desc: AF156985_1 pectate lyase 2 [Colletotrichum gloeosporioides f. sp. malvae]
  misc_feature (1)..(330): NCBI GI: 46116132 Blast Desc: FG03908.1 [Gibberella zeae PH-1]
  misc_feature (3)..(332): NCBI GI: 119497755 Blast Desc: pectate lyase, [Neosartorya fischeri NRRL 181] gi|119413799|gb|EAW23738.1| pectate lyase, [Neosartorya fischeri NRRL 181]
  misc_feature (67)..(332): SWISSPROT Homolog: EC 4.2.2.2 Pectate lyase
MKVATILAALVAAATATPTPTVDEVPAGAHLEKRATISEVATLGYATQNGGTKGGAGGTVTTVSTLAQFTAAVDEKDTSSKIVVVQGTLSGNVNVRIGSNKSVIGLKGATFDGVGLYIRRQSNVIVRNIISKNVLASTGDGIKIDESTNVWVDHCEFYSALIDDKDYYDGLIDASHAADFITLSYIYFHDHWKTSLIGHSENNGAEDTGHLRITYANNYWKNIGSRGPSLRFGTGHVYNSYYENADSAINSRQNAQILAQSNVFKNVTSPIMTKDSDIVGYVVAIDNDLGGASNTAPVGTLTANSPPYPYSLMGSSKVAATVPGQAGAILSF

SEQ ID NO: 6119 - DNA, 1011 bp, Muscodor strobelii
  misc_feature: SGI cDNA ID NO. 561772
  misc_feature: Encodes the peptide sequence at SEQ ID NO 6120
atgtcctcaacaagagaactatggcacgactctagaaatccaccgaaagatccggttgatcattcatttaaggacaaaaccgtcctcgtcaccggagctcacggtaacagccttggtcatcatgcagcagtcaaatatgcagcttcaggtgctaacccgctcattcttgctgtacgatctcaagagaaaggcgagaagaccaaatctgcaataattcagcaaactggatgttccgcagaagtttttgttgttgaaattttagatatggcttctttcgcgtccgtcaaaagatttgctcagcgtatctcggcacgatttcccgtgctccatgtcgtccagaatgcagggggcgtggcaccttgggactatgagaagagccccgagggatatgagatgtctctacaaattgacgtcttatctacaactctacttacgcttttgttgatgcccaaacttcaatatactgcgaccgcatcgcctgccaacgattacctaccacacgtatccttcctcgacagtatcgcaatctttgacgtgactggaaagatgctgtcaaccgatgggcagactctgattcagagatgcgacgaccgaagcaagtgggatgcggtgaagcagtactatcttgtgaagttggcaacatggtacgctgcgaaaggagtcgctgatcaagctaaagaatcgggtgtcgttgtcaatgctacatgtccaggtctctgtagtactaatatgacgagaagccttccgtttctatatcgaaagtttatggccgctaggtacttcttcctcggtcgaacacccgagcagggagctcgaagcttggtgagcgccactagccttggccctgaaagtcatgggaagttctggaataatgataaatttcatgaaatgactccgtttcttgacagcgaacaatcgactgcgctttatcacgaaacatgggaagagatcatttcaatactccgcgagcacctaccatcaggcatgactcagtaccagagtacaatttga

SEQ ID NO: 6120 - protein, 336 aa, Muscodor strobelii
  misc_feature: SGI Peptide ID NO. 561772
  misc_feature (26)..(189): Pfam Id: PF00106 Pfam Desc: short chain dehydrogenase
  misc_feature (26)..(119): Pfam Id: PF00106 Pfam Desc: short chain dehydrogenase
  misc_feature (1)..(294): NCBI GI: 116191133 Blast Desc: CHGG_05284 [Chaetomium globosum CBS 148.51] gi|88181197|gb|EAQ88665.1| CHGG_05284 [Chaetomium globosum CBS 148.51]
  misc_feature (8)..(326): NCBI GI: 239615318 Blast Desc: short-chain dehydrogenase/reductase [Ajellomyces dermatitidis ER-3]
  misc_feature (8)..(326): NCBI GI: 261188878 Blast Desc: short-chain dehydrogenase/reductase [Ajellomyces dermatitidis SLH14081] gi|239591994|gb|EEQ74575.1| short-chain dehydrogenase/reductase [Ajellomyces dermatitidis SLH14081]
  misc_feature (2)..(324): NCBI GI: 169595156 Blast Desc: SNOG_00312 [Phaeosphaeria nodorum SN15] gi|111070687|gb|EAT91807.1| SNOG_00312 [Phaeosphaeria nodorum SN15]
  misc_feature (12)..(326): NCBI GI: 116181234 Blast Desc: CHGG_01245 [Chaetomium globosum CBS 148.51] gi|88185542|gb|EAQ93010.1| CHGG_01245 [Chaetomium globosum CBS 148.51]
  misc_feature (13)..(335): NCBI GI: 145612853 Blast Desc: MGG_08389 [Magnaporthe grisea 70-15] gi|145019954|gb|EDK04182.1| MGG_08389 [Magnaporthe grisea 70-15]
  misc_feature (15)..(326): NCBI GI: 240108554 Blast Desc: oxidoreductase,short chain dehydrogenase, [Coccidioides posadasii C735 delta SOWgp]
  misc_feature (14)..(326): NCBI GI: 258563218 Blast Desc: [Uncinocarpus reesii 1704] gi|237907861|gb|EEP82262.1| [Uncinocarpus reesii 1704]
  misc_feature (15)..(326): NCBI GI: 119186485 Blast Desc: CIMG_03290 [Coccidioides immitis RS]
  misc_feature (1)..(325): NCBI GI: 121712004 Blast Desc: ACLA_061530 [Aspergillus clavatus NRRL 1] gi|119401769|gb|EAW12191.1| ACLA_061530 [Aspergillus clavatus NRRL 1]
MSSTRELWHDSRNPPKDPVDHSFKDKTVLVTGAHGNSLGHHAAVKYAASGANPLILAVRSQEKGEKTKSAIIQQTGCSAEVFVVEILDMASFASVKRFAQRISARFPVLHVVQNAGGVAPWDYEKSPEGYEMSLQIDVLSTTLLTLLLMPKLQYTATASPANDYLPHVSFLDSIAIFDVTGKMLSTDGQTLIQRCDDRSKWDAVKQYYLVKLATWYAAKGVADQAKESGVVVNATCPGLCSTNMTRSLPFLYRKFMAARYFFLGRTPEQGARSLVSATSLGPESHGKFWNNDKFHEMTPFLDSEQSTALYHETWEEIISILREHLPSGMTQYQSTI

SEQ ID NO: 6121 - DNA, 636 bp, Muscodor strobelii
  misc_feature: SGI cDNA ID NO. 561773
  misc_feature: Elevated expression when VOC is produced
  misc_feature: Encodes the peptide sequence at SEQ ID NO 6122
atgggtatccacatcaatgacaacatccgatacctaagcctcgatgatcctaccggcgctggtcacagcgaacagttgaagataagagcgcttcagctgcgcaaggcccatgaagagctcgcacgaatccaaaccaccacgtcctcgcttgctacggtaccgaaatatgctatcatctggttcttgcctggcaccgtgcgttccggtcatctgaaaagttacatcgcagactgcgaccttcagacgatcgacaccactgaggcgatcatccaaatgcacttcggactgcagaccgagttcaaaaatgctgctaacttggccaattcggccacattcactaccgggtttatctatgtgcgatctctcctccgtgccatgagcgagatccagtctgctttgaccaagaacattgccaacatggccaaaaataacgaggccgcggaaaataagccgcacttcgccctgaacaagtacatcaatgccgctcgcaaaggaggaaagtacaacggtctagcaaaaggtgcaaaatcaccgctagctaaggagttcaccccagaggagtatgctgagtggatggaatgtggtgactggtacgatatggctctgagaggtcgccctacaagagtcaagtggtaa

SEQ ID NO: 6122 - protein, 211 aa, Muscodor strobelii
  misc_feature: SGI Peptide ID NO. 561773
  misc_feature: Useful for introducing or modulating the production of volatile compounds
MGIHINDNIRYLSLDDPTGAGHSEQLKIRALQLRKAHEELARIQTTTSSLATVPKYAIIWFLPGTVRSGHLKSYIADCDLQTIDTTEAIIQMHFGLQTEFKNAANLANSATFTTGFIYVRSLLRAMSEIQSALTKNIANMAKNNEAAENKPHFALNKYINAARKGGKYNGLAKGAKSPLAKEFTPEEYAEWMECGDWYDMALRGRPTRVKW

SEQ ID NO: 6123 - DNA, 3824 bp, Muscodor strobelii
  misc_feature: SGI EST ID NO. CUFF.15454.0
  misc_feature: Variant of the nucleotide sequence at SEQ ID NO 6121
ataatcttatgcgcctcaaggtccaactcctgcgtatgttcgagcgggcatgcggtcgcctggcgaaccatgaacttgttgagccttgaaaaagcctcagcgccaagttggcaacgcaagtatgtctcaatctttggtacatccaaccaactctccatgtcctcgcctcgggccgcgaaatcttgctcgacagcttctgcaagctgctggctaggatcagctgcaagaaggctatcgcccagcacgtagccgtgatctcggaactccgtatgtgcttcaacgagagcttgggcaagccgcacattggcgagccgcgggctgtgctgaaggcgctgaaaaactcgttgttctgcctcacgcgcgtcaggtcgagttgacggcgcgtcacgaaaccacggagaaggtgcataaggcattgtgacaattcgacagagattcaccatgtagtccgcacatgcccagtacagctgtcctgcgaaggtatgctgcccttcgccgatatacgcttcaatctcctgcgggggtttgcaaatgttcactgcgcgagttgagtcgagccaaatgccatagtccagccgagggctgagaggacctgaagggaccgatgtcttggtaggtgacgcatctattgagagtcgaccgacacaacctggtgcacgagcccttttcgaattcttatgccttgagtccaatggcaagacctcattaaactcctgatcattgcacaccctgtctgatgtagcatggtggacgacaagatcatcatcttcgctttcttcgcctaaagtagaggcatcaatcccagcgatgcccgcagcagcgcgaacagcctggatcaaaactgctcgatcactctgccgtgtcttcttcacgatttgggcaatggcatctttgagacgctggttctcatcgcgcatttcattggacacctgggcttgccgtttacgaaagcgcgcctgtgacaatctaccacgctcgcgccgtcgctgctcaaattgtcagcattgttggagttacgactaccttcaaagaggctctattgtgaataatcaaaatacgcacgtccaattctttctctgccgctgattgcccagtcagactgctgctgtcgcctggggatgcattcattgtggcaggggtctgaggcgattcttggcgaagccaacagtgagaatggatgttgatcgtatgcctgtttctctccaatatatgtgatattatctggcccttgcagctttatcatggactcgaagcatgtgcgcttacgacttcctcgcttccataaagtaggtagcgcggtcggtacagattacacacgagcgtaccatataacccttacccattgccattatggtggttacgtgagcgtcggttacgtgatcggagggtatttcagccgaagtccgttgacagccataggcgatggcaacataataacacgcaactcgctttatccaatgggaaccactagcaacaaatactcgaaaggctggcggcgtgctcccaatttcttgcgctctaatattcatcgggattgcattagagacgatcatttcgtcgcgaaacgaattcagagatctaagcccggttccgatatcttagctcagagcgcaaagtagcagatgggcgagtgggcagtgccagtctagcactgtctaagaaaaccggccagcgcagtggaacaaacatacttcattgattgttgtacaatcaaaatatcaaacttacctggaatggcaaacgcatgcgaaacatgattgcaagaatcagagtgcatcaggcctcttgcgccgttgccttaacctcgtggcttgcgaggccagtacaggacgacatatttgcgcaaatccgcaacatggtagatctttcagcagagtagcaaagatttcggtgacaaacagaacatactactagccgggtacaatgcctcacatccataagcttgcatgttctaccaacgtaagtaactaaatgggtggcagatgcatgcgaggaaccagacttctgtaacgtcatctatctagccattcctccaataaatggcaagcactcggtcctcagatgcttcttaacttattctccagggaattgctaaccaaaactcaccttctattcgcgagaggaaggtgcagtctgtgaatctacgctatgaggtaattccgatgaaataggaagtgaaaaggactcatgatcataaaacagcagctttcatttcaacacatcagataagagaacatccgtatttggtgtacgcaattccagatacaaagatgtcgatcttgggttacttcaacccagctccacgaatctccaaaatccaagagcggcctcgaaagtgattagatgagtctatcccagacaacatctgcatcattacctgtgtctgcggctcgatctgaagagtatgaggctgagaagcatctggccctgacattttacaggtcatctgtatcaatcaccggcgacactggctttgggctgccagcctcccaagaaatcagtcacagcagaatgcccttagctcctcatccatgtttctgcaccattcgaatcttatggcaagaatagaatgccttgatctcaagactcgttcgtggacagcgataccaatctcaaacggctaaaatcatctcttttgaataccgacacgccagcgttaccagagatcagaccatcttcactcctttctctctttgcctcaccaactcacgtcgactggcttcccctacccctctcatagtcacagcaaaactctactacatcttgctttcaaattcttgccgtcgagaacaccgtcttcgctctccttatatatactagaagattccatcccaatagcccaagccgacgggtaatcagcaaccaagatcccgttcaaggtctcgagatgggtatccacatcaatgacaacatccgatacctaagcctcgatgatcctaccggcgctggtcacagcgaacagttgaagataagagcgcttcagctgcgcaaggcccatgaagagctcgcacgaatccaaaccaccacgtcctcgcttgctacggtaccgaaatatgctatcatctggttcttgcctggcaccgtgcgttccggtcatctgaaaagttacatcgcagactgcgaccttcagacgatcgacaccactgaggcgatcatccaaatgcacttcggactgcagaccgagttcaaaaatgctgctaacttggccaattcggccacattcactaccgggtttatctatgtgcgatctctcctccgtgccatgagcgagatccagtctgctttgaccaagaacattgccaacatggccaaaaataacgaggccgcggaaaataagccgcacttcgccctgaacaagtacatcaatgccgctcgcaaaggaggaaagtacaacggtctagcaaaaggtgcaaaatcaccgctagctaaggagttcaccccagaggagtatgctgagtggatggaatgtggtgactggtacgatatggctctgagaggtcgccctacaagagtcaagtggtaaactagcgaagcgtagataggatagacaaaagccgaatcgattgccaatgcaccaatgcaattgccccttccgtggatatccgtcgaccgtccgatcagccaaagtgatgtgcatgagagcggcgtcttgatttcccaaggtcaattcgaacacacccgtcatctgatcagtctgccgccgctatatcaccttccatggaagccacaaacttgtgccccccattcaccctaccttgagcttagctgattgtgcgctagagatacgccctaacaaactcattatggagattgttggaatcgga

SEQ ID NO: 6124 - DNA, 1173 bp, Muscodor strobelii
  misc_feature: SGI cDNA ID NO. 561774
  misc_feature: Encodes the peptide sequence at SEQ ID NO 6125
atgaatgcatccccaggcgacagcagcagtctgactgggcaatcagcggcagagaaagaattggaccgacggcgcgagcgtggtagattgtcacaggcgcgctttcgtaaacggcaagcccaggtgtccaatgaaatgcgcgatgagaaccagcgtctcaaagatgccattgcccaaatcgtgaagaagacacggcagagtgatcgagcagttttgatccaggctgttcgcgctgctgcgggcatcgctgggattgatgcctctactttaggcgaagaaagcgaagatgatgatcttgtcgtccaccatgctacatcagacagggtgtgcaatgatcaggagtttaatgaggtcttgccattggactcaaggcataagaattcgaaaagggctcgtgcaccaggttgtgtcggtcgactctcaatagatgcgtcacctaccaagacatcggtcccttcaggtcctctcagccctcggctggactatggcatttggctcgactcaactcgcgcagtgaacatttgcaaacccccgcaggagattgaagcgtatatcggcgaagggcagcataccttcgcaggacagctgtactgggcatgtgcggactacatggtgaatctctgtcgaattgtcacaatgccttatgcaccttctccgtggtttcgtgacgcgccgtcaactcgacctgacgcgcgtgaggcagaacaacgagtttttcagcgccttcagcacagcccgcggctcgccaatgtgcggcttgcccaagctctcgttgaagcacatacggagttccgagatcacggctacgtgctgggcgatagccttcttgcagctgatcctagccagcagcttgcagaagctgtcgagcaagatttcgcggcccgaggcgaggacatggagagttggttggatgtaccaaagattgagacatacttgcgttgccaacttggcgctgaggctttttcaaggctcaacaagttcatggttcgccaggcgaccgcatgcccgctcgaacatacgcaggagttggaccttgaggcgcataagattattaagttattgatcaagaatctcgccgagagctatacctgctttgggaacggccctcgatggcgagccgagtgcgttgctgttatgcttggtttcggtcaacgtcagcaatccgcagtttag

SEQ ID NO: 6125 - protein, 390 aa, Muscodor strobelii
  misc_feature: SGI Peptide ID NO. 561774
  misc_feature (15)..(376): NCBI GI: 256722560 Blast Desc: NECHADRAFT_85339 [Nectria haematococca mpVI 77-13-4]
  misc_feature (22)..(381): NCBI GI: 256728039 Blast Desc: NECHADRAFT_101197 [Nectria haematococca mpVI 77-13-4]
  misc_feature (24)..(381): NCBI GI: 261360575 Blast Desc: conserved [Verticillium albo-atrum VaMs.102]
  misc_feature (14)..(368): NCBI GI: 46130876 Blast Desc: FG08993.1 [Gibberella zeae PH-1]
  misc_feature (17)..(380): NCBI GI: 256720127 Blast Desc: [Nectria haematococca mpVI 77-13-4]
  misc_feature (29)..(208): NCBI GI: 46109780 Blast Desc: FG01772.1 [Gibberella zeae PH-1]
MNASPGDSSSLTGQSAAEKELDRRRERGRLSQARFRKRQAQVSNEMRDENQRLKDAIAQIVKKTRQSDRAVLIQAVRAAAGIAGIDASTLGEESEDDDLVVHHATSDRVCNDQEFNEVLPLDSRHKNSKRARAPGCVGRLSIDASPTKTSVPSGPLSPRLDYGIWLDSTRAVNICKPPQEIEAYIGEGQHTFAGQLYWACADYMVNLCRIVTMPYAPSPWFRDAPSTRPDAREAEQRVFQRLQHSPRLANVRLAQALVEAHTEFRDHGYVLGDSLLAADPSQQLAEAVEQDFAARGEDMESWLDVPKIETYLRCQLGAEAFSRLNKFMVRQATACPLEHTQELDLEAHKIIKLLIKNLAESYTCFGNGPRWRAECVAVMLGFGQRQQSAV

SEQ ID NO: 6126 - DNA, 4840 bp, Muscodor strobelii
  misc_feature: SGI EST ID NO. CUFF.15453.1
  misc_feature: Variant of the nucleotide sequence at SEQ ID NO 6124
ccttaggtatcggatgttgtcattgatgtggatacccatctcgagaccttgaacgggatcttggttgctgattacccgtcggcttgggctattgggatggaatcttctagtatatataaggagagcgaagacggtgttctcgacggcaagaatttgaaagcaagatgtagtagagttttgctgtgactatgagaggggtaggggaagccagtcgacgtgagttggtgaggcaaagagagaaaggagtgaagatggtctgatctctggtaacgctggcgtgtcggtattcaaaagagatgattttagccgtttgagattggtatcgctgtccacgaacgagtcttgagatcaaggcattctattcttgccataagattcgaatggtgcagaaacatggatgaggagctaagggcattctgctgtgactgatttcttgggaggctggcagcccaaagccagtgtcgccggtgattgatacagatgacctgtaaaatgtcagggccagatgcttctcagcctcatactcttcagatcgagccgcagacacaggtaatgatgcagatgttgtctgggatagactcatctaatcactttcgaggccgctcttggattttggagattcgtggagctgggttgaagtaacccaagatcgacatctttgtatctggaattgcgtacaccaaatacggatgttctcttatctgatgtgttgaaatgaaagctgctgttttatgatcatgagtccttttcacttcctatttcatcggaattacctcatagcgtagattcacagactgcaccttcctctcgcgaatagaaggtgagttttggttagcaattccctggagaataagttaagaagcatctgaggaccgagtgcttgccatttattggaggaatggctagatagatgacgttacagaagtctggttcctcgcatgcatctgccacccatttagttacttacgttggtagaacatgcaagcttatggatgtgaggcattgtacccggctagtagtatgttctgtttgtcaccgaaatctttgctactctgctgaaagatctaccatgttgcggatttgcgcaaatatgtcgtcctgtactggcctcgcaagccacgaggttaaggcaacggcgcaagaggcctgatgcactctgattcttgcaatcatgtttcgcatgcgtttgccattccaggtaagtttgatattttgattgtacaacaatcaatgaagtatgtttgttccactgcgctggccggttttcttagacagtgctagactggcactgcccactcgcccatctgctactttgcgctctgagctaagatatcggaaccgggcttagatctctgaattcgtttcgcgacgaaatgatcgtctctaatgcaatcccgatgaatattagagcgcaagaaattgggagcacgccgccagcctttcgagtatttgttgctagtggttcccattggataaagcgagttgcgtgttattatgttgccatcgcctatggctgtcaacggacttcggctgaaataccctccgatcacgtaaccgacgctcacgtaaccaccataatggcaatgggtaagggttatatggtacgctcgtgtgtaatctgtaccgaccgcgctacctactttatggaagcgaggaagtcgtaagcgcacatgcttcgagtccatgataaagctgcaagggccagataatatcacatatattggagagaaacaggcatacgatcaacatccattctcactgttggcttcgccaagaatcgcctcagacccctgccacaatgaatgcatccccaggcgacagcagcagtctgactgggcaatcagcggcagagaaagaattggaccgacggcgcgagcgtggtagattgtcacaggcgcgctttcgtaaacggcaagcccaggtgtccaatgaaatgcgcgatgagaaccagcgtctcaaagatgccattgcccaaatcgtgaagaagacacggcagagtgatcgagcagttttgatccaggctgttcgcgctgctgcgggcatcgctgggattgatgcctctactttaggcgaagaaagcgaagatgatgatcttgtcgtccaccatgctacatcagacagggtgtgcaatgatcaggagtttaatgaggtcttgccattggactcaaggcataagaattcgaaaagggctcgtgcaccaggttgtgtcggtcgactctcaatagatgcgtcacctaccaagacatcggtcccttcaggtcctctcagccctcggctggactatggcatttggctcgactcaactcgcgcagtgaacatttgcaaacccccgcaggagattgaagcgtatatcggcgaagggcagcataccttcgcaggacagctgtactgggcatgtgcggactacatggtgaatctctgtcgaattgtcacaatgccttatgcaccttctccgtggtttcgtgacgcgccgtcaactcgacctgacgcgcgtgaggcagaacaacgagtttttcagcgccttcagcacagcccgcggctcgccaatgtgcggcttgcccaagctctcgttgaagcacatacggagttccgagatcacggctacgtgctgggcgatagccttcttgcagctgatcctagccagcagcttgcagaagctgtcgagcaagatttcgcggcccgaggcgaggacatggagagttggttggatgtaccaaagattgagacatacttgcgttgccaacttggcgctgaggctttttcaaggctcaacaagttcatggttcgccaggcgaccgcatgcccgctcgaacatacgcaggagttggaccttgaggcgcataagattattaagttattgatcaagaatctcgccgagagctatacctgctttgggaacggccctcgatggcgagccgagtgcgttgctgttatgcttggtttcggtcaacgtcagcaatccgcagtttagtcgtcaaaatggtgtctttcgacactcgccgagtcaccttctcgcagagatgctcactctcacgccacggatttcgctcaaggttattcacaagttacgctaccatggcgcgatttggaaacgatcatggaacctgcactaggcagggtcatgcctcctagtaacgtactacatctgtcgaacgatgttcatgaaatcgtcgggctcttgagtgccacgtcgattccttacaaacagatcactagggcatctaagcaatgaagatcagactttcctcaacctctgtgcgaggaagcgcagccacaagcccgttaataatgacaaatgtctagatggctgtatagactacatgaccgtcagtgaaacgcgagcaacgcgtgacaccatatcatcgggcaggcatgcacacggcacccgagactaacccaaaccgcgggggttccctgggcaacttcaaccatttgtggcacttttgctgtcgacaaatcataaaccttgttcaacatagttgctggcatgatcgtcagacactcactcgcattaagagctcatcgaacggaatacgcggaagtctttgactggcgtctcgaccactgcccgttcttatccttctcgccgactacctaggtgctctaagggatctttcataacttcgcatgctcaattgaataaccaggcgcgcagtatgtcaaacgagtgcctgtcaggtctgacggacgtgtttatccccataccgaaagccagcccacatcatgcaccactgctctactcattgactcatgcctgtgagcggttcttgctgcaactctatcgagatacttgccaagcactccttcgcggcgtcccattcatgtgaccttggcaagtctcaaattctgcccttacgcctgctccaatatcctagccttgcgcgagagttactggcaatgggtcctgttgataattcatagttaccatgagtatatgtattgcagggggtatgtcgagctgatagttgactttcccttctcagcctcccatcctgcaaacacattcggggcggcgtgaggttgtcggtagctttttccactgtgaaggccattgcgctgctgttctaacatcgagcgctgcagcaacaacgagctcagattaaccctcaagcacgccgagcccaactagtgaaagcagtgtgagtacgacaatgacgcgagatgggtcggcatcgagcctaagtgaaagtacacctacaacgagtgctagcaacgggtttacgacgtcgacgcgcgacagagaagatgccactgtgacctagaatagcaccataagcacaagcgcattgaccacgggcaacgacgctgcatctaatccccccagcgatgtagcacgcggaagcgtaattgatagtagcaaagcctagatcgcggggcctgtcgtaggaggtttcttagtatttgtcatatttattattggcccatggtactatcgaaggagaaagcagcggatgggcactcagggacgcttcgagaaggtggagctgccaggtgaaggaatgaggaacgtggtacatgaaacagctgccaaagacaatatggctgaggtaacaactcgggaaaaggttcatgaggctcagagcgatggagcgacggcatcaaggcctttgcccggcgacctacctagggaaggggaatagaaggacaaacgcattttcaaattagtattcactggactcgctgctcagctcaaagcttgatcatcacaaaaccaccatgcatctgcaataggctctattcaacgcctctacattctcgcaggagatgattgccttagcaagctattcagcatagtctcgttggtgatatcttgaccaccgtgcgattcggcataatcccg

SEQ ID NO: 6127 - DNA, 816 bp, Muscodor strobelii
  misc_feature: SGI cDNA ID NO. 561775
  misc_feature: Encodes the peptide sequence at SEQ ID NO 6128
atgaaagaagcaatggcaatcaacgagaaaacaccattcgtcgccgaagaggaagtaaacgaaaagcaccaactcgcaccgttcctgaccatcccagcctcaatccgcaatcacatatatcgctatatcataaaggaggagaaaatcacactttgggttgtcaaaatgagagcgatgaaagtgatgcaaggtaaacttaccatattgacgccaaatgtcttctattccgaaatcaagggacttttatacgtcaatcaccaaacctaccgagaatatagcgcgatcttgtacagttcgttccatttcaatctctgcagtctgaactggggcatcatcgacgagcaacaggtgctcatcttagaagagttactcgattgcatcggggacaacatcgcaagtcaattgccatgcattagcatctcgttccccgcaatcaaagacactacgaaagacccttggtacacgaaactactatccaacctcagctggaaccagccctccaagctgcgacctgatgggcttcgcgctctgcagctgctgaaagagcgatgtacaggacttcaaaagctccgcgcatatctattctacgggcacggattattggaaaacgagtaccaaggcgcaaaactgatgtcgagtgcactgtccgagatcaatacctaccttgcgccaatgccctcgttgaaggtggtttggatttacaacagaactggcagggatctacatgccgaaacgcaggagaggatgaggagctacgggtggacggtgcaaagactttctcgttttacgactactggcgaagtttacagttactga

SEQ ID NO: 6128 - protein, 271 aa, Muscodor strobelii
  misc_feature: SGI Peptide ID NO. 561775
  misc_feature (28)..(198): NCBI GI: 145252170 Blast Desc: An16g02860 [Aspergillus niger] gi|134083143|emb|CAK48595.1| [Aspergillus niger]
  misc_feature (5)..(256): NCBI GI: 256723009 Blast Desc: NECHADRAFT_86959 [Nectria haematococca mpVI 77-13-4]
MKEAMAINEKTPFVAEEEVNEKHQLAPFLTIPASIRNHIYRYIIKEEKITLWVVKMRAMKVMQGKLTILTPNVFYSEIKGLLYVNHQTYREYSAILYSSFHFNLCSLNWGIIDEQQVLILEELLDCIGDNIASQLPCISISFPAIKDTTKDPWYTKLLSNLSWNQPSKLRPDGLRALQLLKERCTGLQKLRAYLFYGHGLLENEYQGAKLMSSALSEINTYLAPMPSLKVVWIYNRTGRDLHAETQERMRSYGWTVQRLSRFTTTGEVYSY

SEQ ID NO: 6129 - DNA, 2961 bp, Muscodor strobelii
  misc_feature: SGI EST ID NO. CUFF.15438.0
  misc_feature: Variant of the nucleotide sequence at SEQ ID NO 6127
aaaacatcggcatcactatacaatacaggtttatcatctaagacactacaactttttaatctactagttcagcatacctgccttttctgagcagacgcgctggaagtacacgtgccatgaaagaagcaatggcaatcaacgagaaaacaccattcgtcgccgaagaggaagtaaacgaaaagcaccaactcgcaccgttcctgaccatcccagcctcaatccgcaatcacatatatcgctatatcataaaggaggagaaaatcacactttgggttgtcaaaatgagagcgatgaaagtgatgcaaggtaaacttaccatattgacgccaaatgtcttctattccgaaatcaagggacttttatacgtcaatcaccaaacctaccgagaatatagcgcgatcttgtacagttcgttccatttcaatctctgcagtctgaactggggcatcatcgacgagcaacaggtgctcatcttagaagagttactcgattgcatcggggacaacatcgcaagtcaattgccatgcattagcatctcgttccccgcaatcaaagacactacgaaagacccttggtacacgaaactactatccaacctcagctggaaccagccctccaagctgcgacctgatgggcttcgcgctctgcagctgctgaaagagcgatgtacaggacttcaaaagctccgcgcatatctattctacgggcacggattattggaaaacgagtaccaaggcgcaaaactgatgtcgagtgcactgtccgagatcaatacctaccttgcgccaatgccctcgttgaaggtggtttggatttacaacagaactggcagggatctacatgccgaaacgcaggagaggatgaggagctacgggtggacggtgcaaagactttctcgttttacgactactggcgaagtttacagttactgatcttgtgcttagtgggaagggtggtgtccttgttagtgcccgggctttgtgcttcagggcggtgatggtcgagcctcgctatattacaaccgtatcgatcgcaattcgagatatgtatacacgaatttggataatttatagtgggctgttcgcctcctggaggctatctagatgcttagtgtgcatgcgaatggtggagaaagtaagatataaaaaaaagagtggcgttgatgagaatcgaactcatgtttcttcgggccgttgagttgtctttcgactttaccacaacgaagtgtactaaccactatacgacaacacctgatcatatttctgcagaaatcaaaaaaggatatatgtctcatgccaaattgccgaaaatttcgcagtgtttgtctatctaacctaacctaagtggagcgattatactgaggaatgagcaaattaagtaattgtttcccacgaagagatttcatatttgacggccaaaatctaacacatttggtcctaactatcttgctcttgcgcatggaaatgggccctcctgttgctttcaaagcgcgatacgcagtaatgcgtagtgtatgaatgggtatcatatagtctaatctacaatgctgtacattttccaagccccggaaatgctcctgtatggcgttgatcgtcaattcccaagtagtatacaagatctatatccagagaaaccaaaaacgcctcgctcgctatacacattatatgtcttatgctccctctgtgaatgctggccgtaatgataatcgcttgtgggcgctgttgaagatatgcgcaccaacacaagacgccttcctctaaacttcttccgagcccgccggtgctcatttttctgttgagtcgcacatgtctccgtctgcttgtttctgttttgcttcctccgcttgtttggctgccttcttggctctccatgcctccttctttgctgctttcttggcccttacggcttcttgtaccgccgccttctttgcttctttattgtctttgtcgagctcttcggagatgtcgggattaggcagatctgcaaaccgctgccatacgcttgtcatatcttgtagcatctttgcgacttcgagcccgacctgagagttgaggatcttctttttttcggaggagaaggggccgaggacgtatttggagacgtcgttggggtcgcgggagacggggcggtcgatgccgatgccgaggcggtagaagtggccgttggcggcggtgctgggcaaggaagagttgatgctcttgaggccgttgtggccacgggcgctgcggttccagtcgatgagcttgacggcaccgaaagccttctccatctcatcgtacacgatgatcatgcgtagatggatgggctcgacgtcggcatgcagctgcctgaagctgtcccaggccttcttgacgaagggccccgagacgttcatggcggtgggactctgaatgaatgtgtagctgccgccctgggagacgaggcacttgatcttgccccaggccaggcgcctgaaggtgggctggttggggatgtgcttgacggccgcattgagagcatggtggccggcggaatggagtgtgttgtagtagggcgcctggttaccgagactgatgacgaggcagcgggtcgtcgacttgagggcgtcgaggatgggcgccatcctgccgagtaccgtggcgtcgatagttggatgacaagttgacgagttgtgggagtgtctctgcgaaggggctaaattggaggcgccaggcaattcgtggagatgatcttatcaagtacgatgcgacgagatattgtacaatatgatgaaatattttatgtatcaagacagaaatagagggcagagagaagagatggacctaagttggtcgagcccaccattttgatggatttttgtagtcaaaagccggctcaaaggcagctgtgtgagtgcattgttgtctttgtacaaataaaccttgattatgaaggtatcgtcggccggtgactcttcaattctccgataagccacacttccgc

SEQ ID NO: 6130 - DNA, 819 bp, Muscodor strobelii
  misc_feature: SGI cDNA ID NO. 561776
  misc_feature: Reduced expression when VOC is produced
  misc_feature: Encodes the peptide sequence at SEQ ID NO 6131
atggcgcccatcctcgacgccctcaagtcgacgacccgctgcctcgtcatcagtctcggtaaccaggcgccctactacaacacactccattccgccggccaccatgctctcaatgcggccgtcaagcacatccccaaccagcccaccttcaggcgcctggcctggggcaagatcaagtgcctcgtctcccagggcggcagctacacattcattcagagtcccaccgccatgaacgtctcggggcccttcgtcaagaaggcctgggacagcttcaggcagctgcatgccgacgtcgagcccatccatctacgcatgatcatcgtgtacgatgagatggagaaggctttcggtgccgtcaagctcatcgactggaaccgcagcgcccgtggccacaacggcctcaagagcatcaactcttccttgcccagcaccgccgccaacggccacttctaccgcctcggcatcggcatcgaccgccccgtctcccgcgaccccaacgacgtctccaaatacgtcctcggccccttctcctccgaaaaaaagaagatcctcaactctcaggtcgggctcgaagtcgcaaagatgctacaagatatgacaagcgtatggcagcggtttgcagatctgcctaatcccgacatctccgaagagctcgacaaagacaataaagaagcaaagaaggcggcggtacaagaagccgtaagggccaagaaagcagcaaagaaggaggcatggagagccaagaaggcagccaaacaagcggaggaagcaaaacagaaacaagcagacggagacatgtgcgactcaacagaaaaatga

SEQ ID NO: 6131 - protein, 272 aa, Muscodor strobelii
  misc_feature: SGI Peptide ID NO. 561776
  misc_feature (77)..(185): Pfam Id: PF01195 Pfam Desc: Peptidyl-tRNA hydrolase
  misc_feature (11)..(204): NCBI GI: 256728605 Blast Desc: NECHADRAFT_50703 [Nectria haematococca mpVI 77-13-4]
  misc_feature (13)..(204): NCBI GI: 46110423 Blast Desc: FG02093.1 [Gibberella zeae PH-1]
  misc_feature (13)..(198): NCBI GI: 261360981 Blast Desc: [Verticillium albo-atrum VaMs.102]
  misc_feature (13)..(205): NCBI GI: 39941232 Blast Desc: MGG_05527 [Magnaporthe grisea 70-15] gi|145022200|gb|EDK06220.1| MGG_05527 [Magnaporthe grisea 70-15]
  misc_feature (8)..(205): NCBI GI: 85104158 Blast Desc: NCU01070 [Neurospora crassa OR74A] gi|18376205|emb|CAD21321.1| related to aminoacyl-tRNA hydrolase [Neurospora crassa] gi|28923230|gb|EAA32446.1| [Neurospora crassa
  misc_feature (10)..(204): NCBI GI: 171693449 Blast Desc: protein product [Podospora anserina] gi|170946673|emb|CAP73476.1| protein product [Podospora anserina]
  misc_feature (10)..(203): NCBI GI: 116198633 Blast Desc: CHGG_07472 [Chaetomium globosum CBS 148.51] gi|88178751|gb|EAQ86219.1| CHGG_07472 [Chaetomium globosum CBS 148.51]
  misc_feature (7)..(195): NCBI GI: 156051272 Blast Desc: SS1G_07043 [Sclerotinia sclerotiorum 1980] gi|154704821|gb|EDO04560.1| SS1G_07043 [Sclerotinia sclerotiorum 1980]
  misc_feature (1)..(199): NCBI GI: 169612189 Blast Desc: SNOG_09213 [Phaeosphaeria nodorum SN15] gi|111062285|gb|EAT83405.1| SNOG_09213 [Phaeosphaeria nodorum SN15]
  misc_feature (7)..(172): NCBI GI: 189190068 Blast Desc: peptidyl-tRNA hydrolase 2 [Pyrenophora tritici-repentis Pt-1C-BFP] gi|187972979|gb|EDU40478.1| peptidyl-tRNA hydrolase 2 [Pyrenophora tritici-repentis
  misc_feature: Useful for introducing or modulating the production of volatile compounds
MAPILDALKSTTRCLVISLGNQAPYYNTLHSAGHHALNAAVKHIPNQPTFRRLAWGKIKCLVSQGGSYTFIQSPTAMNVSGPFVKKAWDSFRQLHADVEPIHLRMIIVYDEMEKAFGAVKLIDWNRSARGHNGLKSINSSLPSTAANGHFYRLGIGIDRPVSRDPNDVSKYVLGPFSSEKKKILNSQVGLEVAKMLQDMTSVWQRFADLPNPDISEELDKDNKEAKKAAVQEAVRAKKAAKKEAWRAKKAAKQAEEAKQKQADGDMCDSTEK

SEQ ID NO: 6132 - DNA, 2961 bp, Muscodor strobelii
  misc_feature: SGI EST ID NO. CUFF.15438.0
  misc_feature: Variant of the nucleotide sequence at SEQ ID NO 6130
gcggaagtgtggcttatcggagaattgaagagtcaccggccgacgataccttcataatcaaggtttatttgtacaaagacaacaatgcactcacacagctgcctttgagccggcttttgactacaaaaatccatcaaaatggtgggctcgaccaacttaggtccatctcttctctctgccctctatttctgtcttgatacataaaatatttcatcatattgtacaatatctcgtcgcatcgtacttgataagatcatctccacgaattgcctggcgcctccaatttagccccttcgcagagacactcccacaactcgtcaacttgtcatccaactatcgacgccacggtactcggcaggatggcgcccatcctcgacgccctcaagtcgacgacccgctgcctcgtcatcagtctcggtaaccaggcgccctactacaacacactccattccgccggccaccatgctctcaatgcggccgtcaagcacatccccaaccagcccaccttcaggcgcctggcctggggcaagatcaagtgcctcgtctcccagggcggcagctacacattcattcagagtcccaccgccatgaacgtctcggggcccttcgtcaagaaggcctgggacagcttcaggcagctgcatgccgacgtcgagcccatccatctacgcatgatcatcgtgtacgatgagatggagaaggctttcggtgccgtcaagctcatcgactggaaccgcagcgcccgtggccacaacggcctcaagagcatcaactcttccttgcccagcaccgccgccaacggccacttctaccgcctcggcatcggcatcgaccgccccgtctcccgcgaccccaacgacgtctccaaatacgtcctcggccccttctcctccgaaaaaaagaagatcctcaactctcaggtcgggctcgaagtcgcaaagatgctacaagatatgacaagcgtatggcagcggtttgcagatctgcctaatcccgacatctccgaagagctcgacaaagacaataaagaagcaaagaaggcggcggtacaagaagccgtaagggccaagaaagcagcaaagaaggaggcatggagagccaagaaggcagccaaacaagcggaggaagcaaaacagaaacaagcagacggagacatgtgcgactcaacagaaaaatgagcaccggcgggctcggaagaagtttagaggaaggcgtcttgtgttggtgcgcatatcttcaacagcgcccacaagcgattatcattacggccagcattcacagagggagcataagacatataatgtgtatagcgagcgaggcgtttttggtttctctggatatagatcttgtatactacttgggaattgacgatcaacgccatacaggagcatttccggggcttggaaaatgtacagcattgtagattagactatatgatacccattcatacactacgcattactgcgtatcgcgctttgaaagcaacaggagggcccatttccatgcgcaagagcaagatagttaggaccaaatgtgttagattttggccgtcaaatatgaaatctcttcgtgggaaacaattacttaatttgctcattcctcagtataatcgctccacttaggttaggttagatagacaaacactgcgaaattttcggcaatttggcatgagacatatatccttttttgatttctgcagaaatatgatcaggtgttgtcgtatagtggttagtacacttcgttgtggtaaagtcgaaagacaactcaacggcccgaagaaacatgagttcgattctcatcaacgccactcttttttttatatcttactttctccaccattcgcatgcacactaagcatctagatagcctccaggaggcgaacagcccactataaattatccaaattcgtgtatacatatctcgaattgcgatcgatacggttgtaatatagcgaggctcgaccatcaccgccctgaagcacaaagcccgggcactaacaaggacaccacccttcccactaagcacaagatcagtaactgtaaacttcgccagtagtcgtaaaacgagaaagtctttgcaccgtccacccgtagctcctcatcctctcctgcgtttcggcatgtagatccctgccagttctgttgtaaatccaaaccaccttcaacgagggcattggcgcaaggtaggtattgatctcggacagtgcactcgacatcagttttgcgccttggtactcgttttccaataatccgtgcccgtagaatagatatgcgcggagcttttgaagtcctgtacatcgctctttcagcagctgcagagcgcgaagcccatcaggtcgcagcttggagggctggttccagctgaggttggatagtagtttcgtgtaccaagggtctttcgtagtgtctttgattgcggggaacgagatgctaatgcatggcaattgacttgcgatgttgtccccgatgcaatcgagtaactcttctaagatgagcacctgttgctcgtcgatgatgccccagttcagactgcagagattgaaatggaacgaactgtacaagatcgcgctatattctcggtaggtttggtgattgacgtataaaagtcccttgatttcggaatagaagacatttggcgtcaatatggtaagtttaccttgcatcactttcatcgctctcattttgacaacccaaagtgtgattttctcctcctttatgatatagcgatatatgtgattgcggattgaggctgggatggtcaggaacggtgcgagttggtgcttttcgtttacttcctcttcggcgacgaatggtgttttctcgttgattgccattgcttctttcatggcacgtgtacttccagcgcgtctgctcagaaaaggcaggtatgctgaactagtagattaaaaagttgtagtgtcttagatgataaacctgtattgtatagtgatgccgatgtttt

SEQ ID NO: 6133 - DNA, 786 bp, Muscodor strobelii
  misc_feature: SGI cDNA ID NO. 561777
  misc_feature: Reduced expression when VOC is produced
  misc_feature: Encodes the peptide sequence at SEQ ID NO 6134
atgtcgtgggcaggcttcaagaagaatgtcaaccgggccaccacccaggtcatgatgaagacgggccacgtcgagaagaccaacgaccgcgactacgaggtcgaggagagacgcttccgcaccatggaggccgccgccctcaggctgcagaaggaggccagagggtatctggattccctgcgagccatgacggcctcacagatgcgcatcgccgagacgatagacgccttctacggagactcgggcgccaaggacggcgtgagcaggagctacaagcaggcagtcgaggacctggacgccgagaccatcaaagccctcgacgggccctacagaacgaccgtgctcgagcccatctcccgattctgcgcctacttccccgacgtcaacgaatgcatcaagaagcgcggccacaaactgctagactacgacgccctgcgcgcaaaagtaaagaagctcgccgagaagcccgacaaggacgtcaccaagctgccccgcaccgagaaggagatggacatggccaaggccgcctacgagcagctcaacacccagctctccgacgagttgccccagcttatcgacatgcgcgtcccctacctcgacccctccttcgaagccctcgtcaagatccagatgcgcttctgcgccgaagcctatagccgcatggcccaggtccagcagtacctcgatgccgatactagggatcagtatgcgcagggtcacttggaccagagggtcgagcaggtgctgcaggagatccgcgagttgagcatcagcggcacggtttga

SEQ ID NO: 6134 - protein, 261 aa, Muscodor strobelii
  misc_feature: SGI Peptide ID NO. 561777
  misc_feature (6)..(230): Pfam Id: PF03114 Pfam Desc: BAR domain
  misc_feature (1)..(261): NCBI GI: 171693447 Blast Desc: protein product [Podospora anserina] gi|170946672|emb|CAP73475.1| protein product [Podospora anserina]
  misc_feature (1)..(261): NCBI GI: 256728777 Blast Desc: [Nectria haematococca mpVI 77-13-4]
  misc_feature (1)..(261): NCBI GI: 156051268 Blast Desc: protein hob3 [Sclerotinia sclerotiorum 1980] gi|154704819|gb|EDO04558.1| protein hob3 [Sclerotinia sclerotiorum 1980]
  misc_feature (1)..(261): NCBI GI: 116198637 Blast Desc: conserved [Chaetomium globosum CBS 148.51] gi|88178753|gb|EAQ86221.1| conserved [Chaetomium globosum CBS 148.51]
  misc_feature (3)..(261): NCBI GI: 145615360 Blast Desc: conserved [Magnaporthe grisea 70-15] gi|145022201|gb|EDK06221.1| conserved [Magnaporthe grisea 70-15]
  misc_feature (1)..(261): NCBI GI: 46110421 Blast Desc: FG02092.1 [Gibberella zeae PH-1]
  misc_feature (1)..(261): NCBI GI: 18376206 Blast Desc: cytosceletal binding protein [Neurospora crassa]
  misc_feature (1)..(261): NCBI GI: 85104154 Blast Desc: Amphiphysin-like, reduced viability upon starvation protein 161 rvs161p [Neurospora crassa OR74A] gi|28923229|gb|EAA32445.1| Amphiphysin-like, reduced viability
  misc_feature (1)..(261): NCBI GI: 261197586 Blast Desc: BAR adaptor protein RVS161 [Ajellomyces dermatitidis SLH14081] gi|225562102|gb|EEH10382.1| BAR domain-containing protein [Ajellomyces capsulatus G186AR] BAR adaptor protein
  misc_feature (1)..(261): NCBI GI: 255943797 Blast Desc: Pc20g01050 [Penicillium chrysogenum Wisconsin 54-1255] gi|211587401|emb|CAP85434.1| Pc20g01050 [Penicillium chrysogenum Wisconsin 54-1255]
  misc_feature: Useful for introducing or modulating the production of volatile compounds
MSWAGFKKNVNRATTQVMMKTGHVEKTNDRDYEVEERRFRTMEAAALRLQKEARGYLDSLRAMTASQMRIAETIDAFYGDSGAKDGVSRSYKQAVEDLDAETIKALDGPYRTTVLEPISRFCAYFPDVNECIKKRGHKLLDYDALRAKVKKLAEKPDKDVTKLPRTEKEMDMAKAAYEQLNTQLSDELPQLIDMRVPYLDPSFEALVKIQMRFCAEAYSRMAQVQQYLDADTRDQYAQGHLDQRVEQVLQEIRELSISGTV

SEQ ID NO: 6135 - DNA, 1662 bp, Muscodor strobelii
  misc_feature: SGI EST ID NO. CUFF.15711.1
  misc_feature: Variant of the nucleotide sequence at SEQ ID NO 6133
cacacgctcacagtggtcagacagtggtgagtgcaggagcccgtgacaccgtcaccaacaagattaggtcgcatcgtcacatccaactctcccaaatcaattgcccattattcctactgttctttcccttcgctacatcctacaacgctcacccacccctcaatcgaattgtccttggcctcatccacccaaccgactgcgagtccgacgctttttcgacatctaacaccccgcgcatctccatctccatctccacccccgttggcgacagaccgaggagccaagaccaagatccaagatccaagattcaagactgagagcacaatcctacgaaaccgcgacacaaccacgacacaaccacgacaatatcgcaaccatgtcgtgggcaggcttcaagaagaatgtcaaccgggccaccacccaggtcatgatgaagacgggccacgtcgagaagaccaacgaccgcgactacgaggtcgaggagagacgcttccgcaccatggaggccgccgccctcaggctgcagaaggaggccagagggtatctggattccctgcgagccatgacggcctcacagatgcgcatcgccgagacgatagacgccttctacggagactcgggcgccaaggacggcgtgagcaggagctacaagcaggcagtcgaggacctggacgccgagaccatcaaagccctcgacgggccctacagaacgaccgtgctcgagcccatctcccgattctgcgcctacttccccgacgtcaacgaatgcatcaagaagcgcggccacaaactgctagactacgacgccctgcgcgcaaaagtaaagaagctcgccgagaagcccgacaaggacgtcaccaagctgccccgcaccgagaaggagatggacatggccaaggccgcctacgagcagctcaacacccagctctccgacgagttgccccagcttatcgacatgcgcgtcccctacctcgacccctccttcgaagccctcgtcaagatccagatgcgcttctgcgccgaagcctatagccgcatggcccaggtccagcagtacctcgatgccgatactagggatcagtatgcgcagggtcacttggaccagagggtcgagcaggtgctgcaggagatccgcgagttgagcatcagcggcacggtttgagcttggacgtaattatacccagatggcttggagggctggaggtgtctgatttggagttctgggctggcatggcataatgggaaggcgagctttgacaagggtcggaaatcggttgggttgtaatcatggaagtagagatagagacatctctcagcatgcattcaacgatcctacgctttatggtcttacatagtagctacgagttatacactacaagacgtgcgggtagaaaagaaacaggcgatggagtatggaaatatgaattcacatattacacagtatccgatttccatcgagatgaaaggagcgattgtaggctttgaaacgacaaacttttatgcgagggctgacaaaatgggagcggaaaagaagcgacaaagcctgccagatactttgtggacgaacgaacctactaccatctctaagaagaacaatataactcgcagaacagcgacatgtttgctaatatgtggttaatagtatcattgaatgccattcct

SEQ ID NO: 6136 - DNA, 1164 bp, Muscodor strobelii
  misc_feature: SGI cDNA ID NO. 561778
  misc_feature: Encodes the peptide sequence at SEQ ID NO 6137
atgccgtccttcaagtctctcctctcaacgtcgcttggcctatcggctcacgtgctcggcgcaaacttgttggtgtctcactatacgggaaagatatactcactctcgttcaacaataatacacttgcaattacaaacacaactaccggtgcgggcacgctaccagcatggctggcgcttgactccggggccaagacggtgtactccgtagatgaggattggaatggtagtggtgtgctggcctcgttcagcataggagcaaatggcgcgttgatacaaaccggcagcctcgtctcatcaggagcgagcgtgcacggcaccccatacgcggatgcaaagttcttcgctactgttgaatatgatccttcgacactcacaacctacaccctacccttccgggccgggaacccggtcctgcaaaagatgaaattcaacatgacagccccaggacccaacccacgtcaaaacgcaccgcacccacattccgccattacggatccaacggggaaatatattcttgttccggatctcggcgcggacctaatccgtatcttcagcatcgacgcagaaacgggcaatctgacagcatgcactccaggtgaagccggagcaggtgatggaccgcgccacggcgctttttggcaagcgagcggcaactcgtctgctggccatattctgtacaccgtaaatgagttaggtaactccgtgagctcatggagcgtcacatatccgcccggtgcctgtctggctctcaagcgactgcagacactgtctacatacaaggcagggagtgtcggcccaactggctccaaagcagcagaggtccacgtcaaggggaactatgtgtatgccgcgaaccgtgccgatcagacttttggaaagcaacaggattctcttgctacctacgccatcgaccctgtcactggggctatatcgtgggtcgaggctacggatgctcatgcgtggttcccaaggacgtttgatatcaactctgcaggcacgcttgttgcggtaggaggccagactagtagcaatgtcgcaattgtagcgagagatccggcgacgggtaaactgggggatctggttgctaacttagctgtcggtacacctggggaggagcagcaggaggacggacttagtgctgttatctgggtaactgagtag

SEQ ID NO: 6137 - protein, 387 aa, Muscodor strobelii
  misc_feature: SGI Peptide ID NO. 561778
  misc_feature (1)..(385): NCBI GI: 85096775 Blast Desc: NCU07143 [Neurospora crassa OR74A] gi|28921813|gb|EAA31090.1| [Neurospora crassa OR74A]
  misc_feature (1)..(385): NCBI GI: 116203385 Blast Desc: CHGG_09577 [Chaetomium globosum CBS 148.51] gi|88178095|gb|EAQ85563.1| CHGG_09577 [Chaetomium globosum CBS 148.51]
  misc_feature (8)..(384): NCBI GI: 171682996 Blast Desc: protein product [Podospora anserina] gi|170941457|emb|CAP67109.1| protein product [Podospora anserina]
  misc_feature (21)..(385): NCBI GI: 39940852 Blast Desc: MGG_05338 [Magnaporthe grisea 70-15] gi|145021965|gb|EDK05985.1| MGG_05338 [Magnaporthe grisea 70-15]
  misc_feature (21)..(384): NCBI GI: 189204656 Blast Desc: 6-phosphogluconolactonase [Pyrenophora tritici-repentis Pt-1C-BFP] gi|187985762|gb|EDU51250.1| 6-phosphogluconolactonase [Pyrenophora tritici-repentis
  misc_feature (21)..(384): NCBI GI: 169609903 Blast Desc: SNOG_08043 [Phaeosphaeria nodorum SN15] gi|111063199|gb|EAT84319.1| SNOG_08043 [Phaeosphaeria nodorum SN15]
  misc_feature (6)..(384): NCBI GI: 261360964 Blast Desc: conserved [Verticillium albo-atrum VaMs.102]
  misc_feature (21)..(384): NCBI GI: 121710114 Blast Desc: conserved [Aspergillus clavatus NRRL 1] gi|119400823|gb|EAW11247.1| conserved [Aspergillus clavatus NRRL 1]
  misc_feature (1)..(384): NCBI GI: 70989609 Blast Desc: conserved [Aspergillus fumigatus Af293] gi|66847285|gb|EAL87616.1| conserved [Aspergillus fumigatus Af293] gi|159129061|gb|EDP54175.1| conserved [Aspergillus A1163]
  misc_feature (1)..(384): NCBI GI: 119480243 Blast Desc: NFIA_082000 [Neosartorya fischeri NRRL 181] gi|119408304|gb|EAW18253.1| conserved [Neosartorya fischeri NRRL 181]
  misc_feature (156)..(361): SWISSPROT Homolog: EC 3.1.1.31 6-phosphogluconolactonase
MPSFKSLLSTSLGLSAHVLGANLLVSHYTGKIYSLSFNNNTLAITNTTTGAGTLPAWLALDSGAKTVYSVDEDWNGSGVLASFSIGANGALIQTGSLVSSGASVHGTPYADAKFFATVEYDPSTLTTYTLPFRAGNPVLQKMKFNMTAPGPNPRQNAPHPHSAITDPTGKYILVPDLGADLIRIFSIDAETGNLTACTPGEAGAGDGPRHGAFWQASGNSSAGHILYTVNELGNSVSSWSVTYPPGACLALKRLQTLSTYKAGSVGPTGSKAAEVHVKGNYVYAANRADQTFGKQQDSLATYAIDPVTGAISWVEATDAHAWFPRTFDINSAGTLVAVGGQTSSNVAIVARDPATGKLGDLVANLAVGTPGEEQQEDGLSAVIWVTE

SEQ ID NO: 6138 - DNA, 4270 bp, Muscodor strobelii
  misc_feature: SGI EST ID NO. CUFF.15448.1
  misc_feature: Variant of the nucleotide sequence at SEQ ID NO 6136
ctgaaggctgccgatccagtcggttgttccggtctgcaatatcgtgccgccgatcttactcaagagtggcgcgagagcgtcttggagctgcgtcttgttgccatggtagatgccttccaattgcgtcattcttgaagtacccataacacgcatgttgagctctgccggcatggtgtttcgagtatactcctcaagcgcttccaaagcggccacggatgtgttctgcttccatggtacattggctacgaaccatgtcaagttcgctgggggcgcgaatgtgtcccattcgaacgatgtgacgatgccgaagtttgaacctgcgcctcgcatcccccaaaacagatcagggttctccgtttttgagcagtgaacaatggttccattagctaatgccacattgagaccagatatccaatcaagcgctaagccgtgagtatgagagctcaggccgaagccaccatgtaaggcgtgccctgcgattccgacactgcataccttgtcagcatacaacacctcaaatacatagacgtcacataccctgggcaagtgccatgagcaatagcacgtttaccctgagcccaaagctcgaccgcaagatgacctaatcgtgcgcctggctctgctgtggcaatatttgtttttgtgtctagtttgatcgcatacatgcgatctagctggatgataagatgcccatcttcgcctcccagcccatacgatccgtaactatggccgccgcattttgctgtaactttatagcccatttttgctccgcaaacgatggcattctggatttgctccgttgtggttgggacggcgacgatatcaggcttgaaggctaacaaggagttgaacggtcttgtatccctctcccaatccgtcgaattgaattggtcgacagctgtgtcagcttgagacaaacagtctattacaacgccccttctatccagcgccgccgctctagaaagcccgacgatgagcccaagaccgattagtactttcatcttgaattgctttctagcacggtcgacctgatttatcgggtgcccctcgctcagaagatactgactatgcttcgggtcgtggaggaatgtccctttgaggtccctttgactcatggcattctgcgactactggcatataacatcaacggagccaggtcagatcaccgtacggcaatatggtccgattcttaatatcaggcggccttggctatggaaacggtacttgttttactctcgacgcccacccgcgtggggatctgcaaaatgtcccaccttgtgctggagcgtctagactaacctggtgaaacgaattccgcgtatgctgactttcctgactggcggccttgcaatagtcactatctgcgctgaagatggtggcaacattgacacattggctcgctatgcgactctatttcaacgagagtcccatgcgccgcgtctatctagacggccgatagccgccagacgatcatgtggccacgttctcgggatctacatgccatccagattacaagcaaaccgcgtcggtagatttcaactccagcatctcaagctcggtatcttgccacgtcgcaactgacatacagtccgctaccatactgctcatccccggcatatgcttcctggcggacctgggttgaggctcccctaaggaatgggccgattcgtgattgttgggatcatgcagcggctgctcctacagtggcggatcgcttgcggtctcttcgagcgatatacccgtgggtacggaatgaatcaacaatgcgaaacaattacccggtcgttaattatcgcgattgcgatcatcatatacaattgccctgtaccccatcatctgcaaatgattatcgcccaaggtcatttacatgggaaattgccgtgcggctgagtgatattatacacctgattttcatctatatttctatatatctcgtcagctgcacattgaatacatagttccggtgaaaggcaatgtagctatcgcgaggcctgctcacaaaataatcgccgagtaacgattgtctcccacggttcccacggcgccgacattgtcgcttatgcacatgcccagaaacgaagaaagataacacttcaaaaggctacgaaaatcatccccgcagtcccagtttcctggatcggcgacgtcaagctgcggatgaatgcacatatgccatacaagtcaattagcctcatacagcccctacatgtacaatacgtgttccacccatccgggccggcataattgggcagttcatccggacaattaccatttgcggagcggaggcgatctccaagcacgaactcgggggtttttggtgaacttgcatcctcgtagtattcccatgatcgcccggcaagatccgagcaccacctctcgagagctgagactcagaactcgattggggattcgcagctatggtctccggcgtgggcgatcgagtctaacacatgtaagtgacagactcgcctcatccaacccaccctgatgcgaatctttttcttctctctctaccgatatcgaggtgcgtgcttggcatagagataagcaatttttgaaatgccgtccttcaagtctctcctctcaacgtcgcttggcctatcggctcacgtgctcggcgcaaacttgttggtgtctcactatacgggaaagatatactcactctcgttcaacaataatacacttgcaattacaaacacaactaccggtgcgggcacgctaccagcatggctggcgcttgactccggggccaagacggtgtactccgtagatgaggattggaatggtagtggtgtgctggcctcgttcagcataggagcaaatggcgcgttgatacaaaccggcagcctcgtctcatcaggagcgagcgtgcacggcaccccatacgcggatgcaaagttcttcgctactgttgaatatgatccttcgacactcacaacctacaccctacccttccgggccgggaacccggtcctgcaaaagatgaaattcaacatgacagccccaggacccaacccacgtcaaaacgcaccgcacccacattccgccattacggatccaacggggaaatatattcttgttccggatctcggcgcggacctaatccgtatcttcagcatcgacgcagaaacgggcaatctgacagcatgcactccaggtgaagccggagcaggtgatggaccgcgccacggcgctttttggcaagcgagcggcaactcgtctgctggccatattctgtacaccgtaaatgagttaggtaactccgtgagctcatggagcgtcacatatccgcccggtgcctgtctggctctcaagcgactgcagacactgtctacatacaaggcagggagtgtcggcccaactggctccaaagcagcagaggtccacgtcaaggggaactatgtgtatgccgcgaaccgtgccgatcagacttttggaaagcaacaggattctcttgctacctacgccatcgaccctgtcactggggctatatcgtgggtcgaggctacggatgctcatgcgtggttcccaaggacgtttgatatcaactctgcaggcacgcttgttgcggtaggaggccagactagtagcaatgtcgcaattgtagcgagagatccggcgacgggtaaactgggggatctggttgctaacttagctgtcggtacacctggggaggagcagcaggaggacggacttagtgctgttatctgggtaactgagtagattgctctcactccgcttgatcatgcaggcgggtgcgtgcgtttgggattgattcttgtatatacgattatcttcaataaataacacatacacgtattttcctcattgtgtaggttcccctaacgtacctaggtaccttacctacctaccaccactgtgcaaacaccgaaatatagtcgggcaagatatcttccagcaacaccacgccggtggtccttgataccagcaaggaaatggggagaaaaggtggacaggacatactcatacatatatacacacatacagatatacccgactcttgcctctgcaaaaagcagctcgatatctaaaggcggaaaatgtcaaaaagcaggaaaaaaaaaaaaaaggcgtgaagcttatgaaacccacttagacagatctcatctagatgcaatgtaatgttaaatttattgacaactaagagtcatcgaaaagtctcccctcgaggtcaacgccgcggatcgaatctgttccctgcgggagccacccgggtaataggacacttacgccactgcgccaactctgc

SEQ ID NO: 6139 - DNA, 1596 bp, Muscodor strobelii
  misc_feature: SGI cDNA ID NO. 561779
  misc_feature: Encodes the peptide sequence at SEQ ID NO 6140
atgagtcaaagggacctcaaagggacattcctccacgacccgaagcatagtcagtatcttctgagcgaggggcacccgataaatcaggtcgaccgtgctagaaagcaattcaagatgaaagtactaatcggtcttgggctcatcgtcgggctttctagagcggcggcgctggatagaaggggcgttgtaatagactgtttgtctcaagctgacacagctgtcgaccaattcaattcgacggattgggagagggatacaagaccgttcaactccttgttagccttcaagcctgatatcgtcgccgtcccaaccacaacggagcaaatccagaatgccatcgtttgcggagcaaaaatgggctataaagttacagcaaaatgcggcggccatagttacggatcgtatgggctgggaggcgaagatgggcatcttatcatccagctagatcgcatgtatgcgatcaaactagacacaaaaacaaatattgccacagcagagccaggcgcacgattaggtcatcttgcggtcgagctttgggctcagggtaaacgtgctattgctcatggcacttgcccaggtgtcggaatcgcagggcacgccttacatggtggcttcggcctgagctctcatactcacggcttagcgcttgattggatatctggtctcaatgtggcattagctaatggaaccattgttcactgctcaaaaacggagaaccctgatctgttttgggggatgcgaggcgcaggttcaaacttcggcatcgtcacatcgttcgaatgggacacattcgcgcccccagcgaacttgacatggttcgtagccaatgtaccatggaagcagaacacatccgtggccgctttggaagcgcttgaggagtatactcgaaacaccatgccggcagagctcaacatgcgtgttatgggtacttcaagaatgacgcaattggaaggcatctaccatggcaacaagacgcagctccaagacgctctcgcgccactcttgagtaagatcggcggcacgatattgcagaccggaacaaccgactggatcggcagccttcagcattttgcgacgatgagtctgaatcaaacacacccacacaatgagcaagagaccttctatgggaagagcctggagctgaaagggttgagcggagcagcggcccaggacttcgtggactattggtttgatcatgcgaagaatgtgacctcgggatcctggtacgtccagcttgacctgcagggtggaaagaactcagccgtgtggaacgccgacgcgacatcatcatcgtatgcgcatcgcgataagctgtacatattgcagttcttctaccgatcaacaggcaagaccattcctcaagacgcgatccaaatggtcaacgaatggaccgcagccacgaccaagtcgatcaagcaatccgattggggaatgtacatcaactatcctgatctgtcgttgaaccggacacaggcgcagcatctttatctggggagcagcctgccgagacttcaacagctcaaggcgaaatttgatcccacggaactattctactatccgatttcggtgaatccgagcatatcaggacgagcataa

SEQ ID NO: 6140 - protein, 531 aa, Muscodor strobelii
  misc_feature: SGI Peptide ID NO. 561779
  misc_feature (478)..(524): Pfam Id: PF08031 Pfam Desc: Berberine and berberine like
  misc_feature (97)..(235): Pfam Id: PF01565 Pfam Desc: FAD binding domain
  misc_feature (40)..(527): NCBI GI: 145615041 Blast Desc: MGG_05337 [Magnaporthe grisea 70-15] gi|145021964|gb|EDK05984.1| MGG_05337 [Magnaporthe grisea 70-15]
  misc_feature (59)..(526): NCBI GI: 116206074 Blast Desc: CHGG_02330 [Chaetomium globosum CBS 148.51] gi|88182927|gb|EAQ90395.1| CHGG_02330 [Chaetomium globosum CBS 148.51]
  misc_feature (45)..(531): NCBI GI: 171692509 Blast Desc: protein product [Podospora anserina] gi|170946203|emb|CAP73004.1| protein product [Podospora anserina]
  misc_feature (57)..(525): NCBI GI: 171687186 Blast Desc: protein product [Podospora anserina] gi|170943554|emb|CAP69207.1| protein product [Podospora anserina]
  misc_feature (54)..(526): NCBI GI: 164422957 Blast Desc: NCU09518 [Neurospora crassa OR74A] gi|157069888|gb|EAA29277.2| [Neurospora crassa OR74A]
  misc_feature (52)..(527): NCBI GI: 116198467 Blast Desc: CHGG_07389 [Chaetomium globosum CBS 148.51] gi|88178668|gb|EAQ86136.1| CHGG_07389 [Chaetomium globosum CBS 148.51]
  misc_feature (39)..(525): NCBI GI: 256728995 Blast Desc: NECHADRAFT_39816 [Nectria haematococca mpVI 77-13-4]
  misc_feature (36)..(525): NCBI GI: 46138967 Blast Desc: chitooligosaccharide oxidase [Gibberella zeae PH-1]
  misc_feature (63)..(526): NCBI GI: 256729505 Blast Desc: NECHADRAFT_47477 [Nectria haematococca mpVI 77-13-4]
  misc_feature (54)..(520): NCBI GI: 189204658 Blast Desc: glucooligosaccharide oxidase [Pyrenophora tritici-repentis Pt-1C-BFP] gi|187985763|gb|EDU51251.1| glucooligosaccharide oxidase [Pyrenophora tritici-repentis
MSQRDLKGTFLHDPKHSQYLLSEGHPINQVDRARKQFKMKVLIGLGLIVGLSRAAALDRRGVVIDCLSQADTAVDQFNSTDWERDTRPFNSLLAFKPDIVAVPTTTEQIQNAIVCGAKMGYKVTAKCGGHSYGSYGLGGEDGHLIIQLDRMYAIKLDTKTNIATAEPGARLGHLAVELWAQGKRAIAHGTCPGVGIAGHALHGGFGLSSHTHGLALDWISGLNVALANGTIVHCSKTENPDLFWGMRGAGSNFGIVTSFEWDTFAPPANLTWFVANVPWKQNTSVAALEALEEYTRNTMPAELNMRVMGTSRMTQLEGIYHGNKTQLQDALAPLLSKIGGTILQTGTTDWIGSLQHFATMSLNQTHPHNEQETFYGKSLELKGLSGAAAQDFVDYWFDHAKNVTSGSWYVQLDLQGGKNSAVWNADATSSSYAHRDKLYILQFFYRSTGKTIPQDAIQMVNEWTAATTKSIKQSDWGMYINYPDLSLNRTQAQHLYLGSSLPRLQQLKAKFDPTELFYYPISVNPSISGRA

SEQ ID NO: 6141 - DNA, 1602 bp, Muscodor strobelii
  misc_feature: SGI cDNA ID NO. 561780
  misc_feature: Encodes the peptide sequence at SEQ ID NO 6142
atgtcgagacataggcggagtttatcgttgcaaaggaacaatctggatgcatttcgggatccatggctttcttcaattaaatcacaatctaacgatttcccgttgtatccctcggctgagccggagtcgctcatttgcacttcacgacctgtgtcattccagctgggcacaggcgcttccatctacactgagactttactacccgcgatactcgaggctaagcaggaaatcatactggtcacttgcttctgggctccctcacatacgctgacgagaatacgggacacacttcaatcactcgccgagcttcgtcgcgacttcattaacggtcgtcaggcgacagagccggacagtgaccccctaccaagactgagaatccgcatctgcttttcttctcgatctctcttccagaaattgttccacccgcctagcagaaggggctacacgtacccaccttcgaaatggacgaagcttgggttgccggacccaacaatctttgaagatggtttgattgatctccaggtcaagactttattcttcttgccctttagcgtgatgcacccaaaatttctcataattgatcgacgtaaagcattccttccaagttgcaatgtgagttgggagtcatggctagaggcttgcgtagagatcaatggtgaagctgttcctagcctcttgaggttctatcatggtgtctgggattcgcacatgaaggcagatggacgaccgcccatcgtcagcaacccatctcacgggccagtcattacgacaactccagagcccggaggagttggcttgagtcctattcgaagtcctacgtcccgtatgacgcacactcctacacttctaacaagaacattgggtttgagttggatcgaaagcccggcgagtcggttcgaacttctgggatcgtccatattatctacgatattgttgccttcgtctcactaccgcaaccctcgctttcggcctcttccttggcagcactgcgcgcgtccaccagccaccccgctgaattgcgctctgctgcgtctcttcgacgtagcagaagaacatatatatctacatacgccaaacttgacaactcctgccgtgatggatgcattgctggaagcattagatcgtggtgtaaatgtgaggatcgttacgaatgaggccatgatggtttgggaacagatattaacggcaggaacaactactccgcgatgtctacgacgattcatcaagcgctacaagcaacacgttaaccgatctgaacatctgaatagaggaagaaacaatgacgaatcaaacgcgataattgaccttgaaggccaacatctaagactgggttcgctggaggtcttttactatcacgctcttccagaaaatcacgagcagcagattctagaagaaccagtccaatctcacatgaagctgacaatcgtggatgatgattatgtcgtacttggctccggcaacatggatcgggctagctggttcacgagccaggagctgggaatcttgtttcggtcgaaagatctcgcagcgaccgtaatggcgaatgttaactctgtactcgatgggagaattacactcttcttcagttccaacgacccatga

SEQ ID NO: 6142 - protein, 533 aa, Muscodor strobelii
  misc_feature: SGI Peptide ID NO. 561780
  misc_feature (32)..(532): NCBI GI: 116200430 Blast Desc: CHGG_10760 [Chaetomium globosum CBS 148.51] gi|88175474|gb|EAQ82942.1| CHGG_10760 [Chaetomium globosum CBS 148.51]
  misc_feature (32)..(530): NCBI GI: 85074605 Blast Desc: NCU09679 [Neurospora crassa OR74A] gi|28922291|gb|EAA31533.1| [Neurospora crassa OR74A] gi|28949973|emb|CAD70734.1| [Neurospora crassa]
  misc_feature (33)..(530): NCBI GI: 171676436 Blast Desc: protein product [Podospora anserina] gi|170936284|emb|CAP60943.1| protein product [Podospora anserina]
  misc_feature (1)..(531): NCBI GI: 39941220 Blast Desc: MGG_05521 [Magnaporthe grisea 70-15] gi|145022193|gb|EDK06213.1| MGG_05521 [Magnaporthe grisea 70-15]
  misc_feature (18)..(531): NCBI GI: 189188218 Blast Desc: conserved [Pyrenophora tritici-repentis Pt-1C-BFP] gi|187972054|gb|EDU39553.1| conserved [Pyrenophora tritici-repentis Pt-1C-BFP]
  misc_feature (17)..(418): NCBI GI: 46110449 Blast Desc: FG02106.1 [Gibberella zeae PH-1]
  misc_feature (17)..(384): NCBI GI: 261360487 Blast Desc: conserved [Verticillium albo-atrum VaMs.102]
  misc_feature (38)..(513): NCBI GI: 226292618 Blast Desc: conserved [Paracoccidioides brasiliensis Pb18]
  misc_feature (38)..(513): NCBI GI: 225680911 Blast Desc: conserved [Paracoccidioides brasiliensis Pb03]
  misc_feature (38)..(513): NCBI GI: 226282222 Blast Desc: conserved [Paracoccidioides brasiliensis Pb01]
MSRHRRSLSLQRNNLDAFRDPWLSSIKSQSNDFPLYPSAEPESLICTSRPVSFQLGTGASIYTETLLPAILEAKQEIILVTCFWAPSHTLTRIRDTLQSLAELRRDFINGRQATEPDSDPLPRLRIRICFSSRSLFQKLFHPPSRRGYTYPPSKWTKLGLPDPTIFEDGLIDLQVKTLFFLPFSVMHPKFLIIDRRKAFLPSCNVSWESWLEACVEINGEAVPSLLRFYHGVWDSHMKADGRPPIVSNPSHGPVITTTPEPGGVGLSPIRSPTSRMTHTPTLLTRTLGLSWIESPASRFELLGSSILSTILLPSSHYRNPRFRPLPWQHCARPPATPLNCALLRLFDVAEEHIYLHTPNLTTPAVMDALLEALDRGVNVRIVTNEAMMVWEQILTAGTTTPRCLRRFIKRYKQHVNRSEHLNRGRNNDESNAIIDLEGQHLRLGSLEVFYYHALPENHEQQILEEPVQSHMKLTIVDDDYVVLGSGNMDRASWFTSQELGILFRSKDLAATVMANVNSVLDGRITLFFSSNDP

SEQ ID NO: 6143 - DNA, 1596 bp, Muscodor strobelii
  misc_feature: SGI EST ID NO. CUFF.15460.1
  misc_feature: Variant of the nucleotide sequence at SEQ ID NO 6141
cgagaatacgggacacacttcaatcactcgccgagcttcgtcgcgacttcattaacggtcgtcaggcgacagagccggacagtgaccccctaccaagactgagaatccgcatctgcttttcttctcgatctctcttccagaaattgttccacccgcctagcagaaggggctacacgtacccaccttcgaaatggacgaagcttgggttgccggacccaacaatctttgaagatggtttgattgatctccaggtcaagactttattcttcttgccctttagcgtgatgcacccaaaatttctcataattgatcgacgtaaagcattccttccaagttgcaatgtgagttgggagtcatggctagaggcttgcgtagagatcaatggtgaagctgttcctagcctcttgaggttctatcatggtgtctgggattcgcacatgaaggcagatggacgaccgcccatcgtcagcaacccatctcacgggccagtcattacgacaactccagagcccggaggagttggcttgagtcctattcgaagtcctacgtcccgtatgacgcacactcctacacttctaacaagaacattgggtttgagttggatcgaaagcccggcgagtcggttcgaacttctgggatcgtccatattatctacgatattgttgccttcgtctcactaccgcaaccctcgctttcggcctcttccttggcagcactgcgcgcgtccaccagccaccccgctgaattgcgctctgctgcgtctcttcgacgtagcagaagaacatatatatctacatacgccaaacttgacaactcctgccgtgatggatgcattgctggaagcattagatcgtggtgtaaatgtgaggatcgttacgaatgaggccatgatggtttgggaacagatattaacggcaggaacaactactccgcgatgtctacgacgattcatcaagcgctacaagcaacacgttaaccgatctgaacatctgaatagaggaagaaacaatgacgaatcaaacgcgataattgaccttgaaggccaacatctaagactgggttcgctggaggtcttttactatcacgctcttccagaaaatcacgagcagcagattctagaagaaccagtccaatctcacatgaagctgacaatcgtggatgatgattatgtcgtacttggctccggcaacatggatcgggctagctggttcacgagccaggagctgggaatcttgtttcggtcgaaagatctcgcagcgaccgtaatggcgaatgttaactctgtactcgatgggagaattacactcttcttcagttccaacgacccatgatttcaggccatgaccttccattttatttccgctcgggatgagagatcgacaagatgatacccggcattcagaacaatccctgtcagctgactcaaagtgtacttggcgatattcgcagggcaattaccattcccaagcagacgatacttgcagttgacgattaaatttactaggacttgacttccttctgccttcctgagtgctatgaaagtctcaatgcttgtgagttttaagtataatgaccattagaccgcgccaaacacgg

SEQ ID NO: 6144 - DNA, 1659 bp, Muscodor strobelii
  misc_feature: SGI cDNA ID NO. 561781
  misc_feature: Encodes the peptide sequence at SEQ ID NO 6145
atggcgacccaacggaacgttctcagccatgctagcgagagaaagttcgagacgcctccgccgcacgattacgagccagaacgagcagactcgatcgagctaggaaagccagatggcacgcatcgaaagctcaagccgcgtcacattcaactaattggtatcggcggcactattggtaccatgctgtatgtatcaataggccaacctttgacgcaaggtggtcccgcgagtctattcatcgcattcactttgtggtgttcagttatcctcggtgtcaccttttgcttcgccgagatggtcacttatttaccgctgtcgtcgcctttcatccgatttgcaggacgctacgtcgatccagcttttggtttcgcagcagggtggaacttttttgtcttcgaagctgtgcttgtcccatacgaaataaccgcgtcgaatctggttattcattattggagtgacgtcgtgccggctggtgctattatcgctatcgttcttgtattatacgcattgatcaatctgctcgcggtaaaatggtacggcgagtctgagttctgggccgccctgggcaaggtcgttcttatcgtcggtcttctcatattcacgttcatagttgcagttgggggcaatccaaagcacgaccactttggctttcgttactggtatgatccaggggctttcaacgaatactacacgactggttctctcggcaaatttcagggatttctgcagtgcctgattttcgcttctctggctgtcgctggtcctgactatgtctcaatggcagcaggagaagcagagaatcctcgtggggttctacccaaggccttcaactccgtattctaccgtctgaccacattcttcgtcctcggatcacttgctgttggcatcctagttccttataacgacaccgatctactcaatgcttacaagctgggcttaccaggtgccgctgcttcaccttatgttgtcgctatgggtcatttgggtataccgatcttaccccacatcgtcaacgccctcatcttaaccgcctcgttctctgcgggaaacagttatgtgtattgcgcgtcaagatcactgtacggtttagcacttgaagggaaggctccgaaatttctcacgcgatgcaacagacggggtgttcctatctactgcgtgttacttgtgttacttatcgcccttttatcatttctacaagttagcgagggtgcatccgtggttctgaattggtttgttagtttggtcacggcttcgcaactcatcaactacgctgtagtcactgcgacctatctttgttggaatcgcgctatgaaagttcaaggaattgatcggacgacgttgccttacagggggtttcttcagccctatgcagcatattatgcgttcggcatgtgcttcctcttcatcttcattcaaggttatggtgtctttctgccaggcaaatggaatgttcccacctttctattctcgtacacttctgtcttcgcattcccactactctacttcggatggaagatctggcatggtacgaagatataccctccatcgaaggtcgacttggtgcaggatctcgaagatatcgaagattacacgcggagctacgtgccttcgccccccaaaaatttggttgataaatggttcaacaagctctttgagtag

SEQ ID NO: 6145 - protein, 552 aa, Muscodor strobelii
  misc_feature: SGI Peptide ID NO. 561781
  misc_feature (48)..(517): Pfam Id: PF00324 Pfam Desc: Amino acid permease
  misc_feature (48)..(507): Pfam Id: PF00324 Pfam Desc: Amino acid permease
  misc_feature (13)..(540): NCBI GI: 255949664 Blast Desc: Pc22g16860 [Penicillium chrysogenum Wisconsin 54-1255] gi|211592616|emb|CAP98974.1| Pc22g16860 [Penicillium chrysogenum Wisconsin 54-1255]
  misc_feature (25)..(540): NCBI GI: 70994848 Blast Desc: general amino acid permease (Agp2) [Aspergillus fumigatus Af293] gi|66849835|gb|EAL90163.1| general amino acid permease (Agp2), [Aspergillus fumigatus Af293]
  misc_feature (38)..(540): NCBI GI: 115398371 Blast Desc: conserved [Aspergillus terreus NIH2624] gi|114192968|gb|EAU34668.1| conserved [Aspergillus terreus NIH2624]
  misc_feature (41)..(551): NCBI GI: 171683515 Blast Desc: protein product [Podospora anserina] gi|170941717|emb|CAP67371.1| protein product [Podospora anserina]
  misc_feature (22)..(540): NCBI GI: 121706508 Blast Desc: general amino acid permease (Agp2), [Aspergillus clavatus NRRL 1] gi|119399664|gb|EAW10090.1| general amino acid permease (Agp2), [Aspergillus clavatus NRRL 1]
  misc_feature (17)..(551): NCBI GI: 238838780 Blast Desc: general amino acid permease AGP2 [Microsporum canis CBS 113480]
  misc_feature (38)..(551): NCBI GI: 189189540 Blast Desc: amino-acid permease inda1 [Pyrenophora tritici-repentis Pt-1C-BFP] gi|187972715|gb|EDU40214.1| amino-acid permease inda1 [Pyrenophora tritici-repentis
  misc_feature (97)..(552): NCBI GI: 154270519 Blast Desc: conserved [Ajellomyces capsulatus NAm1] gi|150409918|gb|EDN05306.1| conserved [Ajellomyces capsulatus NAm1]
  misc_feature (22)..(542): NCBI GI: 225560418 Blast Desc: amino acid permease [Ajellomyces capsulatus G186AR]
  misc_feature (27)..(551): NCBI GI: 67528244 Blast Desc: AN4328.2 [Aspergillus nidulans FGSC A4] gi|40741299|gb|EAA60489.1| AN4328.2 [Aspergillus nidulans FGSC A4] gi|259482865|tpe|CBF77751.1| TPA: amino acid transporter FGSC
MATQRNVLSHASERKFETPPPHDYEPERADSIELGKPDGTHRKLKPRHIQLIGIGGTIGTMLYVSIGQPLTQGGPASLFIAFTLWCSVILGVTFCFAEMVTYLPLSSPFIRFAGRYVDPAFGFAAGWNFFVFEAVLVPYEITASNLVIHYWSDVVPAGAIIAIVLVLYALINLLAVKWYGESEFWAALGKVVLIVGLLIFTFIVAVGGNPKHDHFGFRYWYDPGAFNEYYTTGSLGKFQGFLQCLIFASLAVAGPDYVSMAAGEAENPRGVLPKAFNSVFYRLTTFFVLGSLAVGILVPYNDTDLLNAYKLGLPGAAASPYVVAMGHLGIPILPHIVNALILTASFSAGNSYVYCASRSLYGLALEGKAPKFLTRCNRRGVPIYCVLLVLLIALLSFLQVSEGASVVLNWFVSLVTASQLINYAVVTATYLCWNRAMKVQGIDRTTLPYRGFLQPYAAYYAFGMCFLFIFIQGYGVFLPGKWNVPTFLFSYTSVFAFPLLYFGWKIWHGTKIYPPSKVDLVQDLEDIEDYTRSYVPSPPKNLVDKWFNKLFE

SEQ ID NO: 6146 - DNA, 2895 bp, Muscodor strobelii
  misc_feature: SGI EST ID NO. CUFF.15482.0
  misc_feature: Variant of the nucleotide sequence at SEQ ID NO 6144
acaagataacagattgcacacttccgtactgtgagactgtaacatcaggatgaccccgcaagttccaggtaatggccgggcacttatgagtactgtcttatccgtctacatttggtggccaccggtcagagttctgtgtctccaggcactgggcccatggaacacatccggacttccacgagctctagcggttaacgtttagcaccgatggatcgggacctcggtcagcagaaggtcaatctaggtcagcgtagcgctaggccctatgttccatcgattttactgtattccttgccggtaacattgcgttctcttcaccatgatgccgacccatacaagactacagggcacaaggattatattccttatcctggagttacttgcataggcaataacacatgtcgttgaatacctatgttgtcattcccgtccttctcgtaaatgtcttgaaagcacgcgacatacaagaactgtatcttctaggtgctgacttgtagctcggtcatcttcgtctcttgtcctacattttgaacgtcttcaagcctatagaccagacagtatcttgatcattcgcaagctcatagatataaatcgatgcggacgtagaacttactaaataacctagttatttattcccattccgtaccaactgccaacgattcgagatcccacggactgtgtctgtgtctcacgtcacttacaatagggaattaagcttgtacgtatgacgcaagactagtgaagagtcacacgtcagaaggaatcaagtctaggcatgtcgcctgcgcgacaactatcttgttaacgaccttcgccatatttaatatagcgaaccgctgagatctcggtactggacgaacgttttcaaagatggcgacccaacggaacgttctcagccatgctagcgagagaaagttcgagacgcctccgccgcacgattacgagccagaacgagcagactcgatcgagctaggaaagccagatggcacgcatcgaaagctcaagccgcgtcacattcaactaattggtatcggcggcactattggtaccatgctgtatgtatcaataggccaacctttgacgcaaggtggtcccgcgagtctattcatcgcattcactttgtggtgttcagttatcctcggtgtcaccttttgcttcgccgagatggtcacttatttaccgctgtcgtcgcctttcatccgatttgcaggacgctacgtcgatccagcttttggtttcgcagcagggtggaacttttttgtcttcgaagctgtgcttgtcccatacgaaataaccgcgtcgaatctggttattcattattggagtgacgtcgtgccggctggtgctattatcgctatcgttcttgtattatacgcattgatcaatctgctcgcggtaaaatggtacggcgagtctgagttctgggccgccctgggcaaggtcgttcttatcgtcggtcttctcatattcacgttcatagttgcagttgggggcaatccaaagcacgaccactttggctttcgttactggtatgatccaggggctttcaacgaatactacacgactggttctctcggcaaatttcagggatttctgcagtgcctgattttcgcttctctggctgtcgctggtcctgactatgtctcaatggcagcaggagaagcagagaatcctcgtggggttctacccaaggccttcaactccgtattctaccgtctgaccacattcttcgtcctcggatcacttgctgttggcatcctagttccttataacgacaccgatctactcaatgcttacaagctgggcttaccaggtgccgctgcttcaccttatgttgtcgctatgggtcatttgggtataccgatcttaccccacatcgtcaacgccctcatcttaaccgcctcgttctctgcgggaaacagttatgtgtattgcgcgtcaagatcactgtacggtttagcacttgaagggaaggctccgaaatttctcacgcgatgcaacagacggggtgttcctatctactgcgtgttacttgtgttacttatcgcccttttatcatttctacaagttagcgagggtgcatccgtggttctgaattggtttgttagtttggtcacggcttcgcaactcatcaactacgctgtagtcactgcgacctatctttgttggaatcgcgctatgaaagttcaaggaattgatcggacgacgttgccttacagggggtttcttcagccctatgcagcatattatgcgttcggcatgtgcttcctcttcatcttcattcaaggttatggtgtctttctgccaggcaaatggaatgttcccacctttctattctcgtacacttctgtcttcgcattcccactactctacttcggatggaagatctggcatggtacgaagatataccctccatcgaaggtcgacttggtgcaggatctcgaagatatcgaagattacacgcggagctacgtgccttcgccccccaaaaatttggttgataaatggttcaacaagctctttgagtagagtgttctctgaacgatagggctgcccatacgcggaggagaagctgtgcgcgataatttaagactggacgaggtatctatagcatttacatatgtttagcgaaacgtcagcatagcaatcagatatacccgacatagatttaacttgaacggcattgaatatagcacggatgtaatgatcattagcaacaaattgttctccgatgaggccgaaatctacactagtttctaccgccctcgatgaggctctacatgcaaacttcagagtggagatcaatgatggcattgccaaggatctgccacgtaggcttcagctgctcattcattgacgatgcgactatgtatgtatgtgtttctcgacgcgact

SEQ ID NO: 6147 - DNA, 1122 bp, Muscodor strobelii
  misc_feature: SGI cDNA ID NO. 561782
  misc_feature: Encodes the peptide sequence at SEQ ID NO 6148
atgcgtctggagtcgttcatgcgtcgtcgaaggcggactctgattgccaccctgcttgtcttcagcttcatcgcagccttcgaatggcgctacttctacgacctgggagactgggttcgccagacacgaccctactcctaccagtatgaagtccagaaggagttcacaccgacgcaagaagaactcgactgtctccacggcgcgacgccttctgccaagaccaacatcgaccccatccccaacaatgtccacttcatcttcgggttggccaacccattcgagaagcgcaatgccggcacttttgacttcttggccttcctcgctgtccgcagtgccagcgtagggatgagagctgagcgtgtattcctccattacacctaccttgccgaccctccttctcccgaacccaacaaagacccctactcgaatccttgggtcaaccgtctgaaagagaatatcaccctcatctaccacccacccgaagagatcgactctctgaaagacagagccggtgccaactggcaggctgcccacgtctctgatgtcctgcgactcaagattctgagtgaacagggtggcatctacctcgacatcgatgcgttcggactgcgcccctttacagaagttctcaagtctccacgcgacatgatcatgggccatgagggcggcaaccgcgccggtctgtgcaatgctgtcatggtcgccagggcaggcagttctttcatcgagcgatggatcaccgcgtatgatagtgtcgatttgacgcgcgaatggaactaccacagtgtcattctccccaaggaaatgcagctgcagacacctgacgatatctgcactctgccgcctgactctttcttctggccgacctggacatggcaacatgtcgactggatgcatgagtccatcggcaaggctgaggccgagcactgggctgcagagatcaagcgccatgggggcagtctctttgagaatcagcttgcatatcatggctggagtcagatgtcttgggatcgctacctgaaacgtctcacaccagaaatcattcgaaatcacgacacgcgattcaacctgatggtacggagatttctcatggatgacatggggaacgactcaggcagttag

SEQ ID NO: 6148 - protein, 373 aa, Muscodor strobelii
  misc_feature: SGI Peptide ID NO. 561782
  misc_feature (153)..(218): Pfam Id: PF04488 Pfam Desc: Glycosyltransferase sugar-binding region containing DXD motif
  misc_feature (177)..(211): Pfam Id: PF04488 Pfam Desc: Glycosyltransferase sugar-binding region containing DXD motif
  misc_feature (31)..(367): NCBI GI: 171682210 Blast Desc: protein product [Podospora anserina] gi|170941064|emb|CAP66714.1| protein product [Podospora anserina]
  misc_feature (10)..(367): NCBI GI: 85086222 Blast Desc: NCU04038 [Neurospora crassa OR74A] gi|28918747|gb|EAA28417.1| [Neurospora crassa OR74A] gi|39979229|emb|CAE85599.1| [Neurospora crassa]
  misc_feature (54)..(363): NCBI GI: 212533711 Blast Desc: conserved [Penicillium marneffei ATCC 18224] gi|210072376|gb|EEA26465.1| conserved [Penicillium marneffei ATCC 18224]
  misc_feature (77)..(362): NCBI GI: 134106199 Blast Desc: CNBA1130 [Cryptococcus neoformans var. neoformans B-3501A] gi|50260813|gb|EAL23463.1| CNBA1130 [Cryptococcus neoformans var. neoformans B-3501A]
  misc_feature (69)..(363): NCBI GI: 182677089 Blast Desc: glycosyl transferase [Beijerinckia indica subsp. indica ATCC 9039] gi|182632972|gb|ACB93746.1| glycosyltransferase sugar-binding region containing DXD motif [Beijerinckia indica
  misc_feature (81)..(366): NCBI GI: 148259404 Blast Desc: glycosyl transferase [Acidiphilium cryptum JF-5] gi|146401085|gb|ABQ29612.1| glycosyltransferase sugar-binding region containing DXD motif [Acidiphilium cryptum JF-5]
  misc_feature (77)..(295): NCBI GI: 58258295 Blast Desc: [Cryptococcus neoformans var. neoformans JEC21] gi|57222697|gb|AAW40741.1| conserved expressed protein [Cryptococcus neoformans var. neoformans JEC21]
  misc_feature (79)..(372): NCBI GI: 120610745 Blast Desc: glycosyl transferase [Acidovorax avenae subsp. citrulli AAC00-1] gi|120589209|gb|ABM32649.1| glycosyltransferase sugar-binding region containing DXD motif [Acidovorax citrulli
  misc_feature (79)..(291): NCBI GI: 260830709 Blast Desc: BRAFLDRAFT_93039 [Branchiostoma floridae] gi|229295667|gb|EEN66313.1| BRAFLDRAFT_93039 [Branchiostoma floridae]
  misc_feature (79)..(201): NCBI GI: 58267500 Blast Desc: CNE03400 [Cryptococcus neoformans var. neoformans JEC21] gi|57227140|gb|AAW43599.1| CNE03400 [Cryptococcus neoformans var. neoformans JEC21]
MRLESFMRRRRRTLIATLLVFSFIAAFEWRYFYDLGDWVRQTRPYSYQYEVQKEFTPTQEELDCLHGATPSAKTNIDPIPNNVHFIFGLANPFEKRNAGTFDFLAFLAVRSASVGMRAERVFLHYTYLADPPSPEPNKDPYSNPWVNRLKENITLIYHPPEEIDSLKDRAGANWQAAHVSDVLRLKILSEQGGIYLDIDAFGLRPFTEVLKSPRDMIMGHEGGNRAGLCNAVMVARAGSSFIERWITAYDSVDLTREWNYHSVILPKEMQLQTPDDICTLPPDSFFWPTWTWQHVDWMHESIGKAEAEHWAAEIKRHGGSLFENQLAYHGWSQMSWDRYLKRLTPEIIRNHDTRFNLMVRRFLMDDMGNDSGS

SEQ ID NO: 6149 - DNA, 495 bp, Muscodor strobelii
  misc_feature: SGI cDNA ID NO. 561783
  misc_feature: Encodes the peptide sequence at SEQ ID NO 6150
atggtatcgcgattactccagcagcgactgcaccgcctgcgccggcgcggctaccacagatcgcctgtactctggatcattctcatcgcagcgctcgtagagatcacgtttcacgcctcgaaattccgcgtcccgaagcccgaccacgatcgcgatttccccttctacgatggctgtgtcgaacccgatgtgaaaggaccccgcgaaaatgcagccattgtgatgctggcgcgcaaccaggaggttcaacaagcgcgccggtcagtcgagagtctggagcgccagttcaaccagtggttcaaatacccgattgtcttcttaaatgatgagccatggagtgagaccttcatccaaactctgaaggagagcacacgtgccgagacacactttgaatatgtgcccaagaaggaatggctgtttcctgagtggatgaacaaggaagatgcgcaagctagcatcaagaagcagggtgatagtggtattctgtacgctggc

SEQ ID NO: 6150 - protein, 165 aa, Muscodor strobelii
  misc_feature: SGI Peptide ID NO. 561783
  misc_feature (51)..(165): Pfam Id: PF01793 Pfam Desc: Glycolipid 2-alpha-mannosyltransferase
  misc_feature (34)..(165): NCBI GI: 85086217 Blast Desc: NCU04037 [Neurospora crassa OR74A] gi|28918746|gb|EAA28416.1| conserved [Neurospora crassa OR74A] gi|39979228|emb|CAE85598.1| related to alpha-1, [Neurospora
  misc_feature (23)..(165): NCBI GI: 145614612 Blast Desc: MGG_04514 [Magnaporthe grisea 70-15] gi|145021513|gb|EDK05642.1| MGG_04514 [Magnaporthe grisea 70-15]
  misc_feature (34)..(165): NCBI GI: 171682212 Blast Desc: protein product [Podospora anserina] gi|170941065|emb|CAP66715.1| protein product [Podospora anserina]
  misc_feature (2)..(164): NCBI GI: 164425706 Blast Desc: NCU06166 [Neurospora crassa OR74A] gi|157071030|gb|EAA30792.2| conserved [Neurospora crassa OR74A]
  misc_feature (38)..(164): NCBI GI: 260943207 Blast Desc: CLUG_04784 [Clavispora lusitaniae ATCC 42720] gi|238851192|gb|EEQ40656.1| CLUG_04784 [Clavispora lusitaniae ATCC 42720]
  misc_feature (52)..(165): NCBI GI: 189208027 Blast Desc: alpha-1,2-mannosyltransferase Kre5 [Pyrenophora tritici-repentis Pt-1C-BFP] gi|187976440|gb|EDU43066.1| alpha-1,2-mannosyltransferase Kre5 [Pyrenophora tritici-repentis
  misc_feature (52)..(162): NCBI GI: 169614992 Blast Desc: SNOG_10649 [Phaeosphaeria nodorum SN15] gi|160702859|gb|EAT82043.2| SNOG_10649 [Phaeosphaeria nodorum SN15]
  misc_feature (55)..(165): NCBI GI: 154305195 Blast Desc: BC1G_08892 [Botryotinia fuckeliana B05.10] gi|150853634|gb|EDN28826.1| BC1G_08892 [Botryotinia fuckeliana B05.10]
  misc_feature (55)..(165): NCBI GI: 171681088 Blast Desc: protein product [Podospora anserina] gi|170940502|emb|CAP65730.1| protein product [Podospora anserina]
  misc_feature (55)..(165): NCBI GI: 156040926 Blast Desc: SS1G_11441 [Sclerotinia sclerotiorum 1980] gi|154695825|gb|EDN95563.1| SS1G_11441 [Sclerotinia sclerotiorum 1980]
  misc_feature (50)..(165): SWISSPROT Homolog: EC 2.4.1.131 Glycolipid 2-alpha-mannosyltransferase
MVSRLLQQRLHRLRRRGYHRSPVLWIILIAALVEITFHASKFRVPKPDHDRDFPFYDGCVEPDVKGPRENAAIVMLARNQEVQQARRSVESLERQFNQWFKYPIVFLNDEPWSETFIQTLKESTRAETHFEYVPKKEWLFPEWMNKEDAQASIKKQGDSGILYAG

SEQ ID NO: 6151 - DNA, 1626 bp, Muscodor strobelii
  misc_feature: SGI cDNA ID NO. 561784
  misc_feature: Encodes the peptide sequence at SEQ ID NO 6152
atgaccgccatgcggcttttgacctacaatggtttgggttcatttgacttgatggagtaccccgcaggtagcaccatcccccggtacgcgaccctgtctcacaggtggggccccgaagaggtcacctacgaagacctcaaacatggcactggagtacgaaagtctggatactacaagatccgcttctgcgccgagcaggcccggcgagatggtttgaggcacttttgggtcgacacgtgttgcattaacaagtcgagcgacgccgaagttacgagatctatcaatagcatgttctcatggtaccgtaatgcagccagatgctatgcgtatctcgaagatgtctcttacgtggccaatccaggcatgattcaacagagcagaccggcctggcatgcatcattccaatctagcctgtggttcacgcgcggttggacccttcaagagctcattgcaccagccacggtcgactttttctcgaaagagggcgaaattctaggcagcaaagagtcgctcgaacatttaatatgctctattactagtatcccagccggcgcgcttcgagggagctcgttgcctaccttctctgttgcggagcgcatggcgtgggcggagggacgagagactcaagaacccgaagaccgtgcgtattcgctcctaggcatcttcgacatccaaatgcctctcatatacggcgaaggagaagagaaggcaatgaaccgacttcgagaagagatcactaaagatcaaaaagggacccaacacgaggaattctctgtaccattcagcctctacggtgtacccgagatacaacacttcgtggcaagagagcaagaactcgctgagatgcgcgagagactaaggagcgacggcagacgtcgagtcgtagtccttcatgggctcgggggcatgggcaagacccagctggccatcgcctatacaaaaagacacaaggacagctactcggcaatcttttggcttaatatcaaagacgaaaactctctaaagcaaagctttgccaggatagcccgccagatcaaacgagagcatccctctgctcgccgtcttggcagcctagacatacagaacgacctggacgacaccgtcgacgccgtcaaagcttggctaagcttgccaagcaactcccggtggctgcttgtctacgataattatgataaccctaaattaccgtcgaacaaagatcctactgctgtcgatattcaacactatcttccagaatcataccaaggtgcaatcatcattacgactaggtcatcccaagtcgagattggccatgccattcgcatgtcaaagttacaaaacttagatgacagtctcgagattctaacaaccacatcaaagcgcaagagtttggtcaatgatcccgacgccgtaaatcttgccaaaaaattagacggtcttccactcgcactagccacggcaggcgcatacctgaagcaatcgtcggcaacctgtcctttgatcaaattcgacgacgaaacgaacactcggccgaatttcttcgactatgggcgtactttgatagtcaggatctctggcttgagctgcttcaacatcaagatgcgaactgcccgcaatggctctatgaagcgacagaagatgagctga

SEQ ID NO: 6152 - protein, 541 aa, Muscodor strobelii
  misc_feature: SGI Peptide ID NO. 561784
  misc_feature (29)..(148): Pfam Id: PF06985 Pfam Desc: Heterokaryon incompatibility protein (HET)
  misc_feature (1)..(490): NCBI GI: 156056350 Blast Desc: SS1G_05528 [Sclerotinia sclerotiorum 1980] gi|154703311|gb|EDO03050.1| SS1G_05528 [Sclerotinia sclerotiorum 1980]
  misc_feature (1)..(378): NCBI GI: 154324074 Blast Desc: BC1G_00436 [Botryotinia fuckeliana B05.10] gi|150842665|gb|EDN17858.1| BC1G_00436 [Botryotinia fuckeliana B05.10]
  misc_feature (4)..(488): NCBI GI: 156053556 Blast Desc: SS1G_05625 [Sclerotinia sclerotiorum 1980] gi|154703406|gb|EDO03145.1| SS1G_05625 [Sclerotinia sclerotiorum 1980]
  misc_feature (4)..(487): NCBI GI: 156034877 Blast Desc: SS1G_13374 [Sclerotinia sclerotiorum 1980] gi|154698777|gb|EDN98515.1| SS1G_13374 [Sclerotinia sclerotiorum 1980]
  misc_feature (4)..(488): NCBI GI: 156041064 Blast Desc: SS1G_11511 [Sclerotinia sclerotiorum 1980] gi|154695894|gb|EDN95632.1| SS1G_11511 [Sclerotinia sclerotiorum 1980]
  misc_feature (4)..(488): NCBI GI: 154310212 Blast Desc: BC1G_07026 [Botryotinia fuckeliana B05.10] gi|150851587|gb|EDN26780.1| BC1G_07026 [Botryotinia fuckeliana B05.10]
  misc_feature (4)..(507): NCBI GI: 189197887 Blast Desc: kinesin light chain 1 [Pyrenophora tritici-repentis Pt-1C-BFP] gi|187981229|gb|EDU47855.1| kinesin light chain 1 [Pyrenophora tritici-repentis Pt-1C-BFP]
  misc_feature (4)..(490): NCBI GI: 189210760 Blast Desc: kinesin light chain 3 [Pyrenophora tritici-repentis Pt-1C-BFP] gi|187977804|gb|EDU44430.1| kinesin light chain 3 [Pyrenophora tritici-repentis Pt-1C-BFP]
  misc_feature (3)..(490): NCBI GI: 189204674 Blast Desc: kinesin light chain [Pyrenophora tritici-repentis Pt-1C-BFP] gi|187985771|gb|EDU51259.1| kinesin light chain [Pyrenophora tritici-repentis Pt-1C-BFP]
  misc_feature (50)..(488): NCBI GI: 156050931 Blast Desc: SS1G_08054 [Sclerotinia sclerotiorum 1980] gi|154692453|gb|EDN92191.1| SS1G_08054 [Sclerotinia sclerotiorum 1980]
MTAMRLLTYNGLGSFDLMEYPAGSTIPRYATLSHRWGPEEVTYEDLKHGTGVRKSGYYKIRFCAEQARRDGLRHFWVDTCCINKSSDAEVTRSINSMFSWYRNAARCYAYLEDVSYVANPGMIQQSRPAWHASFQSSLWFTRGWTLQELIAPATVDFFSKEGEILGSKESLEHLICSITSIPAGALRGSSLPTFSVAERMAWAEGRETQEPEDRAYSLLGIFDIQMPLIYGEGEEKAMNRLREEITKDQKGTQHEEFSVPFSLYGVPEIQHFVAREQELAEMRERLRSDGRRRVVVLHGLGGMGKTQLAIAYTKRHKDSYSAIFWLNIKDENSLKQSFARIARQIKREHPSARRLGSLDIQNDLDDTVDAVKAWLSLPSNSRWLLVYDNYDNPKLPSNKDPTAVDIQHYLPESYQGAIIITTRSSQVEIGHAIRMSKLQNLDDSLEILTTTSKRKSLVNDPDAVNLAKKLDGLPLALATAGAYLKQSSATCPLIKFDDETNTRPNFFDYGRTLIVRISGLSCFNIKMRTARNGSMKRQKMS

SEQ ID NO: 6153 - DNA, 2774 bp, Muscodor strobelii
  misc_feature: SGI EST ID NO. CUFF.15486.0
  misc_feature: Variant of the nucleotide sequence at SEQ ID NO 6151
ctctggattcggtactgactaaccacatctaccacggaccactagtggtgatgcgacgcgtcaagtcgcgtcttgctaccttttagacgcagtaggtcatgaagcgtctcttgactacaagtatatccgatgtcaacgcccggacgcggacccagtactaggcaaggcgtatccatactatacctcgcgtgactttcgattccacctctctgttatgcatttcctcataactatgcacacgatgcattgcattatttatactcctaggccctgtgcgttatagtcttagggccttgtgacttcctgcacgtagtccctcgacggaacttcaagataatgaagcctatgtcatcacgtcgtcaggcgtgccattgttgcactctggcgcgctgtgtatccgctggcatatgtgcagcctgctcgttattgtctatagggttacattgatacttcgctacgcagctgacagtctgcagcagctgagcctctcacacagctttcgtgcagattgtggcaatggcacacaccccgctttaacattgctttgctttttctctgttataaaaaccatcatgcaaggaatcccgttaacatgacatcctaagcaatccgtccactgcgcaaacaagatttatgaccgccatgcggcttttgacctacaatggtttgggttcatttgacttgatggagtaccccgcaggtagcaccatcccccggtacgcgaccctgtctcacaggtggggccccgaagaggtcacctacgaagacctcaaacatggcactggagtacgaaagtctggatactacaagatccgcttctgcgccgagcaggcccggcgagatggtttgaggcacttttgggtcgacacgtgttgcattaacaagtcgagcgacgccgaagttacgagatctatcaatagcatgttctcatggtaccgtaatgcagccagatgctatgcgtatctcgaagatgtctcttacgtggccaatccaggcatgattcaacagagcagaccggcctggcatgcatcattccaatctagcctgtggttcacgcgcggttggacccttcaagagctcattgcaccagccacggtcgactttttctcgaaagagggcgaaattctaggcagcaaagagtcgctcgaacatttaatatgctctattactagtatcccagccggcgcgcttcgagggagctcgttgcctaccttctctgttgcggagcgcatggcgtgggcggagggacgagagactcaagaacccgaagaccgtgcgtattcgctcctaggcatcttcgacatccaaatgcctctcatatacggcgaaggagaagagaaggcaatgaaccgacttcgagaagagatcactaaagatcaaaaagggacccaacacgaggaattctctgtaccattcagcctctacggtgtacccgagatacaacacttcgtggcaagagagcaagaactcgctgagatgcgcgagagactaaggagcgacggcagacgtcgagtcgtagtccttcatgggctcgggggcatgggcaagacccagctggccatcgcctatacaaaaagacacaaggacagctactcggcaatcttttggcttaatatcaaagacgaaaactctctaaagcaaagctttgccaggatagcccgccagatcaaacgagagcatccctctgctcgccgtcttggcagcctagacatacagaacgacctggacgacaccgtcgacgccgtcaaagcttggctaagcttgccaagcaactcccggtggctgcttgtctacgataattatgataaccctaaattaccgtcgaacaaagatcctactgctgtcgatattcaacactatcttccagaatcataccaaggtgcaatcatcattacgactaggtcatcccaagtcgagattggccatgccattcgcatgtcaaagttacaaaacttagatgacagtctcgagattctaacaaccacatcaaagcgcaagagtttggtcaatgatcccgacgccgtaaatcttgccaaaaaattagacggtcttccactcgcactagccacggcaggcgcatacctgaagcaatcgtcggcaacgttccgatcatacctccgttcatacgaggattcttgggcaagactgcaaagcagcagccctgggctcacctcatatgaagaccgtactctttactcaacgtggcagctgtcctttgatcaaattcgacgacgaaacgaacactcggccgaatttcttcgactatgggcgtactttgatagtcaggatctctggcttgagctgcttcaacatcaagatgcgaactgcccgcaatggctctatgaagcgacagaagatgagctgagttttaacaatacagtccgcatattgtgtgactatgggcttgtcgatacggattcctccatgaatgaacgtgtagaatcaagaggatatagcatccacagctgtgttcattcctggataattcatgttctgaatcgggaactgagcatcgaattagtagcatttgtaatccgatgtatagcctcacatgtccctaaccagaattccaacaaatactggctgacacaaagacgattactgcagcacgcggcgagatatagccctatttatttagatagtgttctagacgacaatgagagctgggtttattataatctaggcattttatacaacgaccaggggaagctgaaggaggcggaagagatgtacgaacgggcgctccgaggctacaagaaggcactggggccggg

SEQ ID NO: 6154 - DNA, 2217 bp, Muscodor strobelii
  misc_feature: SGI cDNA ID NO. 561785
  misc_feature: Encodes the peptide sequence at SEQ ID NO 6155
atggccacctcctcgggggacgagacggagctcgacaggctgcgcgctctgctcgcagaggctgaccgaaaacgcgaacaagctgaacaaaaacaacaagaggaacagaggagacgcgaagaagcagagcgaaatgagaaaaaggaacaagagaaacgaaaagaagcagagaaaaaacaagaagaggcagtgcaaaatcaacaagaggaacagaagagacgtcagagtgccgagatacgcgcacagggatcgcggctacaacccatcctcgacaacgcagggcgacacgacaaaaatcccaccggccgcgtcttcccccgacgcatcatcccctgggctcacttccccgcgcaacaagagaacatctgggccctgctagccgaccagcccttctgcgaccgcgctatattcccatccccacaccagctcgactacgtcgtcgccttaatcaagcctatcgcgagcgagaccgacctgcgacactttgcacgcgacacggtcgagatcgccgtgcagaagctggccgacgcagcctacgacgacgaccagctacgcgtcgctctcgatctccaaggatccgtcacctttgagagccacaccaaccttgggggcgccggtagcgtggataccattaccgaatctatccaacatgtcgacatcgcgtcaaaggccactggtgctaccacgccgcccccgaacccatccaaaaccagggcccatcgaaagaccaagagaggcaagagtggccccgccgaccagttctgtccggaacgagatgtcatcgacaagcatggcgtcggcggcttcgccttcgcttcgagatggctcgtcgccgccgtcgtcacccagctgttctcctacatggtcgacaagggcatccagtacggctacctatgtaccggcgagaccttcgtcttcctccacatccctcaggatcccactatcgtctattactccgtctgcgtgcccaacctagacgtcgtggaagacgacgaggaccgcctccatcgtaccgccgtcgcccaggtatttgcctttgtcctccaggctcttcgctcgccaccgctgccgcaggattggcatgatcgtgccgagcatctgggcatttggggcgtcgagtttgatgacatcttacgacacattcctgtgacggatcgcaagccacccaaggattcaccactctacaagccccagcgctggagaggcttcgtacgttctccaatcaagacgcgatcccgccgctgtcggcaagggattagcgatacgcgccctcgggaaacgagtgacagtgacgatgacaaaggcgaccctccttccccatctgcttcacggtccttacgcgcctctgggcaaaaatctgccccgacgagcactaccagcagaggtgcgagacgaggtggccccagtcgaggtagaggggcaaaggcagggggcagaaaccagaagggagcacaaacgagcattcaagaccgccctttctgcacccaaaagtgtttgtcgggactggcgagcggtggggctatggacgacagatgccccaatttcaacgaccacccaccacgacacattgagccatccgtattccgacacctgcttcgtgaccaactggccaaggaccgtggggcagacgcagatgccatgccactctacctgagcgggtctgttggggcgctttttaaagtccgcctgtcgtcgcatgggtataccgtagtggccaaaggagtcgaacagaagcacttagcccgtctgcaacacgaatatcgaatatatgaccggctaagtagcatccaagggaaacacgtgcctgtatgcctcggcaagatagacttggttttaccttattactacgacggcggtgtttttagccacttcttgttcctctcctgggctgggaggccactgttcgacatggttcgcgggactgccaatcacacgctcgtcgacgccaccggtaaggcattccaggcaatccacgagctcgaggtcctccaccgcgacgccgaaccgcggaacgtgctgcatgatgcgcacagtgacaaggttctaatcgtagactttgaacgggctgagcttgtcagtcgcgaacctcttggggtgatcagtccaaataggaagagaaaacatgctgcaaacacggggaagagaaaaaaagacaaattcgccacagagctatcgtctattatgttgagcgttaggcggtacgtagatcagcgataa

SEQ ID NO: 6155 - protein, 738 aa, Muscodor strobelii
  misc_feature: SGI Peptide ID NO. 561785
  misc_feature (99)..(710): NCBI GI: 261361603 Blast Desc: conserved [Verticillium albo-atrum VaMs.102]
  misc_feature (66)..(733): NCBI GI: 240106711 Blast Desc: CPC735_014960 [Coccidioides posadasii C735 delta SOWgp]
  misc_feature (102)..(737): NCBI GI: 225683667 Blast Desc: conserved [Paracoccidioides brasiliensis Pb03]
  misc_feature (49)..(733): NCBI GI: 119174150 Blast Desc: CIMG_09057 [Coccidioides immitis RS]
  misc_feature (57)..(694): NCBI GI: 226277734 Blast Desc: conserved [Paracoccidioides brasiliensis Pb01]
  misc_feature (10)..(723): NCBI GI: 256733701 Blast Desc: NECHADRAFT_35371 [Nectria haematococca mpVI 77-13-4]
  misc_feature (143)..(727): NCBI GI: 145616882 Blast Desc: MGG_14404 [Magnaporthe grisea 70-15] gi|145022592|gb|EDK06526.1| MGG_14404 [Magnaporthe grisea 70-15]
  misc_feature (65)..(691): NCBI GI: 226293025 Blast Desc: conserved [Paracoccidioides brasiliensis Pb18]
  misc_feature (30)..(738): NCBI GI: 240111182 Blast Desc: CPC735_070170 [Coccidioides posadasii C735 delta SOWgp]
  misc_feature (100)..(733): NCBI GI: 154273432 Blast Desc: [Ajellomyces capsulatus NAm1] gi|150416080|gb|EDN11424.1| [Ajellomyces capsulatus NAm1]
MATSSGDETELDRLRALLAEADRKREQAEQKQQEEQRRREEAERNEKKEQEKRKEAEKKQEEAVQNQQEEQKRRQSAEIRAQGSRLQPILDNAGRHDKNPTGRVFPRRIIPWAHFPAQQENIWALLADQPFCDRAIFPSPHQLDYVVALIKPIASETDLRHFARDTVEIAVQKLADAAYDDDQLRVALDLQGSVTFESHTNLGGAGSVDTITESIQHVDIASKATGATTPPPNPSKTRAHRKTKRGKSGPADQFCPERDVIDKHGVGGFAFASRWLVAAVVTQLFSYMVDKGIQYGYLCTGETFVFLHIPQDPTIVYYSVCVPNLDVVEDDEDRLHRTAVAQVFAFVLQALRSPPLPQDWHDRAEHLGIWGVEFDDILRHIPVTDRKPPKDSPLYKPQRWRGFVRSPIKTRSRRCRQGISDTRPRETSDSDDDKGDPPSPSASRSLRASGQKSAPTSTTSRGARRGGPSRGRGAKAGGRNQKGAQTSIQDRPFCTQKCLSGLASGGAMDDRCPNFNDHPPRHIEPSVFRHLLRDQLAKDRGADADAMPLYLSGSVGALFKVRLSSHGYTVVAKGVEQKHLARLQHEYRIYDRLSSIQGKHVPVCLGKIDLVLPYYYDGGVFSHFLFLSWAGRPLFDMVRGTANHTLVDATGKAFQAIHELEVLHRDAEPRNVLHDAHSDKVLIVDFERAELVSREPLGVISPNRKRKHAANTGKRKKDKFATELSSIMLSVRRYVDQR

SEQ ID NO: 6156 - DNA, 627 bp, Muscodor strobelii
  misc_feature: SGI cDNA ID NO. 561786
  misc_feature: Reduced expression when VOC is produced
  misc_feature: Encodes the peptide sequence at SEQ ID NO 6157
atgacaactcgcgtggttactcgccgtcataggaatggccgcaacggcgaagcaaccgtcgacgaattggtgcgcctttggttgtgccagcggattggcgaggttcggcagcagcgagacgacgccctacggaccgtgggagaccaccctgaccccctccagtttgttctcgaccagttcgagagctgcgcacgagattcagtccaagtgcttgagcagtcgagggagctactagtgaagatgattgacgataccgtcaacgagatgaagcatcggttcgggctgcgcagcgaacaagcaagagaatctatccaacgcctggtgcccgcgtctgcccccatccccgtcgagggtgatccatctcgcgacagtcagcccctgatcgacctggcgcgatctgtgccacggtgcagcacgtgccagcgaggcctggaagagtcctgggcgagtgtctacagtcgttgtggttgttgcgcacctgcggtgccgatggacacgagtgctttggtcgacagagatcgctgcgtgttcgtggcatctttgagccctgcgtcatatgcacttacaggttgcaaaggccgaccagaccgcaaggctgtggccatgtattttgctggcattgcctag

SEQ ID NO: 6157 - protein, 208 aa, Muscodor strobelii
  misc_feature: SGI Peptide ID NO. 561786
  misc_feature: Useful for introducing or modulating the production of volatile compounds
MTTRVVTRRHRNGRNGEATVDELVRLWLCQRIGEVRQQRDDALRTVGDHPDPLQFVLDQFESCARDSVQVLEQSRELLVKMIDDTVNEMKHRFGLRSEQARESIQRLVPASAPIPVEGDPSRDSQPLIDLARSVPRCSTCQRGLEESWASVYSRCGCCAPAVPMDTSALVDRDRCVFVASLSPASYALTGCKGRPDRKAVAMYFAGIA

SEQ ID NO: 6158 - DNA, 5605 bp, Muscodor strobelii
  misc_feature: SGI EST ID NO. CUFF.15684.2
  misc_feature: Variant of the nucleotide sequence at SEQ ID NO 6156
cgagtcttggccatgctggcttgccattgtagcaagggagtgtgtgccaaattgagtgacctcagacgcagaagagcaccaatttgcagcggggagaagaagacggtgacctgaaggaaaaaccgggaaattggcgggatacagcggtgtgctctcggggcagagagacggttggtccacattcacaggctcctgggataagacatcgtcgctgacccaggataccgccagctcctgctcccatgcaacagatggtgtggacaggacgcgttgatggaattcgcaacagctataaaactgcgaaaggggataaatcggggtgagaggatgacctggcagcgaaattggcaaagacggcaggctcacgtatgaaagggaggatgggaatggataatatgagccaggaggattcaacccgttccgaagtctactccggggtgcgaatatctcgtcataccgaggcatagggctaggcttcaaagccatgttgaagattaaatcatgaggtctgtaaacgatatagaagacaaagtctgatctgagcgataggaagaggggaagaagaaaaatcctacgatgacaggtctatcacctgcttttatacagttcgctgatcacgataagcacgagactgtaatcttaagatagccaacaaaacactcctttgattaaatcaaggacagcgtatagtcagcccctgacccgatcctgatgtttgcatatacactcccagacgacaagcatgtctgcctctgataccccctacgggtctgcgagggccatggcatagccagcctttcgcgacgtgctccaagttatcttgaacagggatctgacggcggccgacgtcttgtctcttgccttggaggtcggaatcaaggcagctcatgggtgatggagggtcgaactgcggctgataactaggacgcagaccgcgtgaatcgcctggcaaagatcatcttcgcttatggcggcatatggccggcggcctcgaaaatttgaagaaccgaggaagtaagtagaaacataagaacgctgaagacgattcgctgccttgccgcgttaaattgatatgctagctttctaattgttggtcgtcatcgtgaagcttctacgacgagcctggtattcaggggctacgtcggctatggccgaaggcagattggaaccatgacacatgcgtgccattattgagacatgataagcaaaaagagtgaacaggaggttgggaggtcctgcgggacgtcgggacggatcctgcaacttcaagagcattgccagctcaaccttgcgctagaccgccgaggagatctgcgaggcagacggactggggtggatgactggtcgatagctacgcgagctcgtggtcttacccgatgggtagacgacgacacaaatcatgacaaacgtgcccagtggggtaaagtcttccttcgagccacgagtggaggtgcaggcaggtataaatgtagcgtacgctgccacctcggcctgatctttcttattctccaaactctcacgttctttgattcttcctcttccgcgccgctagccgaccctatcaatatgacaactcgcgtggttactcgccgtcataggaatggccgcaacggcgaagcaaccgtcgacgaattggtgcgcctttggttgtgccagcggattggcgaggttcggcagcagcgagacgacgccctacggaccgtgggagaccaccctgaccccctccagtttgttctcgaccagttcgagagctgcgcacgagattcagtccaagtgcttgagcagtcgagggagctactagtgaagatgattgacgataccgtcaacgagatgaagcatcggttcgggctgcgcagcgaacaagcaagagaatctatccaacgcctggtgcccgcgtctgcccccatccccgtcgagggtgatccatctcgcgacagtcagcccctgatcgacctggcgcgatctgtgccacggtgcagcacgtgccagcgaggcctggaagagtcctgggcgagtgtctacagtcgttgtggttgtttaacctgcgatacgtgtgcgcctcctgggcaagtgcgcacctgcggtgccgatggacacgagtgctttggtcgacagagatcgctgcgtgttcgtggcatctttgagccctgcgtcatatgcacttacaggttgcaaaggccgaccagaccgcaaggctgtggccatgtattttgctggcattgcctagtgcgaatgcggcggggaggaaaccttaagtgtccatgctgccgtagaagatgctgcaggaaaagggcttgcgacggcaattgctgccgtcgcattcggtgtgacgagtcgtgcttgccgggcgagccggtaccggtggtagttatagacgactaaagatgaagctgtctgtctcttgaaagaacagagaacagcactcatgggacttgatatatacacaaaggacaactcctgagaattccagtgtcggatctcgaaccagttaatcaatcgatcagtgaggccgtcgcagtgttccgtaggtatcgtcaagagatgacgtcaaaattgtatattataaaaacgcacgctgactggcgaccatgggcccccacatgcctcatctggtaaggacaaataaatatggttggcagggtgacgtctgtctgcacttggtccaaccaacgcgcatgcatgaccgtgataagccagactgatctcttctgctcttctcatccgtagacaaatcaacccccctttacagtaacactcttgcgcccaacgatggccacctcctcgggggacgagacggagctcgacaggctgcgcgctctgctcgcagaggctgaccgaaaacgcgaacaagctgaacaaaaacaacaagaggaacagaggagacgcgaagaagcagagcgaaatgagaaaaaggaacaagagaaacgaaaagaagcagagaaaaaacaagaagaggcagtgcaaaatcaacaagaggaacagaagagacgtcagagtgccgagatacgcgcacagggatcgcggctacagtcactcgagcaatacctcgacggctgccactcgctactaagtctcgccattcacgtcgtgacagacccatcctcgacaacgcagggcgacacgacaaaaatcccaccggccgcgtcttcccccgacgcatcatcccctgggctcacttccccgcgcaacaagagaacatctgggccctgctagccgaccagcccttctgcgaccgcgctatattcccatccccacaccagctcgactacgtcgtcgccttaatcaagcctatcgcgagcgagaccgacctgcgacactttgcacgcgacacggtcgagatcgccgtgcagaagctggccgacgcagcctacgacgacgaccagctacgcgtcgctctcgatctccaaggatccgtcacctttgagagccacaccaaccttgggggcgccggtagcgtggataccattaccgaatctatccaacatgtcgacatcgcgtcaaaggccactggtgctaccacgccgcccccgaacccatccaaaaccagggcccatcgaaagaccaagagaggcaagagtggccccgccgaccagttctgtgtgtacagaagatccgacggcagagacgtcccggcacttgcgatcgagtataaggcgccgcacaagctgaccagggaccacgtcgtcgtcgtaggcttacaaagggagatttagccggaacgagatgtcatcgacaagcatggcgtcggcggcttcgccttcgcttcgagatggctcgtcgccgccgtcgtcacccagctgttctcctacatggtcgacaagggcatccagtacggctacctatgtaccggcgagaccttcgtcttcctccacatccctcaggatcccactatcgtctattactccgtctgcgtgcccaacctagacgtcgtggaagacgacgaggaccgcctccatcgtaccgccgtcgcccaggtatttgcctttgtcctccaggctcttcgctcgccaccgctgccgcaggattggcatgatcgtgccgagcatctgggcatttggggcgtcgagtttgatgacatcttacgacacattcctgtgacggatcgcaagccacccaaggattcaccactctacaagccccagcgctggagaggcttcgtacgttctccaatcaagacgcgatcccgccgctgtcggcaagggattagcgatacgcgccctcgggaaacgagtgacagtgacgatgacaaaggcgaccctccttccccatctgcttcacggtccttacgcgcctctgggcaaaaatctgccccgacgagcactaccagcagaggtgcgagacgaggtggccccagtcgaggtagaggggcaaaggcagggggcagaaaccagaagggagcacaaacgagcattcaagaccgccctttctgcacccaaaagtgtttgtcgggactggcgagcggtggggctatggacgacagatgccccaatttcaacgaccacccaccacgacacattgagccatccgtattccgacacctgcttcgtgaccaactggccaaggaccgtggggcagacgcagatgccatgccactctacctgagcgggtctgttggggcgctttttaaagtccgcctgtcgtcgcatgggtataccgtagtggccaaaggagtcgaacagaagcacttagcccgtctgcaacacgaatatcgaatatatgaccggctaagtagcatccaagggaaacacgtgcctgtatgcctcggcaagatagacttggttttaccttattactacgacggcggtgtttttagccacttcttgttcctctcctgggctgggaggccactgttcgacatggttcgcgggactgccaatcacacgctcgtcgacgccaccggtaaggcattccaggcaatccacgagctcgaggtcctccaccgcgacgccgaaccgcggaacgtgctgcatgatgcgcacagtgacaaggttctaatcgtagactttgaacgggctgagcttgtcagtcgcgaacctcttggggtgatcagtccaaataggaagagaaaacatgctgcaaacacggggaagagaaaaaaagacaaattcgccacagagctatcgtctattatgttgagcgttaggcggtacgtagatcagcgataatggatttgtagcaagctctcgtgtactagtccctttgcttccgtgtcactaatctcgccccatcgttctttcgtttcggctgtgattgacgaaagtagattaataccgaccgttgtgacgtagtcaaagtaacttcgcgacaacgcccctagctccctggtctccgcactgctctctcttgagttcgtatcatagagggcccgggcctctcgcgccgtcactagtgcgaccgcccagatattcagtatggcccatattaaggaccgaaccggggagtagaaaagtatgaataaggggatggaggcaacaaagagcaagccgagcccaatagctatcattcgatgatacaaatccataacgcctttcttcttcgaaagccttgtacccataacgcagccacctagatcgtcacgaggaagggtgccacagcgataagaaag

SEQ ID NO: 6159 - DNA, 1284 bp, Muscodor strobelii
  misc_feature: SGI cDNA ID NO. 561787
  misc_feature: Reduced expression when VOC is produced
  misc_feature: Encodes the peptide sequence at SEQ ID NO 6160
atggctttgaagcctagccctatgcctcgctgttgcgaattccatcaacgcgtcctgtccacaccatctgttgcatgggagcaggagctggcggtatcctgggtcagcgacgatgtcttatcccaggagcctgtgaatgtggaccaaccgtctctctgccccgagagcacaccgctgtatcccgccaatttcccggtttttccttcaggtcaccgtcttcttctccccgctgcaaattggtgctcttctgcgtctgaggtcactcaatttggcacacactcccttgctacaatggcaagccagcatggccaagactcgggatattatcccaagcgcctcgggtactgcgccacagcggacgataatattatccccggacagagcctgccttttcagtcgccagtgtttacggggaactgtgattacctgggcactggatccgccgttttcgagcaaggcttgaatgacgagattgttctcgagccgagcctacctcccgagtcgtctgcctatggggatgaccccgagagtctagctttatcgccgccgccgctagagtatgtaaacagcacaggcgtacaggttaccgatgtctcgacgcccgtcacgcccgtgacagcagaagcagaagtcaataccaccctaccatctacgactggaaacatggacatgatgacgccaacaccttcctttgagtccatgccgcacaacatccagatccctccacagcacccattcgtcgggaaacaggcgacacagcagcagcagtcaccgccgtcggtgtcgtcattgtcaggtacaagctcggcaaaagcaattacgacaagtatgagccaaagcaatagatcgattcagcggccggcaagaacatcgggtggtacctacacatgtgcctaccatgactgtacgctgagattcgagacaccagcacaattgcagacgcacaagcgagatggacacaggcaagcgaacttactgactcatctacgaaaccctgccagcctcagcctctcaccggcgaaccctcccaccagccaggctagttcacatcgatgtgagaggattaatccgagcaccggcaaactgtgcaatactgccttctcgcagcgccgtggtcttacgagacatgaggatacgatacacaacccacgcaagcaaaagatacgttgtgatttgtgcacagaggaaaagacgttcagtcgtgcggacgcgttgaagagacacttacgtgtacgccatcccgacatggaattctctgcaaagcatcgcaagggtgctacatag

SEQ ID NO: 6160 - protein, 427 aa, Muscodor strobelii
  misc_feature: SGI Peptide ID NO. 561787
  misc_feature (295)..(320): Pfam Id: PF00096 Pfam Desc: Zinc finger, C2H2 type
  misc_feature (162)..(426): NCBI GI: 171690196 Blast Desc: protein product [Podospora anserina] gi|170945046|emb|CAP71157.1| protein product [Podospora anserina]
  misc_feature (238)..(424): NCBI GI: 58257413 Blast Desc: 26S proteasome regulatory subunit-like protein [Magnaporthe grisea]
  misc_feature (238)..(424): NCBI GI: 39973453 Blast Desc: conserved [Magnaporthe grisea 70-15] gi|145017902|gb|EDK02181.1| conserved [Magnaporthe grisea 70-15]
  misc_feature (238)..(424): NCBI GI: 256729402 Blast Desc: NECHADRAFT_71246 [Nectria haematococca mpVI 77-13-4]
  misc_feature (233)..(424): NCBI GI: 116204843 Blast Desc: CHGG_10305 [Chaetomium globosum CBS 148.51] gi|88176433|gb|EAQ83901.1| CHGG_10305 [Chaetomium globosum CBS 148.51]
  misc_feature (197)..(424): NCBI GI: 189196842 Blast Desc: PTRG_04426 [Pyrenophora tritici-repentis Pt-1C-BFP] gi|187980638|gb|EDU47264.1| PTRG_04426 [Pyrenophora tritici-repentis Pt-1C-BFP]
  misc_feature (205)..(424): NCBI GI: 169604828 Blast Desc: SNOG_05430 [Phaeosphaeria nodorum SN15] gi|111066701|gb|EAT87821.1| SNOG_05430 [Phaeosphaeria nodorum SN15]
  misc_feature (221)..(425): NCBI GI: 85077320 Blast Desc: NCU01640 [Neurospora crassa OR74A] gi|18307454|emb|CAD21514.1| related to 26S proteasome subunit RPN4 [Neurospora crassa] gi|28917048|gb|EAA26772.1| [Neurospora
  misc_feature (239)..(424): NCBI GI: 242774432 Blast Desc: C2H2 transcription factor (Rpn4), [Talaromyces stipitatus ATCC 10500] gi|218722058|gb|EED21476.1| C2H2 transcription factor (Rpn4), [Talaromyces stipitatus ATCC 10500]
  misc_feature (258)..(424): NCBI GI: 70995980 Blast Desc: C2H2 transcription factor (Rpn4) [Aspergillus fumigatus Af293] gi|66850380|gb|EAL90707.1| C2H2 transcription factor (Rpn4), [Aspergillus fumigatus Af293] C2H2 transcription
  misc_feature: Useful for introducing or modulating the production of volatile compounds
MALKPSPMPRCCEFHQRVLSTPSVAWEQELAVSWVSDDVLSQEPVNVDQPSLCPESTPLYPANFPVFPSGHRLLLPAANWCSSASEVTQFGTHSLATMASQHGQDSGYYPKRLGYCATADDNIIPGQSLPFQSPVFTGNCDYLGTGSAVFEQGLNDEIVLEPSLPPESSAYGDDPESLALSPPPLEYVNSTGVQVTDVSTPVTPVTAEAEVNTTLPSTTGNMDMMTPTPSFESMPHNIQIPPQHPFVGKQATQQQQSPPSVSSLSGTSSAKAITTSMSQSNRSIQRPARTSGGTYTCAYHDCTLRFETPAQLQTHKRDGHRQANLLTHLRNPASLSLSPANPPTSQASSHRCERINPSTGKLCNTAFSQRRGLTRHEDTIHNPRKQKIRCDLCTEEKTFSRADALKRHLRVRHPDMEFSAKHRKGAT

SEQ ID NO: 6161 - DNA, 6920 bp, Muscodor strobelii
  misc_feature: SGI EST ID NO. CUFF.15683.1
  misc_feature: Variant of the nucleotide sequence at SEQ ID NO 6159
ctttcttatcgctgtggcacccttcctcgtgacgatctaggtggctgcgttatgggtacaaggctttcgaagaagaaaggcgttatggatttgtatcatcgaatgatagctattgggctcggcttgctctttgttgcctccatccccttattcatacttttctactccccggttcggtccttaatatgggccatactgaatatctgggcggtcgcactagtgacggcgcgagaggcccgggccctctatgatacgaactcaagagagagcagtgcggagaccagggagctaggggcgttgtcgcgaagttactttgactacgtcacaacggtcggtattaatctactttcgtcaatcacagccgaaacgaaagaacgatggggcgagattagtgacacggaagcaaagggactagtacacgagagcttgctacaaatccattatcgctgatctacgtaccgcctaacgctcaacataatagacgatagctctgtggcgaatttgtctttttttctcttccccgtgtttgcagcatgttttctcttcctatttggactgatcaccccaagaggttcgcgactgacaagctcagcccgttcaaagtctacgattagaaccttgtcactgtgcgcatcatgcagcacgttccgcggttcggcgtcgcggtggaggacctcgagctcgtggattgcctggaatgccttaccggtggcgtcgacgagcgtgtgattggcagtcccgcgaaccatgtcgaacagtggcctcccagcccaggagaggaacaagaagtggctaaaaacaccgccgtcgtagtaataaggtaaaaccaagtctatcttgccgaggcatacaggcacgtgtttcccttggatgctacttagccggtcatatattcgatattcgtgttgcagacgggctaagtgcttctgttcgactcctttggccactacggtatacccatgcgacgacaggcggactttaaaaagcgccccaacagacccgctcaggtagagtggcatggcatctgcgtctgccccacggtccttggccagttggtcacgaagcaggtgtcggaatacggatggctcaatgtgtcgtggtgggtggtcgttgaaattggggcatctgtcgtccatagccccaccgctcgccagtcccgacaaacacttttgggtgcagaaagggcggtcttgaatgctcgtttgtgctcccttctggtttctgccccctgcctttgcccctctacctcgactggggccacctcgtctcgcacctctgctggtagtgctcgtcggggcagatttttgcccagaggcgcgtaaggaccgtgaagcagatggggaaggagggtcgcctttgtcatcgtcactgtcactcgtttcccgagggcgcgtatcgctaatcccttgccgacagcggcgggatcgcgtcttgattggagaacgtacgaagcctctccagcgctggggcttgtagagtggtgaatccttgggtggcttgcgatccgtcacaggaatgtgtcgtaagatgtcatcaaactcgacgccccaaatgcccagatgctcggcacgatcatgccaatcctgcggcagcggtggcgagcgaagagcctggaggacaaaggcaaatacctgggcgacggcggtacgatggaggcggtcctcgtcgtcttccacgacgtctaggttgggcacgcagacggagtaatagacgatagtgggatcctgagggatgtggaggaagacgaaggtctcgccggtacataggtagccgtactggatgcccttgtcgaccatgtaggagaacagctgggtgacgacggcggcgacgagccatctcgaagcgaaggcgaagccgccgacgccatgcttgtcgatgacatctcgttccggctaaatctccctttgtaagcctacgacgacgacgtggtccctggtcagcttgtgcggcgccttatactcgatcgcaagtgccgggacgtctctgccgtcggatcttctgtacacacagaactggtcggcggggccactcttgcctctcttggtctttcgatgggccctggttttggatgggttcgggggcggcgtggtagcaccagtggcctttgacgcgatgtcgacatgttggatagattcggtaatggtatccacgctaccggcgcccccaaggttggtgtggctctcaaaggtgacggatccttggagatcgagagcgacgcgtagctggtcgtcgtcgtaggctgcgtcggccagcttctgcacggcgatctcgaccgtgtcgcgtgcaaagtgtcgcaggtcggtctcgctcgcgataggcttgattaaggcgacgacgtagtcgagctggtgtggggatgggaatatagcgcggtcgcagaagggctggtcggctagcagggcccagatgttctcttgttgcgcggggaagtgagcccaggggatgatgcgtcgggggaagacgcggccggtgggatttttgtcgtgtcgccctgcgttgtcgaggatgggtctgtcacgacgtgaatggcgagacttagtagcgagtggcagccgtcgaggtattgctcgagtgactgtagccgcgatccctgtgcgcgtatctcggcactctgacgtctcttctgttcctcttgttgattttgcactgcctcttcttgttttttctctgcttcttttcgtttctcttgttcctttttctcatttcgctctgcttcttcgcgtctcctctgttcctcttgttgtttttgttcagcttgttcgcgttttcggtcagcctctgcgagcagagcgcgcagcctgtcgagctccgtctcgtcccccgaggaggtggccatcgttgggcgcaagagtgttactgtaaaggggggttgatttgtctacggatgagaagagcagaagagatcagtctggcttatcacggtcatgcatgcgcgttggttggaccaagtgcagacagacgtcaccctgccaaccatatttatttgtccttaccagatgaggcatgtgggggcccatggtcgccagtcagcgtgcgtttttataatatacaattttgacgtcatctcttgacgatacctacggaacactgcgacggcctcactgatcgattgattaactggttcgagatccgacactggaattctcaggagttgtcctttgtgtatatatcaagtcccatgagtgctgttctctgttctttcaagagacagacagcttcatctttagtcgtctataactaccaccggtaccggctcgcccggcaagcacgactcgtcacaccgaatgcgacggcagcaattgccgtcgcaagcccttttcctgcagcatcttctacggcagcatggacacttaaggtttcctccccgccgcattcgcactaggcaatgccagcaaaatacatggcctacgcactttggttagatcgtcgcttgagctgtcacgcttgctatcggcttaccacagccttgcggtctggtcggcctttgcaacctgtaagtgcatatgacgcagggctcaaagatgccacgaacacgcagcgatctctgtcgaccaaagcactcgtgtccatcggcaccgcaggtgcgcacttgcccaggaggcgcacacgtatcgcaggttaactagcaaatgttgattaactcggacggtgccttgtcgaaggagaagaaaaagaagaagaagaagaagagaaaggacatacacaaccacaacgactgtagacactcgcccaggactcttccaggcctcgctggcacgtgctgcaccgtggcacagatcgcgccaggtcgatcaggggctgactgtcgcgagatggatcaccctcgacggggatgggggcagacgcgggcaccaggcgttggatagattctcttgcttgttcgctgcgcagcccgaaccgatgcttcatctcgttgacggtatcgtcaatcatcttcactagtagctccctcgactgctcaagcacttggactgaatctcgtgcgcagctctcgaactggtcgagaacaaactggagggggtcagggtggtctcccacggtccgtagggcgtcgtctcgctgctgccgaacctcgccaatccgctggcacaaccaaaggcgcaccaattcgtcgacggttgcttcgccgttgcggccattcctatgacggcgagtaaccacgcgagttgtcatattgatagggtcggctagcggcgcggaagaggaagaatcaaagaacgtgagagtttggagaataagaaagatcaggccgaggtggcagcgtacgctacatttatacctgcctgcacctccactcgtggctcgaaggaagactttaccccactgggcacgtttgtcatgatttgtgtcgtcgtctacccatcgggtaagaccacgagctcgcgtagctatcgaccagtcatccaccccagtccgtctgcctcgcagatctcctcggcggtctagcgcaaggttgagctggcaatgctcttgaagttgcaggatccgtcccgacgtcccgcaggacctcccaacctcctgttcactctttttgcttatcatgtctcaataatggcacgcatgtgtcatggttccaatctgccttcggccatagccgacgtagcccctgaataccaggctcgtcgtagaagcttcacgatgacgaccaacaattagaaagctagcatatcaatttaacgcggcaaggcagcgaatcgtcttcagcgttcttatgtttctacttacttcctcggttcttcaaattttcgaggccgccggccatatgccgccataagcgaagatgatctttgccaggcgattcacgcggtctgcgtcctagttatcagccgcagttcgaccctccatcacccatgagctgccttgattccgacctccaaggcaagagacaagacgtcggccgccgtcagatccctgttcaagataacttggagcacgtcgcgaaaggctggctatgccatggccctcgcagacccgtagggggtatcagaggcagacatgcttgtcgtctgggagtgtatatgcaaacatcaggatcgggtcaggggctgactatacgctgtccttgatttaatcaaaggagtgttttgttggctatcttaagattacagtctcgtgcttatcgtgatcagcgaactgtataaaagcaggtgatagacctgtcatcgtaggatttttcttcttcccctcttcctatcgctcagatcagactttgtcttctatatcgtttacagacctcatgatttaatcttcaacatggctttgaagcctagccctatgcctcggtatgacgagatattcgcaccccggagtagacttcggaacgggttgaatcctcctggctcatattatccattcccatcctccctttcatacgtgagcctgccgtctttgccaatttcgctgccaggtcatcctctcaccccgatttatcccctttcgcagttttatagctgttgcgaattccatcaacgcgtcctgtccacaccatctgttgcatgggagcaggagctggcggtatcctgggtcagcgacgatgtcttatcccaggagcctgtgaatgtggaccaaccgtctctctgccccgagagcacaccgctgtatcccgccaatttcccggtttttccttcaggtcaccgtcttcttctccccgctgcaaattggtgctcttctgcgtctgaggtcactcaatttggcacacactcccttgctacaatggcaagccagcatggccaagactcgggatattatcccaagcgcctcgggtactgcgccacagcggacgataatattatccccggacagagcctgccttttcagtcgccagtgtttacggggaactgtgattacctgggcactggatccgccgttttcgagcaaggcttgaatgacgagattgttctcgagccgagcctacctcccgagtcgtctgcctatggggatgaccccgagagtctagctttatcgccgccgccgctagagtatgtaaacagcacaggcgtacaggttaccgatgtctcgacgcccgtcacgcccgtgacagcagaagcagaagtcaataccaccctaccatctacgactggaaacatggacatgatgacgccaacaccttcctttgagtccatgccgcacaacatccagatccctccacagcacccattcgtcgggaaacaggcgacacagcagcagcagtcaccgccgtcggtgtcgtcattgtcaggtacaagctcggcaaaagcaattacgacaagtatgagccaaagcaatagatcgattcagcggccggcaagaacatcgggtggtacctacacatgtgcctaccatgactgtacgctgagattcgagacaccagcacaattgcagacgcacaagcgagatggacacaggcaagcgaacttactgactcatctacgaaaccctgccagcctcagcctctcaccggcgaaccctcccaccagccaggctagttcacatcgatgtgagaggattaatccgagcaccggcaaactgtgcaatactgccttctcgcagcgccgtggtcttacgagacatgaggatacgatacacaacccacgcaagcaaaagatacgttgtgatttgtgcacagaggaaaagacgttcagtcgtgcggacgcgttgaagagacacttacgtgtacgccatcccgacatggaattctctgcaaagcatcgcaagggtgctacatagggtgccggaaagggtcttttctgtggcacgatcatggttgcaaaggcaagctgtccgcaattttaccaaatttcaaacatcgcctgctcaaaagatgcggatccacgggcgaaaaggggtaaaattatctgaatcggatcgcatttagtttagttacagtctagcctgtaatacaaagcttctcctagccaatctaattttcaaaataactcgtc

SEQ ID NO: 6162 - DNA, 921 bp, Muscodor strobelii
  misc_feature: SGI cDNA ID NO. 561788
  misc_feature: Encodes the peptide sequence at SEQ ID NO 6163
atgtcttcatcatccgaatcgttccttttgcccgatcttgacctagaaattcgtccgccaccccgtaatcaatacattgcctcttcctcaatctcgtgtgctgaatattcttgggacaccagtcttgataatacgggtgtctggcatcctgatttgacttttccatcgaactcggcactctgggttgatatcccacagggtccggaagatcttcaatggccagtcacgccttgtgaccctgtccaaactctcgaaatttctcgtcgatttgagttctcggagcccagtagccccatatcaagtggtgaatgcagctctgaaatcacggacgaggagatcgcagacttcttcaacccgtcgccagagacttcagtatctaaccaacctgtcgcccacaccagctctggaggaagtctggacaattctgtcgatctcacgatagatgataatgatgatgatgaagatcccatccctcatgtgcgtcatagtcaacggctgcaaaagccatccccgggagcccatcgtcacgatgaactacagttctacgatcgtcaggtaacacttcgcatagtatctgtggactatcaagatccccagagcgatgatatacatcagtttcgccggcagcgaaagcgttgggcatgcgaaacattgcacctcgaggaggataccgacgaggacaagaacatctcattgattttggcccatagcactcactgtttgaccgtgaatatgcttgccaacggcgaaggggccactgttgcccttcaacactacgagagataccatgaggaccagatttacggtgtgttcggatggcgcgatccagtcgaggaggaagaggatgagttcgtcgttggagaagaggttattcgggatatgttgcttgatcccgacaagggtcgtcttgtggattggtga

SEQ ID NO: 6163 - protein, 306 aa, Muscodor strobelii
  misc_feature: SGI Peptide ID NO. 561788
MSSSSESFLLPDLDLEIRPPPRNQYIASSSISCAEYSWDTSLDNTGVWHPDLTFPSNSALWVDIPQGPEDLQWPVTPCDPVQTLEISRRFEFSEPSSPISSGECSSEITDEEIADFFNPSPETSVSNQPVAHTSSGGSLDNSVDLTIDDNDDDEDPIPHVRHSQRLQKPSPGAHRHDELQFYDRQVTLRIVSVDYQDPQSDDIHQFRRQRKRWACETLHLEEDTDEDKNISLILAHSTHCLTVNMLANGEGATVALQHYERYHEDQIYGVFGWRDPVEEEEDEFVVGEEVIRDMLLDPDKGRLVDW

SEQ ID NO: 6164 - DNA, 295 bp, Muscodor strobelii
  misc_feature: SGI EST ID NO. CUFF.15500.0
  misc_feature: Variant of the nucleotide sequence at SEQ ID NO 6162
ccaacctgtcgcccacaccagctctggaggaagtctggacaattctgtcgatctcacgatagatgataatgatgatgatgaagatcccatccctcatgtgcgtcatagtcaacggctgcaaaagccatccccgggagcccatcgtcacgatgaactacagttctacgatcgtcaggtaacacttcgcatagtatctgtggactatcaagatccccagagcgatgatatacatcagtttcgccggcagcgaaagcgttgggcatgcgaaacattgcacctcgaggaggataccgac

SEQ ID NO: 6165 - DNA, 1353 bp, Muscodor strobelii
  misc_feature: SGI cDNA ID NO. 561789
  misc_feature: Encodes the peptide sequence at SEQ ID NO 6166
atgggcacatcgatcttttgccctttcattgcgttcgcggtaggcgtcttcatctggcctggcaacatccatgcggcggccacttatctctcaggccatcaggcagacatccactcctgtcaaagttgccaattcgaggtttcaattactgtgcacccaaagaatacttgcttgcgagaagacggtgctactttgaataacctcacggcttatctcatcggtcaacggccagtgcccgagtcgacttcgaaaacgatcgctttcatcgctcagttcaccgacattaacgagacgacttacttcacgccgccggctctcgctacaggccagcaaacgcaagtattagacgtagagggtcagcatctcgagctgcagattagttcacacggatcaagcttcaggacgccagggccagtcatcggcggtcgcatctacattgcacttaacggactcgacttctcctacgggcccgggcagaccatcaaccttccggatccaaacagtgctgacagtgttgctcgcaccaatcccaacgcctttgttgaattcacctctactgctgatggattaacagttaatctatcatttgttgactgggttcatctcgccctaggattaaaggtcgttttccagaaaagccaagagaacacagaggagacgacttggtccgtccctggtcttcgccctgatggcctcagtaaaatctgcgacggtttaagtcacctgggcggtttttggcccagcctctgtgtcagagacgagaatcaaaacccgctttacgtcatgtcgccgaatatatacggcaacttacacccggaagacctcgattctcgaacttactacgataattacatcgatcaagtctggagcaagtatgccagcagccccctccagctcgaccttcgaacaaccaccgaagcggggagtacgatggagaatagctcgatcgtgacgtgtcgggtcgctcgtgatgataatctacttcattgcgacaacaatacgtggacgtttgcaaaacccacgacggcggatatttggggctgtgcttctggcccctttgcgaatccgactggatccgtgtggggacgtaagagagcagtcccaatcctgtgtgctgccttcgtccgctcgacgattcatctggatgcgatccagccttcgaatatcccggtagatcgtttctatcgaaacagcatcacgcatcattatgctaaacttgtccacgagcaccttgtcgacggtataggatacgcattcagttacgatgatgttagtcctgatgctaatacaaattccgccggtctgatttcaggagatcaacctatcaaactcgacattatgatcaatgcttag

SEQ ID NO: 6166 - protein, 450 aa, Muscodor strobelii
  misc_feature: SGI Peptide ID NO. 561789
  misc_feature (109)..(450): NCBI GI: 256726304 Blast Desc: NECHADRAFT_94692 [Nectria haematococca mpVI 77-13-4]
  misc_feature (133)..(438): NCBI GI: 46111053 Blast Desc: FG02408.1 [Gibberella zeae PH-1]
  misc_feature (122)..(437): NCBI GI: 261361626 Blast Desc: glucanase B [Verticillium albo-atrum VaMs.102]
  misc_feature (120)..(448): NCBI GI: 255931147 Blast Desc: Pc12g02400 [Penicillium chrysogenum Wisconsin 54-1255] gi|211581749|emb|CAP79867.1| Pc12g02400 [Penicillium chrysogenum Wisconsin 54-1255]
  misc_feature (180)..(448): NCBI GI: 257056587 Blast Desc: Svir_26040 [Saccharomonospora viridis DSM 43017] gi|256586459|gb|ACU97592.1| Svir_26040 [Saccharomonospora viridis DSM 43017]
  misc_feature (121)..(448): NCBI GI: 242774018 Blast Desc: glucan endo-1,3-beta-glucosidase precursor, [Talaromyces stipitatus ATCC 10500] gi|218721977|gb|EED21395.1| glucan endo-1,3-beta-glucosidase precursor, [Talaromyces ATCC
  misc_feature (100)..(448): NCBI GI: 212526330 Blast Desc: conserved [Penicillium marneffei ATCC 18224] gi|210072720|gb|EEA26807.1| conserved [Penicillium marneffei ATCC 18224]
  misc_feature (21)..(448): NCBI GI: 242780568 Blast Desc: conserved [Talaromyces stipitatus ATCC 10500] gi|218719770|gb|EED19189.1| conserved [Talaromyces stipitatus ATCC 10500]
  misc_feature (139)..(450): NCBI GI: 256668240 Blast Desc: StAA4_13875 [Streptomyces sp. AA4]
  misc_feature (62)..(450): NCBI GI: 212531815 Blast Desc: glucan endo-1,3-beta-glucosidase precursor, [Penicillium marneffei ATCC 18224] gi|210071428|gb|EEA25517.1| glucan endo-1,3-beta-glucosidase precursor, [Penicillium ATCC
  misc_feature (138)..(424): SWISSPROT Homolog: EC 3.2.1.39 Glucan endo-1,3-beta-D-glucosidase
MGTSIFCPFIAFAVGVFIWPGNIHAAATYLSGHQADIHSCQSCQFEVSITVHPKNTCLREDGATLNNLTAYLIGQRPVPESTSKTIAFIAQFTDINETTYFTPPALATGQQTQVLDVEGQHLELQISSHGSSFRTPGPVIGGRIYIALNGLDFSYGPGQTINLPDPNSADSVARTNPNAFVEFTSTADGLTVNLSFVDWVHLALGLKVVFQKSQENTEETTWSVPGLRPDGLSKICDGLSHLGGFWPSLCVRDENQNPLYVMSPNIYGNLHPEDLDSRTYYDNYIDQVWSKYASSPLQLDLRTTTEAGSTMENSSIVTCRVARDDNLLHCDNNTWTFAKPTTADIWGCASGPFANPTGSVWGRKRAVPILCAAFVRSTIHLDAIQPSNIPVDRFYRNSITHHYAKLVHEHLVDGIGYAFSYDDVSPDANTNSAGLISGDQPIKLDIMINA

SEQ ID NO: 6167 - DNA, 556 bp, Muscodor strobelii
  misc_feature: SGI EST ID NO. CUFF.15503.0
  misc_feature: Variant of the nucleotide sequence at SEQ ID NO 6165
cccagcctctgtgtcagagacgagaatcaaaacccgctttacgtcatgtcgccgaatatatacggcaacttacacccggaagacctcgattctcgaacttactacgataattacatcgatcaagtctggagcaagtatgccagcagccccctccagctcgaccttcgaacaaccaccgaagcggggagtacgatggagaatagctcgatcgtgacgtgtcgggtcgctcgtgatgataatctacttcattgcgacaacaatacgtggacgtttgcaaaacccacgacggcggatatttggggctgtgcttctggcccctttgcgaatccgactggatccgtgtggggacgtaagagagcagtcccaatcctgtgtgctgccttcgtccgctcgacgattcatctggatgcgatccagccttcgaatatcccggtagatcgtttctatcgaaacagcatcacgcatcattatgctaaacttgtccacgagcaccttgtcgacggtataggatacgcattcagttacgatgatgttagtcctgatgctaatacaaatt

SEQ ID NO: 6168 - DNA, 1839 bp, Muscodor strobelii
  misc_feature: SGI cDNA ID NO. 561790
  misc_feature: Encodes the peptide sequence at SEQ ID NO 6169
atggggctttcgaccacagaggcccggaaacagatatcgacccatctgcaaaccatgaagaaagcttattctaccttactcatgtgtcatttcttcttgcctgccagcaatgctgatgctgatatcagtgagatgccttgtgacgcctacgaagggtgcgaaagcggtaaaatcatgaccgccttagccaacgaccgcttgccggaccaaaagccaaactatgagtacttctgtaagatcttaagtgctgacagcgatctttttcttcggccaaagcgatgctggatcttcgttacttcacccagcgtcagctacgaacaggaaaagcatgacccggccaagacgccattcacgccatggacctctgacgatgagttcgcaaaggattcataccgagacgtgtatcagggccgccgcattgataggagaccactgcatgaatacactaaagctttctcgcaggcagagtcatctactatcgatgggatatctcgccagtggtcagggcggttccctgagttacaaatgaaactcgctgccgcacatgaagatacgcagctttgtgacaaggagacatcgcgctgtgttgttggaccatgcgatacattccactataaagtcgctctagacttacaagcgggatctcgccttccatatgactctctactttgctgcatagttgatctggacatatgtcatccagctttgtatgaccacaactggagatccgtaacctcggtggccggaacggatgagctgcggtcattgacgtcagagcctgagatatgggatcttggcgagaccgtggaaacatgcacatctgcaagcgctacccgcgttggccgcaatgagtgtcgtgccattcgtgtgccgttcccagctgataccttggcaactattatcaacaagctagcccaatacgctaccgcacctcaggagcatgccgctcagaagacacagggggccggacgcccctctggccgtcgggccgcgaaaagcgagacaaaggagaagcgcgaggacttttcgccatcaaatcctcatcggctcttgtcagagcttgccatataccaggagctttggtcagcgccgagcgatcaagtcgccgctcccgagcaccgttggacccggcgagccataattctatggacgttcaccgacagttcgaatctttcagacactacatggcggttccttacgaagcttggtccatactcggagtaccaccaacaacacgcatataagattgattcgtcggtagtctcttgcgacagcaggatgccactggctcagccttcgtcacatgctcatggtatcctgcataatggcaattcgctatattcagctatgcagtcgcaacgaccaaaccgcgatcacgagagttttgtgagcagcctggaggttctggcagccgctacttcactagagggtaactattttggcggcttcgacggcatcggaaatgatgctaatatcagtaatcttacgaacctgcactgcttcccaagccttatgtttgataactacaacgcagacatcatgaacagccgcgctagcagtttccaccgtcatgctcctatcagcaacccggcactatggagtaatgataatcttgtattctggccaaatacaacggcggcattgttgccggacggctcgtggggtagcccaggcgcccgaatcgagacgattggcgatcggtctgacggcatcgacagtgatgtgaatatggactcagccacaccggcaagtcaggtcttgcgcggaagcgaagtaggtacgattggcagcagagtagatgaattggagcattccgggtgcgccaccttcaatgaatag

SEQ ID NO: 6169 - protein, 612 aa, Muscodor strobelii
  misc_feature: SGI Peptide ID NO. 561790
  misc_feature (9)..(413): NCBI GI: 171695434 Blast Desc: protein product [Podospora anserina] gi|170947959|emb|CAP60123.1| protein product [Podospora anserina]
  misc_feature (9)..(413): NCBI GI: 38567158 Blast Desc: [Neurospora crassa]
  misc_feature (9)..(413): NCBI GI: 85116210 Blast Desc: NCU02612 [Neurospora crassa OR74A] gi|28926815|gb|EAA35779.1| [Neurospora crassa OR74A]
  misc_feature (8)..(568): NCBI GI: 256734717 Blast Desc: NECHADRAFT_98929 [Nectria haematococca mpVI 77-13-4]
  misc_feature (58)..(413): NCBI GI: 261355233 Blast Desc: conserved [Verticillium albo-atrum VaMs.102]
  misc_feature (8)..(426): NCBI GI: 116182074 Blast Desc: CHGG_01665 [Chaetomium globosum CBS 148.51] gi|88185962|gb|EAQ93430.1| CHGG_01665 [Chaetomium globosum CBS 148.51]
  misc_feature (54)..(427): NCBI GI: 284449171 Blast Desc: FoabaA [Fusarium oxysporum f. sp. lycopersici]
  misc_feature (9)..(413): NCBI GI: 145613986 Blast Desc: MGG_01218 [Magnaporthe grisea 70-15] gi|145020981|gb|EDK05110.1| MGG_01218 [Magnaporthe grisea 70-15]
  misc_feature (9)..(537): NCBI GI: 156054688 Blast Desc: SS1G_06192 [Sclerotinia sclerotiorum 1980] gi|154703972|gb|EDO03711.1| SS1G_06192 [Sclerotinia sclerotiorum 1980]
MGLSTTEARKQISTHLQTMKKAYSTLLMCHFFLPASNADADISEMPCDAYEGCESGKIMTALANDRLPDQKPNYEYFCKILSADSDLFLRPKRCWIFVTSPSVSYEQEKHDPAKTPFTPWTSDDEFAKDSYRDVYQGRRIDRRPLHEYTKAFSQAESSTIDGISRQWSGRFPELQMKLAAAHEDTQLCDKETSRCVVGPCDTFHYKVALDLQAGSRLPYDSLLCCIVDLDICHPALYDHNWRSVTSVAGTDELRSLTSEPEIWDLGETVETCTSASATRVGRNECRAIRVPFPADTLATIINKLAQYATAPQEHAAQKTQGAGRPSGRRAAKSETKEKREDFSPSNPHRLLSELAIYQELWSAPSDQVAAPEHRWTRRAIILWTFTDSSNLSDTTWRFLTKLGPYSEYHQQHAYKIDSSVVSCDSRMPLAQPSSHAHGILHNGNSLYSAMQSQRPNRDHESFVSSLEVLAAATSLEGNYFGGFDGIGNDANISNLTNLHCFPSLMFDNYNADIMNSRASSFHRHAPISNPALWSNDNLVFWPNTTAALLPDGSWGSPGARIETIGDRSDGIDSDVNMDSATPASQVLRGSEVGTIGSRVDELEHSGCATFNE

SEQ ID NO: 6170 - DNA, 576 bp, Muscodor strobelii
  misc_feature: SGI EST ID NO. CUFF.15510.0
  misc_feature: Variant of the nucleotide sequence at SEQ ID NO 6168
ccaagccttatgtttgataactacaacgcagacatcatgaacagccgcgctagcagtttccaccgtcatgctcctatcagcaacccggcactatggagtaatgataatcttgtattctggccaaatacaacggcggcattgttgccggacggctcgtggggtagcccaggcgcccgaatcgagacgattggcgatcggtctgacggcatcgacagtgatgtgaatatggactcagccacaccggcaagtcaggtcttgcgcggaagcgaaggtacgattggcagcagagtagatgaattggagcattccgggtgcgccaccttcaatgaatagtttccttgtctctatgaaagtcatttcgctcctttttcctccactccaaattcgactttatggccaagattgatgtaatggctgataacagacctggatcaccaggtactatgcacatgtaaatggatatatatgcacaaaacgagttcagactctatttcttaaattgctacattgactcttaaatgttcatatacgatcaggttactagtcacttgacgtaatgtccactggtcattaact

SEQ ID NO: 6171 - DNA, 996 bp, Muscodor strobelii
  misc_feature: SGI cDNA ID NO. 561791
  misc_feature: Encodes the peptide sequence at SEQ ID NO 6172
atgcttgttccgccccgccttctcgcatcatgcatgttcgacttctctcattttggagccgatcttctacaggtagggaacttacatttagcgacgaaccccggccaggtccacgctcgcttagaaggcaatggcatcacccaagctcacggagtcagtgatctgatgggtgacatcggggacggcctcgacgttccgaaagggattggcgatgttgtcaattcgcttggtgatctcggtgatggtactggcgttcttggcctgggttctcttgtcgaatctctccacctcccccaatggtactcactacatgttaccagttattgctggggtgtgtatgccccagctgccgcggcgccgaacgcatcgtataatatcgctaactgcgcagggttcaaagcatcagctaggttgaatatttccacaatcctatccgccaatcttcccatcccgaagcagatacaggtcagtctcgcggacattctgccggccgcggttcaagatgcgcttgattacatcagtggccttcttttaggactgtacatctcttatgttctcagcttcgtagcctgtggcgtgtctattctcctcagcctcggtattttcacccgtggagtcaaaagccaggacaaaacatataagatggcgatgcgtgctaatatcctcattgcttcccttgcgtcgttactactcgctgtcgctagcgtggcaactacattggtggccagaaagggggagtctgcgattactgatgccggcgcgatcgttgggttatctgcgcgcgggggtacgaagctcattgcaatctcctgggcctcgttcaccctcatgtttgtagatttcgtttcttgggccctatcatactatttcgagtttcgctattatacatatcccccccaaggtcacgccccatattcacaaaagcttgtagatgactggtgggatcgattctcgcccattattccgcccaagcacccatctcaggctgcgaagtag

SEQ ID NO: 6172 - protein, 331 aa, Muscodor strobelii
  misc_feature: SGI Peptide ID NO. 561791
  misc_feature (90)..(284): NCBI GI: 256731881 Blast Desc: NECHADRAFT_69663 [Nectria haematococca mpVI 77-13-4]
  misc_feature (64)..(271): NCBI GI: 46121827 Blast Desc: FG05291.1 [Gibberella zeae PH-1]
  misc_feature (27)..(272): NCBI GI: 261352445 Blast Desc: conserved [Verticillium albo-atrum VaMs.102]
  misc_feature (42)..(315): NCBI GI: 85114980 Blast Desc: NCU00872 [Neurospora crassa OR74A] gi|28926582|gb|EAA35552.1| [Neurospora crassa OR74A]
  misc_feature (65)..(205): NCBI GI: 154290155 Blast Desc: BC1G_15770 [Botryotinia fuckeliana B05.10] gi|150848431|gb|EDN23624.1| BC1G_15770 [Botryotinia fuckeliana B05.10]
  misc_feature (44)..(308): NCBI GI: 189204159 Blast Desc: conserved [Pyrenophora tritici-repentis Pt-1C-BFP] gi|187985514|gb|EDU51002.1| conserved [Pyrenophora tritici-repentis Pt-1C-BFP]
  misc_feature (88)..(302): NCBI GI: 169623909 Blast Desc: SNOG_15203 [Phaeosphaeria nodorum SN15] gi|111056308|gb|EAT77428.1| SNOG_15203 [Phaeosphaeria nodorum SN15]
  misc_feature (13)..(289): NCBI GI: 171683259 Blast Desc: protein product [Podospora anserina] gi|170941589|emb|CAP67243.1| protein product [Podospora anserina]
  misc_feature (65)..(289): NCBI GI: 156030536 Blast Desc: SS1G_14492 [Sclerotinia sclerotiorum 1980] gi|154700883|gb|EDO00622.1| SS1G_14492 [Sclerotinia sclerotiorum 1980]
  misc_feature (87)..(312): NCBI GI: 212543693 Blast Desc: conserved [Penicillium marneffei ATCC 18224] gi|210066908|gb|EEA21001.1| conserved [Penicillium marneffei ATCC 18224]
MLVPPRLLASCMFDFSHFGADLLQVGNLHLATNPGQVHARLEGNGITQAHGVSDLMGDIGDGLDVPKGIGDVVNSLGDLGDGTGVLGLGSLVESLHLPQWYSLHVTSYCWGVYAPAAAAPNASYNIANCAGFKASARLNISTILSANLPIPKQIQVSLADILPAAVQDALDYISGLLLGLYISYVLSFVACGVSILLSLGIFTRGVKSQDKTYKMAMRANILIASLASLLLAVASVATTLVARKGESAITDAGAIVGLSARGGTKLIAISWASFTLMFVDFVSWALSYYFEFRYYTYPPQGHAPYSQKLVDDWWDRFSPIIPPKHPSQAAK

SEQ ID NO: 6173 - DNA, 1704 bp, Muscodor strobelii
  misc_feature: SGI EST ID NO. CUFF.15524.0
  misc_feature: Variant of the nucleotide sequence at SEQ ID NO 6171
ccggcatacagcaacggcaactggaagatttccacatcatctctgtacagacctatcttactcgcttagcgtaggatcaagaacaacgctaaccgcgttagttcgacttctctcattttggagccgatcttctacaggtagggaacttacatttagcgacgaaccccggccaggtccacgctcgcttagaaggcaatggcatcacccaagctcacggagtcagtgatctgatgggtgacatcggggacggcctcgacgttccgaaagggattggcgatgttgtcaattcgcttggtgatctcggtgatggtactggcgttcttggcctgggttctcttgtcgaatctctccacctcccccaatggtactcactacatgttaccagttattgctggggtgtgtatgccccagctgccgcggcgccgaacgcatcgtataatatcgctaactgcgcagggttcaaagcatcagctaggttgaatatttccacaatcctatccgccaatcttcccatcccgaagcagatacaggtcagtctcgcggacattctgccggccgcggttcaagatgcgcttgattacatcagtggccttcttttaggactgtacatctcttatgttctcagcttcgtagcctgtggcgtgtctattctcctcagcctcggtattttcacccgtggagtcaaaagccaggacaaaacatataagatggcgatgcgtgctaatatcctcattgcttcccttgcgtcgttactactcgctgtcgctagcgtggcaactacattggtggccagaaagggggagtctgcgattactgatgccggcgcgatcgttgggttatctgcgcgcgggggtacgaagctcattgcaatctcctgggcctcgttcaccctcatgtttgtagatttcgtttcttgggccctatcatactatttcgagtttcgctattatacatatcccccccaaggtcacgccccatattcacaaaagcttgtagatgactggtgggatcgattctcgcccattattccgcccaagcacccatctcaggctgcgaagtaggctctgcagttgccctgcaatcccaaaacgtccagaatgacgtttgtcgcaggcggccgacgacgatctttctaaaggcagctcgtgcttcattcattcgtacagctggacttggttcgataggagaatacgcacgcccacgtcgcgattgggcataggcagcaccatctctcacccctctgcttcggtgttcctggatcacaaggctcactgccctcctctctggtttcctggagctcctggtgaaggacttcgtactgttcttggagcttgaaatagtccaatgtcatggctatatttcgtttgatgaggttctccgccagtcgcttataccaggtcaacacctcaggcggagagtgcaacggctgcgcatttcggggctgggcaccacccgtgctagaaatcttcgaagtgttagtggcagggcgattttatgagaggcgtagagagtacattttcattcgtcatcatcgatataaagatgcgcgactacgttgggcacggtccatttggtatttgactggtgattctggaaatttatctccaatttgctttgttttattagtctataggaagatcacatgtcaagattgcattccattttggctacatgtcttgtttgttccaggaggctgagttatac

SEQ ID NO: 6174 - DNA, 561 bp, Muscodor strobelii
  misc_feature: SGI cDNA ID NO. 561792
  misc_feature: Elevated expression when VOC is produced
  misc_feature: Encodes the peptide sequence at SEQ ID NO 6175
atgtccttcaacccgtatgaatttacacctggcaacgagagctggtccccggggttcatggactacaatcttattaacgtcaacgcctacgccaatggtccgtttggagaactgcgcccatccataccagttgaaatgtctactaagtggtggggaagtatggatgatgctgtcaccttttcactagaaactaccgatcctagtaagggtaacggatcggtgaccgctggccatgggaaacttccaccgccatcgggtcctgagcacgtcaccgttggctgggaggactcatcggcccggaggccatggaagtgtgaccggcccggatcccatggcacgggcgaaacagtcgagtgcagattctgccataaacagtttcctgccgcccgcaaagacaacttacgcgcgcacatccaacgacacgcagtgagagacaaagggcctcatgctcgcgtgcagttttttgaagaagctgccatcgagtacgagcaggagatccaaccgcgctcaaaacgagcaaaacgaccggaaactaatgacaaatcaacgggacggagctag

SEQ ID NO: 6175 - protein, 186 aa, Muscodor strobelii
  misc_feature: SGI Peptide ID NO. 561792
  misc_feature: Useful for introducing or modulating the production of volatile compounds
MSFNPYEFTPGNESWSPGFMDYNLINVNAYANGPFGELRPSIPVEMSTKWWGSMDDAVTFSLETTDPSKGNGSVTAGHGKLPPPSGPEHVTVGWEDSSARRPWKCDRPGSHGTGETVECRFCHKQFPAARKDNLRAHIQRHAVRDKGPHARVQFFEEAAIEYEQEIQPRSKRAKRPETNDKSTGRS

SEQ ID NO: 6176 - DNA, 1142 bp, Muscodor strobelii
  misc_feature: SGI EST ID NO. CUFF.15555.1
  misc_feature: Variant of the nucleotide sequence at SEQ ID NO 6174
cggcagtctggaaacgaagtggccaagatgccaatgaatagccaatgagcgatggcattgacgcatagaaagcgagctctatgagcgtggctaccttgccgccccaaatgtattatatataaaatgagtagttggccatgaaagtgttgtcgctttgtcacactggcgatatcactgcaacgaccgtccctacctggagcagatggacttccgtaagagacattgtatccaaccttccgcgtcaaaacacctaggtctatttttcttcttcgctagttacctgccgagtaatgatgtccttcaacccgtatgaatttacacctggcaacgagagctggtccccggggttcatggactacaatcttattaacgtcaacgcctacgccaatggtccgtttggagaactgcgcccatccataccagttgaaatgtctactaagtggtggggaagtatggatgatgctgtcaccttttcactagaaactaccgatcctagtaagggtaacggatcggtgaccgctggccatgggaaacttccaccgccatcgggtcctgagcacgtcaccgttggctgggaggactcatcggcccggaggccatggaagtgtgaccggcccgggtgcgttaacaacgggtggatgcgagaagaacaccttaaacggcatgtatctacatcccatggcacgggcgaaacagtcgagtgcagattctgccataaacagtttcctgccgcccgcaaagacaacttacgcgcgcacatccaacgacacgcagtgagagacaaagggcctcatgctcgcgtgcagttttttgaagaagctgccatcgagtacgagcaggagatccaaccgcgctcaaaacgagcaaaacgaccggaaactaatgacaaatcaacgggacggagctagtgtccagtagatatagtccatcgccatactttatttcagattcaacagtcagtagagcaatgtcattccatctagctcgtccgatttagatgaacctagttatgattggtctggcgttgtacttgtgggcctttgtgattaggcagcatgcatgcaaaacaggatcgattaatcatgggccaactcctggttttggtatctcccaccttaagatcgggtggcccgaggatggac

SEQ ID NO: 6177 - DNA, 879 bp, Muscodor strobelii
  misc_feature: SGI cDNA ID NO. 561793
  misc_feature: Elevated expression when VOC is produced
  misc_feature: Encodes the peptide sequence at SEQ ID NO 6178
atgtctaccccaaaggttgcgattgtaactggaggggcttcaggcatcggcttcgaagtcgctaagaatctagcggagaatgactgggtggtgtatattctgtatcacaagtcgccatacaaggcagccgaggttctgaaaacggcacacttcaaacaagccgacgtggcgtcttgggaatctctctccgccgcattcgaagagatcttccgggagtcgggtcggcttgatttcgtcttcgccaatgccggcgtggtctccgaagtcgaattcttcaccgatatgactggcaagagcatcgcccctgtcggcacatggcctatcgatgtgaacctgaagggggctatcttcacctcccgtctagcttgccactacttcggccgtagcccgaaggaaggtcgaggggcaacactgctgatcaacgccagttcgaccgtcttttatgaatccgcccttgccccagtgtacggcgcctcgaaagccggcgtagtaagtttcatgcgatctatctccggaccgttgttcaagtatcatgggataagagttcacgccatttgccctggacccgtgtataccaccctggtgccaagcgaggtatgggctgcgttccctgtcgatgacttcattccggtaaaggatgttgtgacagtgatcaatcgcatgatggacgaaggaccgttcgtagattcgaacggcaagtgtgtcgttccagagtccaagtttgggctggcggttgaaataagcacgtccaatttctatataagggaagcacagcgattttccgatccggctgcacagtcgtcgaggcacattctagatgcgattgaacaggatgcagaggggtacggctggaacagttttggcacgaaccaagactag

SEQ ID NO: 6178 - protein, 292 aa, Muscodor strobelii
  misc_feature: SGI Peptide ID NO. 561793
  misc_feature (5)..(175): Pfam Id: PF00106 Pfam Desc: short chain dehydrogenase
  misc_feature (5)..(103): Pfam Id: PF00106 Pfam Desc: short chain dehydrogenase
  misc_feature (1)..(269): NCBI GI: 46119733 Blast Desc: FG04790.1 [Gibberella zeae PH-1]
  misc_feature (1)..(254): NCBI GI: 256727819 Blast Desc: NECHADRAFT_28041 [Nectria haematococca mpVI 77-13-4]
  misc_feature (5)..(267): NCBI GI: 189208562 Blast Desc: 15-hydroxyprostaglandin dehydrogenase [Pyrenophora tritici-repentis Pt-1C-BFP] gi|187976707|gb|EDU43333.1| 15-hydroxyprostaglandin dehydrogenase [Pyrenophora Pt-1C-BFP]
  misc_feature (5)..(280): NCBI GI: 261353883 Blast Desc: 3-beta-hydroxysteroid dehydrogenase [Verticillium albo-atrum VaMs.102]
  misc_feature (16)..(274): NCBI GI: 255931829 Blast Desc: Pc12g06280 [Penicillium chrysogenum Wisconsin 54-1255] gi|211582090|emb|CAP80255.1| Pc12g06280 [Penicillium chrysogenum Wisconsin 54-1255]
  misc_feature (5)..(262): NCBI GI: 255940818 Blast Desc: Pc16g08590 [Penicillium chrysogenum Wisconsin 54-1255] gi|211585801|emb|CAP93529.1| Pc16g08590 [Penicillium chrysogenum Wisconsin 54-1255]
  misc_feature (6)..(272): NCBI GI: 169785195 Blast Desc: [Aspergillus oryzae RIB40] gi|83775806|dbj|BAE65925.1| protein product [Aspergillus oryzae]
  misc_feature (6)..(272): NCBI GI: 238506169 Blast Desc: short-chain dehydrogenase, [Aspergillus flavus NRRL3357] gi|220688999|gb|EED45350.1| short-chain dehydrogenase, [Aspergillus flavus NRRL3357]
  misc_feature (6)..(272): NCBI GI: 145253973 Blast Desc: An18g00090 [Aspergillus niger] gi|134084057|emb|CAK43087.1| protein product [Aspergillus niger]
  misc_feature (5)..(262): NCBI GI: 169613482 Blast Desc: SNOG_09872 [Phaeosphaeria nodorum SN15] gi|160702734|gb|EAT83137.2| SNOG_09872 [Phaeosphaeria nodorum SN15]
  misc_feature (5)..(197): SWISSPROT Homolog: EC 1.1.1.141 15-hydroxyprostaglandin dehydrogenase (NAD(+))
  misc_feature: Useful for introducing or modulating the production of volatile compounds
MSTPKVAIVTGGASGIGFEVAKNLAENDWVVYILYHKSPYKAAEVLKTAHFKQADVASWESLSAAFEEIFRESGRLDFVFANAGVVSEVEFFTDMTGKSIAPVGTWPIDVNLKGAIFTSRLACHYFGRSPKEGRGATLLINASSTVFYESALAPVYGASKAGVVSFMRSISGPLFKYHGIRVHAICPGPVYTTLVPSEVWAAFPVDDFIPVKDVVTVINRMMDEGPFVDSNGKCVVPESKFGLAVEISTSNFYIREAQRFSDPAAQSSRHILDAIEQDAEGYGWNSFGTNQD

SEQ ID NO: 6179 - DNA, 1158 bp, Muscodor strobelii
  misc_feature: SGI EST ID NO. CUFF.15530.0
  misc_feature: Variant of the nucleotide sequence at SEQ ID NO 6177
cacctttgaccgttccgacgtagcttcatcaaatgatccagcatccattcttgcccttatttgagcgtcccttttctccacactgtatttcaacttcgctccgatagtcgcaagatgtctaccccaaaggttgcgattgtaactggaggggcttcaggcatcggcttcgaagtcgctaagaatctagcggagaatgactgggtggtgtatattctgtatcacaagtcgccatacaaggcagccgaggttctgaaaacggcacacttcaaacaagccgacgtggcgtcttgggaatctctctccgccgcattcgaagagatcttccgggagtcgggtcggcttgatttcgtcttcgccaatgccggcgtggtctccgaagtcgaattcttcaccgatatgactggcaagagcatcgcccctgtcggcacatggcctatcgatgtgaacctgaagggggctatcttcacctcccgtctagcttgccactacttcggccgtagcccgaaggaaggtcgaggggcaacactgctgatcaacgccagttcgaccgtcttttatgaatccgcccttgccccagtgtacggcgcctcgaaagccggcgtagtaagtttcatgcgatctatctccggaccgttgttcaagtatcatgggataagagttcacgccatttgccctggacccgtgtataccaccctggtgccaagcgaggtatgggctgcgttccctgtcgatgacttcattccggtaaaggatgttgtgacagtgatcaatcgcatgatggacgaaggaccgttcgtagattcgaacggcaagtgtgtcgttccagagtccaagtttgggctggcggttgaaataagcacgtccaatttctatataagggaagcacagcgattttccgatccggctgcacagtcgtcgaggcacattctagatgcgattgaacaggatgcagaggggtacggctggaacagttttggcacgaaccaagactagacatctatatggctcgtcggatctactctacgccatatgattaagctttgtgtttctttagcttcgtagagttgaggcatctcctatgtatctagtcattattccactcggctatcaatatagacactctctaccttctgagaattgaatgagagaatttcctag

SEQ ID NO: 6180 - DNA, 756 bp, Muscodor strobelii
  misc_feature: SGI cDNA ID NO. 561794
  misc_feature: Encodes the peptide sequence at SEQ ID NO 6181
atggtcgtgtggcgccaagcacccgagacgcctgctggcgctagccaattgacatttctcatctcccaccatgaccgccattcggatttcgcacggctcaagacgggtcagaaactcctgctagacggtccgtacggccaggatcttggtcttcggcattatgagacggtcatcatggccgctaaaggtatcggcatcgcaggcgttctcgcctctgctttggatctggtagaacgtcagcaacatgactcgatcatcaagaagcgcgctgcatcttggaactaccgaccgcccctcttccgagactcgacgaggaaggtcgccatcttctggagcctagagcacaactcccaagaggaatgggtagcttcggagctaaacgccctaaagaagttggacactaaaaacatctttttcgttgtgtggtgtatctacccgtcggtatgggacaagccgcctccgttcgcgacgtccaatctatggaagtgcttctatcctaagaacgggcctgtggaagactatcgttacctgaactcattgatagcgcaagatattgaggctccgggacgaagcatcgttgttgcatgcggcgacccccagtttacggccaccgtacgttacactgtattatcgcagactagagcggaccggcccgtggattttgcagagttggaatttcgacctcgcaagcatacgtatagcgtagcaaaaggggctcggaattctactggaggcgatgctactgggacggcatag

SEQ ID NO: 6181 - protein, 251 aa, Muscodor strobelii
  misc_feature: SGI Peptide ID NO. 561794
  misc_feature (54)..(210): Pfam Id: PF08030 Pfam Desc: Ferric reductase NAD binding domain
  misc_feature (14)..(147): NCBI GI: 156046160 Blast Desc: SS1G_09354 [Sclerotinia sclerotiorum 1980] gi|154693749|gb|EDN93487.1| SS1G_09354 [Sclerotinia sclerotiorum 1980]
  misc_feature (38)..(221): NCBI GI: 260942327 Blast Desc: CLUG_04344 [Clavispora lusitaniae ATCC 42720] gi|238850752|gb|EEQ40216.1| CLUG_04344 [Clavispora lusitaniae ATCC 42720]
  misc_feature (39)..(216): NCBI GI: 241949909 Blast Desc: ferric reductase transmembrane precursor, ; ferric reductase, [Candida dubliniensis CD36] gi|223641015|emb|CAX45383.1| ferric reductase transmembrane ;
  misc_feature (38)..(223): NCBI GI: 50308421 Blast Desc: protein product [Kluyveromyces lactis] gi|49643347|emb|CAG99299.1| KLLA0E05897p [Kluyveromyces lactis]
  misc_feature (6)..(86): NCBI GI: 50546533 Blast Desc: YALI0B10846p [Yarrowia lipolytica] gi|49646602|emb|CAG82982.1| YALI0B10846p [Yarrowia lipolytica]
  misc_feature (39)..(216): NCBI GI: 68484166 Blast Desc: likely ferric reductase [Candida albicans SC5314] gi|68484281|ref|XP_713917.1| likely ferric reductase [Candida albicans SC5314] gi|46435437|gb|EAK94818.1| likely ferric SC5314]
  misc_feature (39)..(216): NCBI GI: 238878496 Blast Desc: conserved [Candida albicans WO-1]
  misc_feature (23)..(129): NCBI GI: 169778919 Blast Desc: [Aspergillus oryzae RIB40] gi|83772663|dbj|BAE62791.1| protein product [Aspergillus oryzae]
  misc_feature (23)..(129): NCBI GI: 238499505 Blast Desc: metalloreductase, [Aspergillus flavus NRRL3357] gi|220692740|gb|EED49086.1| metalloreductase, [Aspergillus flavus NRRL3357]
  misc_feature (28)..(129): NCBI GI: 115386630 Blast Desc: [Aspergillus terreus NIH2624] gi|114190854|gb|EAU32554.1| [Aspergillus terreus NIH2624]
MVVWRQAPETPAGASQLTFLISHHDRHSDFARLKTGQKLLLDGPYGQDLGLRHYETVIMAAKGIGIAGVLASALDLVERQQHDSIIKKRAASWNYRPPLFRDSTRKVAIFWSLEHNSQEEWVASELNALKKLDTKNIFFVVWCIYPSVWDKPPPFATSNLWKCFYPKNGPVEDYRYLNSLIAQDIEAPGRSIVVACGDPQFTATVRYTVLSQTRADRPVDFAELEFRPRKHTYSVAKGARNSTGGDATGTA

SEQ ID NO: 6182 - DNA, 804 bp, Muscodor strobelii
  misc_feature: SGI EST ID NO. CUFF.15545.0
  misc_feature: Variant of the nucleotide sequence at SEQ ID NO 6180
cgctacttcagtcggatcgtgttcccaagatttgcgtcctgatagctggttctctatggggtctcacgaccttgttccgaattttgaaaacctccttatacctgcctggggccgtggtggagtcctgtcagctgtctggagaggcgacgctggtccgtctcagcagcaaacgccctataaacacctactcgggcagttatttctatgtatccccgctgaggtactcgttacgaagtggcataaggaacagtctaccgctcatggtcgtgtggcgccaagcacccgagacgcctgctggcgctagccaattgacatttctcatctcccaccatgaccgccattcggatttcgcacggctcaagacgggtcagaaactcctgctagacggtccgtacggccaggatcttggtcttcggcattatgagacggtcatcatggccgctaaaggtatcggcatcgcaggcgttctcgcctctgctttggatctggtagaacgtcagcaacatgactcgatcatcaagaagcgcgctgcatcttggaactaccgaccgcccctcttccgagactcgacgaggaaggtcgccatcttctggagcctagagcacaactcccaagaggaatgggtagcttcggagctaaacgccctaaagaagttggacactaaaaacatctttttcgttgtgtggtgtatctacccgtcggtatgggacaagccgcctccgttcgcgacgtccaatctatggaagtgcttctatcctaagaacgggcctgtggaagactatcgttacctgaactcattgatag

SEQ ID NO: 6183 - DNA, 1356 bp, Muscodor strobelii
  misc_feature: SGI cDNA ID NO. 561795
  misc_feature: Encodes the peptide sequence at SEQ ID NO 6184
atgtccggaaagactaagaagaaagcccaatccaagcaaaaagatgaacaaagacgcattcgagatttgttgcgctttgcgaattctagtgccagttgggcaaaatccatcactgatgaatggaagctggccctaaaccagctcgccgatactaaaactttccccccaactgtcgaggaagaatctgacgagtttccgtttgaatggatcgagacggaaaaaaagttcaatagtgcattcaaaaaattcaaaaaatatgcacttgatcaaggtatcaccgaagatgaaaatgatcccccacaaccaccacaagatcccccacaaccaccacaggatcccccacagccgccacaagatcccccacaaccaccacatatctctagacctaccgcggagacagacacatcaattgaaccgccgtacccacatctcaagcgaaccgtgggagataaactatcgtcgccttcgtgggcaggcatacttaacgagtgcatttatcgggattgtgatgaaatcgacctgaagtttcgtcttgagtattactgcaaacatgagtacgaagacgccattcctaggagcgtcttggcttttgcacgcgactggctatcccaatgcccagacatattggacacattggagggccttttgagcaacgacgatgatttgaagaaagcctacgatgcatatcgtgcagcacatccccgaccagcgccacgtcaaaggtctcctggcagtacgggtcgcgggggcacgatctccaggacgagggagcaaagtgtctttagtcagaacatcgaggaggacattgaaaagaccggggttaggaatgacaaagagacattcccgggctggaacctgattacattaagttacgaccctgataaggacacaccacggaaagatcgcgagcccatcaagggcataatttgcatggtcatcaagcattggctagtcgttgctctccccgggctgggagaagatcctgacaagaaaagatatattttagtcccacgctcaagctatccagagtcctctacaagattcagatccacttcagagggcaagaagagaacacttgagagctcaaacaaaagcagtctagaatcgcgcaagcgaggtgacgttaccgttatgttttatgcgagtgccgtgcaaagtgctgagcaagcagactttgggcactggccgaacacgtatgcagtgggctacatgacggaagatgccgatgatgagattcgggagacttatgcctggtctcggtctgttttcatcgcccaatttaagaaaagagtagttgaagctgaaatccgagagcagcgacaagacagcgggcaatctgaaatcgagagcggataa

SEQ ID NO: 6184 - protein, 451 aa, Muscodor strobelii
  misc_feature: SGI Peptide ID NO. 561795
MSGKTKKKAQSKQKDEQRRIRDLLRFANSSASWAKSITDEWKLALNQLADTKTFPPTVEEESDEFPFEWIETEKKFNSAFKKFKKYALDQGITEDENDPPQPPQDPPQPPQDPPQPPQDPPQPPHISRPTAETDTSIEPPYPHLKRTVGDKLSSPSWAGILNECIYRDCDEIDLKFRLEYYCKHEYEDAIPRSVLAFARDWLSQCPDILDTLEGLLSNDDDLKKAYDAYRAAHPRPAPRQRSPGSTGRGGTISRTREQSVFSQNIEEDIEKTGVRNDKETFPGWNLITLSYDPDKDTPRKDREPIKGIICMVIKHWLVVALPGLGEDPDKKRYILVPRSSYPESSTRFRSTSEGKKRTLESSNKSSLESRKRGDVTVMFYASAVQSAEQADFGHWPNTYAVGYMTEDADDEIRETYAWSRSVFIAQFKKRVVEAEIREQRQDSGQSEIESG

SEQ ID NO: 6185 - DNA, 2691 bp, Muscodor strobelii
  misc_feature: SGI cDNA ID NO. 561796
  misc_feature: Encodes the peptide sequence at SEQ ID NO 6186
atggcggatcgaaatcttgttggaatcatcaaggtcccgctgtgtgcatttacgcacaggccgggagtaggcagagaagagtctccggccattgtgaaaaatttaacaaatgtctttcgtaaaactcgctgccagcctggtctttgggagaaccatgtcaaaggccgcatagatagccaaaccctacggggcatcctagctacgctccagatcaccgaggagcagctgcattctaccgtatatcaacgtgattatccgtcgattaacttagagaggaaaattgtctgcttcgatggaaggcacaggctggctgcagcaaagaaggtctttggaaaaaaggtctggtggccagtgcaactttattccgcgcctctaggcccattctctttccaccagaccacctactccgacggggaggtatatcgccgcatgaggctctgtcagctcgcgaatgaagatctacagagccgcgagtggacgacgcagttgtcctcgagcaagccggctatactgaatcttctgctcaagaataccccaattgtcgaggcattagataaactgcttccttttccgggggtatggaacgggctgaggattggcaatctgcacaagtacctcgctctccattttgacgagcagatcctgtgctatctccaccgcatgcatgcaatctggtcggtgataggggagggtattaaccccgaggccatcgacatcatctcggtgcgctacctacaagcccgtgtaccgtccgtcgcgccggaccgggacttcatcgagcgcatattcgatcgcaatcttgtcttcgggcttgtcactgacccggaggagcggagccggcttctccggcaagttctatctgtgagcaatatgatacttagtattgacacgttcgatcgctccatgaagtatttctcattaggagcgaagattttgaggcgagaactattagatgtcgaagaggatgccgattctcaggcgacatttctccagagactcgagtgggcgagtccaccggcgccaaccgtcgaggtggccgaggcggtcttccagccatcggcggccatgacccaacatgttgctcttaaagtcctcttcttggccgctctgaggcatttcgcctacctgtgccacgaagcaccactccaggatgttaaaggtgagggcatcacggctggccctagcgatctccatgcgtctcatgtgcgcgctagagccaaggagctcggattcaggtcgaagaagatcgaccagataacctgcaaatcagcacagctgcctcctcttgtcgtagatcccgtgatgtcgcggcgacgggctgtgccgtggagatgcggcaagccattcgtcagcacgttcttcgaactgcgcccggtcgcattccttcccacgctggatgcgatcggcccgcaaggcggcgcaacggctcctttcatgttgaaacagttcatggacgcgtttttcggcgcatccgactgcagtttggatatggcaggtccagtagatgagtcgattgcgtcatcgcatagtcttcccgcgactctggctcacccgtcctctagcgccacgagcggagaaagcatggacgtcgactcgggccagagagtgccagacgataatgggagggctcagcaatggtgttgggatacaaatgtgagcgttagaaacaagggccgggcggatgacgacggagtagtggtagagcgccacactcctcgcctctcactaaatttctcgggacagtccgacactgaagtgtttgaccggccagccgagcgatcgccagtcctcgtcccgctggaacgaacgagcgggggtgccgtcacgaacgagagtcggccggaccggacggtagatgagagcttcagtcctgaagtagcgtcaccggtgtgggggttttccgactttacaggggcaatcgacaccaacgtcctcagggctactgcgcgtcccaacagaagagccaagaaccgcgtaaggaagacacctccagagaagaaggtatatgccaagctcctaaagagatcggtccacgagcgaaccattacgactgggaagtatggcaagatggcgcgtccgatctttcccttccagccacgaacgaagcctgcaccatccatgccgagccaaccacctttgacgctgtcagaagacggggctccccgtgcgcgtaaattgaagaggagacgaacaaatactgacggcgaggactctaggattaacatacgacaggtatccacctcgaaacggtcaaagagggctagactgcagggcccgcccgctaaggacgccagaaggaccgcatcgcagagcacggaagattataaggtagccataagggaaaatgccgacgcacgcatggccaaaaagatcagattgggacctcgaccgggcagcagcgagactgcgacgattagatctagcagcggacgtaattctacatcgcgagaaccggagccccaggacgaaaccaaccccgctggagcgcctactacccaggacggttctcattctcgaccacttgacggggtagatgaggccctggagcgtgcaatcagcagcgagagaaacaggtctccttcgttgcggcaaagctggacttttcctacgaaggaggattggccaagtgacacagaaataccaaacacggacagggagaggtctgctccagcatcacctgaggaactttaa

SEQ ID NO: 6186 - protein, 896 aa, Muscodor strobelii
  misc_feature: SGI Peptide ID NO. 561796
  misc_feature (3)..(500): NCBI GI: 261360441 Blast Desc: conserved [Verticillium albo-atrum VaMs.102]
  misc_feature (4)..(423): NCBI GI: 242797847 Blast Desc: conserved [Talaromyces stipitatus ATCC 10500] gi|218716391|gb|EED15812.1| conserved [Talaromyces stipitatus ATCC 10500]
  misc_feature (4)..(423): NCBI GI: 242763416 Blast Desc: conserved [Talaromyces stipitatus ATCC 10500] gi|218723766|gb|EED23183.1| conserved [Talaromyces stipitatus ATCC 10500]
  misc_feature (4)..(423): NCBI GI: 242761098 Blast Desc: conserved [Talaromyces stipitatus ATCC 10500] gi|218723310|gb|EED22727.1| conserved [Talaromyces stipitatus ATCC 10500]
  misc_feature (8)..(423): NCBI GI: 70986586 Blast Desc: conserved [Aspergillus fumigatus Af293] gi|66846414|gb|EAL86746.1| conserved [Aspergillus fumigatus Af293]
  misc_feature (32)..(275): NCBI GI: 242771717 Blast Desc: conserved [Talaromyces stipitatus ATCC 10500] gi|218721518|gb|EED20936.1| conserved [Talaromyces stipitatus ATCC 10500]
  misc_feature (7)..(500): NCBI GI: 145246990 Blast Desc: An12g06880 [Aspergillus niger] gi|134080470|emb|CAK41217.1| [Aspergillus niger]
  misc_feature (4)..(423): NCBI GI: 242760187 Blast Desc: conserved [Talaromyces stipitatus ATCC 10500] gi|218723134|gb|EED22551.1| conserved [Talaromyces stipitatus ATCC 10500]
  misc_feature (4)..(419): NCBI GI: 242773101 Blast Desc: conserved [Talaromyces stipitatus ATCC 10500] gi|218721790|gb|EED21208.1| conserved [Talaromyces stipitatus ATCC 10500]
  misc_feature (93)..(537): NCBI GI: 156050907 Blast Desc: SS1G_08041 [Sclerotinia sclerotiorum 1980] gi|154692441|gb|EDN92179.1| SS1G_08041 [Sclerotinia sclerotiorum 1980]
MADRNLVGIIKVPLCAFTHRPGVGREESPAIVKNLTNVFRKTRCQPGLWENHVKGRIDSQTLRGILATLQITEEQLHSTVYQRDYPSINLERKIVCFDGRHRLAAAKKVFGKKVWWPVQLYSAPLGPFSFHQTTYSDGEVYRRMRLCQLANEDLQSREWTTQLSSSKPAILNLLLKNTPIVEALDKLLPFPGVWNGLRIGNLHKYLALHFDEQILCYLHRMHAIWSVIGEGINPEAIDIISVRYLQARVPSVAPDRDFIERIFDRNLVFGLVTDPEERSRLLRQVLSVSNMILSIDTFDRSMKYFSLGAKILRRELLDVEEDADSQATFLQRLEWASPPAPTVEVAEAVFQPSAAMTQHVALKVLFLAALRHFAYLCHEAPLQDVKGEGITAGPSDLHASHVRARAKELGFRSKKIDQITCKSAQLPPLVVDPVMSRRRAVPWRCGKPFVSTFFELRPVAFLPTLDAIGPQGGATAPFMLKQFMDAFFGASDCSLDMAGPVDESIASSHSLPATLAHPSSSATSGESMDVDSGQRVPDDNGRAQQWCWDTNVSVRNKGRADDDGVVVERHTPRLSLNFSGQSDTEVFDRPAERSPVLVPLERTSGGAVTNESRPDRTVDESFSPEVASPVWGFSDFTGAIDTNVLRATARPNRRAKNRVRKTPPEKKVYAKLLKRSVHERTITTGKYGKMARPIFPFQPRTKPAPSMPSQPPLTLSEDGAPRARKLKRRRTNTDGEDSRINIRQVSTSKRSKRARLQGPPAKDARRTASQSTEDYKVAIRENADARMAKKIRLGPRPGSSETATIRSSSGRNSTSREPEPQDETNPAGAPTTQDGSHSRPLDGVDEALERAISSERNRSPSLRQSWTFPTKEDWPSDTEIPNTDRERSAPASPEEL

SEQ ID NO: 6187 - DNA, 3277 bp, Muscodor strobelii
  misc_feature: SGI EST ID NO. CUFF.15561.0
  misc_feature: Variant of the nucleotide sequence at SEQ ID NO 6185
ttcggtgataccttgatcaagtgcatattttttgaattttttgaatgcactattgaactttttttccgtctcgatccattcaaacggaaactcgtcagattcttcctcgacagttggggggaaagttttagtatcggcgagctggtttagggccagcttccattcatcagtgatggattttgcccaactggcactagaattcgcaaagcgcaacaaatctcgaatgcgtctttgttcatctttttgcttggattgggctttcttcttagtctttccggacattttcgtgcaagacgggctatcctgacaagtatgtctttggtcgggagtgttattaacgaagaaacaaaacgactgcgtcgaaacggatttttatactcgtccaattcaaagtggccctaaacctggaacgttgtggttgtgatgcaacaaacatctgcacggaccccagacaccaggtgtcggtttcgtttgtgacccgggaatctggttctaggcattctaggtagccgtcatccattatcagggtattacgcattcgcgaaatagtaagccgtattcatatcgagtagagcgagagtctggtttcaaaagcgcgctgaatactttgttatcctccgtcgatgtctatttctcccttctccatctactcccgggtagccccgaccacctattgtacaccatggcggatcgaaatcttgttggaatcatcaaggtcccgctgtgtgcatttacgcacaggccgggagtaggcagagaagagtctccggccattgtgaaaaatttaacaaatgtctttcgtaaaactcgctgccagcctggtctttgggagaaccatgtcaaaggccgcatagatagccaaaccctacggggcatcctagctacgctccagatcaccgaggagcagctgcattctaccgtatatcaacgtgattatccgtcgattaacttagagaggaaaattgtctgcttcgatggaaggcacaggctggctgcagcaaagaaggtctttggaaaaaaggtctggtggccagtgcaactttattccgcgcctctaggtatggcctacggatcctagcggtggagacgtatagaatgctaatagacacaacaggcccattctctttccaccagaccacctactccgacggggaggtatatcgccgcatgaggctctgtcagctcgcgaatgaagatctacagagccgcgagtggacgacgcagttgtcctcgagcaagccggctatactgaatcttctgctcaagaataccccaattgtcgaggcattagataaactgcttccttttccgggggtatggaacgggctgaggattggcaatctgcacaagtacctcgctctccattttgacgagcagatcctgtgctatctccaccgcatgcatgcaatctggtcggtgataggggagggtattaaccccgaggccatcgacatcatctcggtgcgctacctacaagcccgtgtaccgtccgtcgcgccggaccgggacttcatcgagcgcatattcgatcgcaatcttgtcttcgggcttgtcactgacccggaggagcggagccggcttctccggcaagttctatctgtgagcaatatgatacttagtattgacacgttcgatcgctccatgaagtatttctcattaggagcgaagattttgaggcgagaactattagatgtcgaagaggatgccgattctcaggcgacatttctccagagactcgagtgggcgagtccaccggcgccaaccgtcgaggtggccgaggcggtcttccagccatcggcggccatgacccaacatgttgctcttaaagtcctcttcttggccgctctgaggcatttcgcctacctgtgccacgaagcaccactccaggatgttaaaggtgagggcatcacggctggccctagcgatctccatgcgtctcatgtgcgcgctagagccaaggagctcggattcaggtcgaagaagatcgaccagataacctgcaaatcagcacagctgcctcctcttgtcgtagatcccgtgatgtcgcggcgacgggctgtgccgtggagatgcggcaagccattcgtcagcacgttcttcgaactgcgcccggtcgcattccttcccacgctggatgcgatcggcccgcaaggcggcgcaacggctcctttcatgttgaaacagttcatggacgcgtttttcggcgcatccgactgcagtttggatatggcaggtccagtagatgagtcgattgcgtcatcgcatagtcttcccgcgactctggctcacccgtcctctagcgccacgagcggagaaagcatggacgtcgactcgggccagagagtgccagacgataatgggagggctcagcaatggtgttgggatacaaatgtgagcgttagaaacaagggccgggcggatgacgacggagtagtggtagagcgccacactcctcgcctctcactaaatttctcgggacagtccgacactgaagtgtttgaccggccagccgagcgatcgccagtcctcgtcccgctggaacgaacgagcgggggtgccgtcacgaacgagagtcggccggaccggacggtagatgagagcttcagtcctgaagtagcgtcaccggtgtgggggttttccgactttacaggggcaatcgacaccaacgtcctcagggctactgcgcgtcccaacagaagagccaagaaccgcgtaaggaagacacctccagagaagaaggattaacatacgacaggtatccacctcgaaacggtcaaagagggctagactgcagggcccgcccgctaaggacgccagaaggaccgcatcgcagagcacggaagattataaggtagccataagggaaaatgccgacgcacgcatggccaaaaagatcagattgggacctcgaccgggcagcagcgagactgcgacgattagatctagcagcggacgtaattctacatcgcgagaaccggagccccaggacgaaaccaaccccgctggagcgcctactacccaggacggttctcattctcgaccacttgacggggtagatgaggccctggagcgtgcaatcagcagcgagagaaacaggtctccttcgttgcggcaaagctggacttttcctacgaaggaggattggccaagtgacacagaaataccaaacacggacagggagaggtctgctccagcatcacctgaggaactttaacaaagagtacttacgaacaatgagacgcccatataatgtgaattttgtataaaattgttattg

SEQ ID NO: 6188 - DNA, 363 bp, Muscodor strobelii
  misc_feature: SGI cDNA ID NO. 561797
  misc_feature: Encodes the peptide sequence at SEQ ID NO 6189
atgcgacaaacccctaccgcccttgccgatgatattagaatgaggacaccggaaaggatggacagcgggccgccataccaattccaccagctccaggaggaaaacaatagattaagacagcaagtccgtgaaaagagagagaaggaagagagagacctgcagaccattgcccgcctcacccagcagaacttctactacctgcgggaaatccagcgacaggatgacgaggtggcgcgaatagagaaattcctcgttactgctttcgaagcacttaaaaacagtagatggagcgtttcgggcgagccttgcatcggggcgccatcggctatcgacgaagtcattgacatgtactatcagccttga

SEQ ID NO: 6189 - protein, 120 aa, Muscodor strobelii
  misc_feature: SGI Peptide ID NO. 561797
MRQTPTALADDIRMRTPERMDSGPPYQFHQLQEENNRLRQQVREKREKEERDLQTIARLTQQNFYYLREIQRQDDEVARIEKFLVTAFEALKNSRWSVSGEPCIGAPSAIDEVIDMYYQP

SEQ ID NO: 6190 - DNA, 420 bp, Muscodor strobelii
  misc_feature: SGI cDNA ID NO. 561798
  misc_feature: Elevated expression when VOC is produced
  misc_feature: Encodes the peptide sequence at SEQ ID NO 6191
atggacacccaacctaacgacttctttctggatcccggaacatggccggacgcccaagagttttcaaccgaacagaacgggtctctcggataccctcccgccacggcggcatccacaagctgccgagtagaagcccgaagcgtcgaccagatcgccgccgacgagaatttgaggaatctcttaatcatgatcttagctcgcatcgatgagatcagatcggctgtagccaagacggaagcaagcgcgaaggagatgagaaaaacaactagtaaagcgtgtgatgtcgtagaacaggtcttgccgatactcaaccagatcaaagactcgattgacaagctaagagagggcatgggggggttctcccgcactgtgatcaagtacctaaaacttatgcttgggcatattgaagatgaagagtga

SEQ ID NO: 6191 - protein, 139 aa, Muscodor strobelii
  misc_feature: SGI Peptide ID NO. 561798
  misc_feature: Useful for introducing or modulating the production of volatile compounds
MDTQPNDFFLDPGTWPDAQEFSTEQNGSLGYPPATAASTSCRVEARSVDQIAADENLRNLLIMILARIDEIRSAVAKTEASAKEMRKTTSKACDVVEQVLPILNQIKDSIDKLREGMGGFSRTVIKYLKLMLGHIEDEE

SEQ ID NO: 6192 - DNA, 2614 bp, Muscodor strobelii
  misc_feature: SGI EST ID NO. CUFF.15583.0
  misc_feature: Variant of the nucleotide sequence at SEQ ID NO 6190
cgaaaacgaacgacactttaaacgtagacgcgccttcgcatctttaaccccgttgggttttaccatggttctctgttcccattgtttactactatcgctagtttgatttactatggacacctatgcggtcgatccaatcatcgcccttgcgcctgattcccccgggccctcttccccacggtcacggctcatagagaccaggaaggccaagaaacgacaaagcgcgaagcgatgtaaaaggcgagcgaccctgttcaaaaaaatctacgagtttcacagggattgcggatgtcaagcatacttgctgttgtgggacgacgttgggcgctcatggatctacaactctcgacaaaccgccccgccaggttactcgcaaatgatggagaactatcccttgccaatcatatatgacccggaaggtcgtgggaacggcggcctccaaacccgcagcgggaatgctgggggcgggcatggtgtcgaattatagtgcattgcgaacgcgtggggcaggatcaaatgaaatcccctagtgcaagaaataagaattcgtagaatgtttagcgttaattgagtatttgtggatatgctttcgttggtcgcatatgtgaactatggccaaagaaaattttcattatgatccgggctaacatgcaataacaacaacacccttattgagcatacatgatatgtctcatcgcctgtccggtaataacgtccatctctcgagatccagctcgcctgtcgacccttccctaggaaacctttgaaaaaaaaaaacccttacacgatcaacaacgaagatgtaaaataggccttcaccttttaaacccgtcacttaaaatagaatggcatgtagcggatggtataggcggttggcaggactcacttgagtcgaggcgaagggatagttagcgctggactgatgggttgcggggatcctagtcgagatcggggttggtattggagcgtaattgctgctaggtggctgagtagtatgtcgactgctgccagccagcgatgcaggtgcaggacgtgaatagttcttcgacgcccaaggaaatgaatggcatgtgcgaagacttctcgtagatgtgggtagtgtgctcgcatccctcatgtcagccaataaggagccggtcgcggtaggcagcatttccagccccaaggtgcttggggatgtcgagcgggtggtcaagggagagtgggcgtcttctgtcgtcggacatggctggcattttacagcgcccgccagctcagtcgcctgacgttggtctccggtgccgttcgagatctcagcatggaggcctacggactggcgcatgcagttcctgtctggcgttagaaatggtgggtcattgaggtggggtttcgtggtggccgaccaaacgatttctgcccctccactgggtgaacctgcaggcaccagaaaactagcgaccaccccgcctggacagtgctgcaccgggaaggaatacgtgatcggcgggtacgctcgatctgcgaactgcagcagcgcgcggcagtcacccaggggcttgtcatacctactcgcccgtgtcaattgcaatggtcaagagccgtggtgcatcaatagttgcgcctacgctgctgagacgtgggagactccggccaccaatcggaccgcggggccggatacgtcgatggacatcccgtggctgatgcccaagatcattgccaaaaggcacagtttcagcatgtcgaagtatggaggacctcccttgctggactgacaggctagcagagcgttgcagtctcgtgcgtcagctggctcgctcagaggggcctttaatagcaacactgtactagtagattggaaatacatcctgggttttggttagcattgtcccatcccagggagctggagctctgcccccctagacaggcaccaagttcgccccggctgataagtataaagacgggcttttgtgaaaagcccagagaaaggtctgaccagctgcgctaactgtacgagcagcgtcgcgaccaggatggacacccaacctaacgacttctttctggatcccggaacatggccggacgcccaagagttttcaaccgaacagaacgggtctctcggataccctcccgccacggcggcatccacaagctgccgagtagaagcccgaagcgtcgaccagatcgccgccgacgagaatttgaggaatctcttaatcatgatcttagctcgcatcgatgagatcagatcggctgtagccaagacggaagcaagcgcgaaggagatgagaaaaacaactagtaaagcgtgtgatgtcgtagaacaggtcttgccgatactcaaccagatcaaagactcgattgacaagctaagagagggcatgggggggttctcccgcactgtgatcaagtacctaaaacttatgcttgggcatattgaagatgaagagtgatcctgtggaagggccaagtttccggtaggcatttcaacctcaacggtttccagaaacctggtggcagtatcaagaagtcctagtccgtcagatactaggaatatcaaaaagggcagcattcttttgccttgtctgaatataaatctagataatcgttcgtaatgatgacaagtcttgatcccagc

SEQ ID NO: 6193 - DNA, 1107 bp, Muscodor strobelii
  misc_feature: SGI cDNA ID NO. 561799
  misc_feature: Encodes the peptide sequence at SEQ ID NO 6194
atggccacattctctccgagcaatgcgcaaaaaactattatcgagttcggcgagtattgccgaggaatgcacgcactagaattagatccgcaacagtctgcgagcagcacgcttagccagaaggatacttcgtactataaccaggttgttcacgttcgcaacctgacaaaacccctcgaagataaactaaatctcgagctgagcttttatcatgatgtgaaagataagattctgtcaatcgcggcagtatgggacgctgtcctcgaggagaagatccactacgatgccaaaggatggcagtttccggacaggcagtttatggagtctttcctcctatgtctacacacgatcactggacacatggatataggctatctcgggccttcgagagtacgatacacagcaaacgaaccgcacggtctacgggggctgccttgcgcccttggcctagaagaggaatactatgaccgccatccaccggccgagcccgagggcacagcgcctctgccttccctctgtggcatcgaccaggtacagggaggatctggcaacgtgataacggcatccgggagccaacaaacctcaaacgtcaatgtccccactgacgcaaacgatcttgaatatgcgttgtcttgtggcagcaacagtcacagtgtcgacggcgtatttgaccataacatccagttcacgtcactggacagtccccggttagacggcaacttctggagctcaggcgccaccacattggatcccaacgagttgctgtttggtaatacggcctgtcctgttcgcgagctgggcgatgagggcctttttaatctggaagtgccctctgagaacgcattggattccagcgaagcggatgatgctagcttggcaaactcaaagagcaagcagcaagacgctcaagtttcaccgaccggcacatggaaggctggtgccactcacaggtcacctcctcgatacaaagtcttgaaatcaaaccttatcatccccaaaaaacgaaaggttaatgagatcgaagacggcattatcataccatttgcgaagcgtcggcagtataacaccagggcgaggactcgtctctcgccaggtttggactcttag

SEQ ID NO: 6194 - protein, 368 aa, Muscodor strobelii
  misc_feature: SGI Peptide ID NO. 561799
MATFSPSNAQKTIIEFGEYCRGMHALELDPQQSASSTLSQKDTSYYNQVVHVRNLTKPLEDKLNLELSFYHDVKDKILSIAAVWDAVLEEKIHYDAKGWQFPDRQFMESFLLCLHTITGHMDIGYLGPSRVRYTANEPHGLRGLPCALGLEEEYYDRHPPAEPEGTAPLPSLCGIDQVQGGSGNVITASGSQQTSNVNVPTDANDLEYALSCGSNSHSVDGVFDHNIQFTSLDSPRLDGNFWSSGATTLDPNELLFGNTACPVRELGDEGLFNLEVPSENALDSSEADDASLANSKSKQQDAQVSPTGTWKAGATHRSPPRYKVLKSNLIIPKKRKVNEIEDGIIIPFAKRRQYNTRARTRLSPGLDS

SEQ ID NO: 6195 - DNA, 844 bp, Muscodor strobelii
  misc_feature: SGI EST ID NO. CUFF.15567.0
  misc_feature: Variant of the nucleotide sequence at SEQ ID NO 6193
cgagcccgagggcacagcgcctctgccttccctctgtggcatcgaccaggtacagggaggatctggcaacgtgataacggcatccgggagccaacaaacctcaaacgtcaatgtccccactgacgcaaacgatcttgaatatgcgttgtcttgtggcagcaacagtcacagtgtcgacggcgtatttgaccataacatccagttcacgtcactggacagtccccggttagacggcaacttctggagctcaggcgccaccacattggatcccaacgagttgctgtttggtaatacggcctgtcctgttcgcgagctgggcgatgagggcctttttaatctggaagtgccctctgagaacgcattggattccagcgaagcggatgatgctagcttggcaaactcaaagagcaagcagcaagacgctcaagtttcaccgaccggcacatggaaggctggtgccactcacaggtcacctcctcgatacaaagtcttgaaatcaaaccttatcatccccaaaaaacgaaaggttaatgagatcgaagacggcattatcataccatttgcgaagcgtcggcagtataacaccagggcgaggactcgtctctcgccaggtttggactcttagatggatgagatctgactaggagttggcagagtagaccttagcaggctggggatctacgtgccgcaccagttttcgtacaacatcatgtagcttgcgtccttttatatgttagatgacttgtttttcttttttaaacatttgcagacatgtggtttgcgacgacgacttttgttagtattttttaggttctagtatcaatttatttggctatgactccga

SEQ ID NO: 6196 - DNA, 540 bp, Muscodor strobelii
  misc_feature: SGI cDNA ID NO. 561800
  misc_feature: Encodes the peptide sequence at SEQ ID NO 6197
atgactcgcctagatcccaagggtgcattcgttgtgatagatgccctgaaattgtacctcgatacctacgatagacgtaacgcctttcccgaaagcttgcaagaatatatagaattcaggattgttagcgccaactttgggctcatggagaccttcatgcaatggaccttgggaatccgtctcgacgaatcagaaaagacagtttctcagatcttctacctgtcggccggccgtgtcatggccatggcaaatgatctgtactcatgggttgttgaaaaagacacgcagttagatggaatatgtaacgctgttcctatcatcatgaagcagcatactatgaaggaagaagatgctatcatatttttgaagagccttgttatgtatcatgaagaagagactcgccgactgggcgtggaagtccgaaagcattgtggccagtcccagaagatcagcaagtacgttgaggcgatggagctcatgttaggtggcagctcattctggagctcgacctatcctcaatatagtcctacggccagctga

SEQ ID NO: 6197 - protein, 179 aa, Muscodor strobelii
  misc_feature: SGI Peptide ID NO. 561800
  misc_feature (1)..(175): NCBI GI: 238583987 Blast Desc: MPER_10303 [Moniliophthora perniciosa FA553] gi|215453803|gb|EEB91347.1| MPER_10303 [Moniliophthora perniciosa FA553]
  misc_feature (3)..(174): NCBI GI: 154301129 Blast Desc: [Botryotinia fuckeliana B05.10] gi|150856285|gb|EDN31477.1| [Botryotinia fuckeliana B05.10]
  misc_feature (4)..(163): NCBI GI: 145243160 Blast Desc: An11g01140 [Aspergillus niger] gi|134078792|emb|CAK45851.1| protein product [Aspergillus niger]
  misc_feature (32)..(175): NCBI GI: 238494380 Blast Desc: geranylgeranyl pyrophosphate synthase, [Aspergillus flavus NRRL3357] gi|220695076|gb|EED51419.1| geranylgeranyl pyrophosphate synthase, [Aspergillus flavus NRRL3357]
  misc_feature (32)..(175): NCBI GI: 145241081 Blast Desc: An08g10830 [Aspergillus niger] gi|134077716|emb|CAK45756.1| protein product [Aspergillus niger]
  misc_feature (26)..(176): NCBI GI: 46109802 Blast Desc: FG01783.1 [Gibberella zeae PH-1]
  misc_feature (4)..(176): NCBI GI: 238498724 Blast Desc: conserved [Aspergillus flavus NRRL3357] gi|220693871|gb|EED50216.1| conserved [Aspergillus flavus NRRL3357]
  misc_feature (1)..(177): NCBI GI: 240106734 Blast Desc: polyprenyl synthetase, [Coccidioides posadasii C735 delta SOWgp]
  misc_feature (4)..(176): NCBI GI: 145251654 Blast Desc: An16g00260 [Aspergillus niger] gi|134082876|emb|CAK42706.1| protein product [Aspergillus niger]
  misc_feature (24)..(175): NCBI GI: 169603596 Blast Desc: SNOG_04807 [Phaeosphaeria nodorum SN15] gi|111066078|gb|EAT87198.1| SNOG_04807 [Phaeosphaeria nodorum SN15]
MTRLDPKGAFVVIDALKLYLDTYDRRNAFPESLQEYIEFRIVSANFGLMETFMQWTLGIRLDESEKTVSQIFYLSAGRVMAMANDLYSWVVEKDTQLDGICNAVPIIMKQHTMKEEDAIIFLKSLVMYHEEETRRLGVEVRKHCGQSQKISKYVEAMELMLGGSSFWSSTYPQYSPTAS

SEQ ID NO: 6198 - DNA, 1125 bp, Muscodor strobelii
  misc_feature: SGI cDNA ID NO. 561801
  misc_feature: Encodes the peptide sequence at SEQ ID NO 6199
atgtggtgggtcacacagcagccctgggctgtgagggctccgtcggtgcttgccacctgtaatcccgcagctcgcacagggctcttcttcatggacaatctaaagctgagccatgaagactacaagacacctttctcattctccccttatgattcacaggtcgcttttcggtgggatggacatatcttcttgttcgagcgccatgggcggccaaaaaacaccgacgacccaacttctcttatcattcggtgcctcggctcgactaggaatatttgtaaccttctcgaggaatgtcgtcgccagtatgaggcctcacatgacaaatgctccatctttcaccacagcagaggcgaatggcaaagaacccctaatgtgaaactccgacccttatccaccgttatacttcccaagggcgagcgaaatcgattcgtccaagagatggatccattcttttccccaaatcatcgcgagtggcttcgagaacggggcctgccagtacgaaaagggtacctcctctatggaccgccgggcacagggaagaccagtttggctcaagggctggcgaatgatcagaagcttgacctttatgtcatcgacctactgagcctcaataacgaacagctttttgctctattccagagcctgcctaagaaatgcgccgtcttgcttgaagatattgacgactggcaaacaaaagccctgtctgaggttgaggctccgggactggtctttgtatctatgagcgccctcctgaacgccatagacggagcgtcagctagagaagatcgcgtgctgttcatgacaacaaaccggagagccatactctccgacgcccttatccgaaaagggcggattgatcgggaagtgcggctcgcagaagtcgacaaggacatggcgcgagacctattccttctgatattcggttctgaacagcagtctagcaaggaagtagaccagcagcagttggcggcccgggcagtccagttcggggagcaggtgcctcctgacacctactctcctgcccagatcatcggcttcttgacggaggctaaggattcggcggatatggcaccagaaatgttcgaagcgtggaaagagtctcagaaggcgctccaatcatcatga

SEQ ID NO: 6199 - protein, 374 aa, Muscodor strobelii
  misc_feature: SGI Peptide ID NO. 561801
  misc_feature (169)..(356): Pfam Id: PF00004 Pfam Desc: ATPase family associated with various cellular activities (AAA)
  misc_feature (169)..(189): Pfam Id: PF00004 Pfam Desc: ATPase family associated with various cellular activities (AAA)
  misc_feature (248)..(329): Pfam Id: PF00004 Pfam Desc: ATPase family associated with various cellular activities (AAA)
  misc_feature (3)..(364): NCBI GI: 240280952 Blast Desc: mitochondrial chaperone BCS1 [Ajellomyces capsulatus H143]
  misc_feature (3)..(364): NCBI GI: 154283839 Blast Desc: [Ajellomyces capsulatus NAm1] gi|150410895|gb|EDN06283.1| [Ajellomyces capsulatus NAm1]
  misc_feature (3)..(364): NCBI GI: 154287822 Blast Desc: [Ajellomyces capsulatus NAm1] gi|150408347|gb|EDN03888.1| [Ajellomyces capsulatus NAm1]
  misc_feature (3)..(364): NCBI GI: 240280264 Blast Desc: mitochondrial chaperone BCS1 [Ajellomyces capsulatus H143]
  misc_feature (3)..(364): NCBI GI: 154283143 Blast Desc: [Ajellomyces capsulatus NAm1] gi|150410547|gb|EDN05935.1| [Ajellomyces capsulatus NAm1]
  misc_feature (3)..(364): NCBI GI: 154282857 Blast Desc: [Ajellomyces capsulatus NAm1] gi|150410404|gb|EDN05792.1| [Ajellomyces capsulatus NAm1]
  misc_feature (3)..(364): NCBI GI: 154278719 Blast Desc: [Ajellomyces capsulatus NAm1] gi|150413758|gb|EDN09141.1| [Ajellomyces capsulatus NAm1]
  misc_feature (3)..(364): NCBI GI: 154280965 Blast Desc: [Ajellomyces capsulatus NAm1] gi|150411474|gb|EDN06862.1| [Ajellomyces capsulatus NAm1]
  misc_feature (3)..(364): NCBI GI: 154287564 Blast Desc: [Ajellomyces capsulatus NAm1] gi|150408218|gb|EDN03759.1| [Ajellomyces capsulatus NAm1]
  misc_feature (3)..(364): NCBI GI: 154271786 Blast Desc: [Ajellomyces capsulatus NAm1] gi|150409416|gb|EDN04866.1| [Ajellomyces capsulatus NAm1]
  misc_feature (157)..(354): SWISSPROT Homolog: EC 3.6.4.6 Vesicle-fusing ATPase
MWWVTQQPWAVRAPSVLATCNPAARTGLFFMDNLKLSHEDYKTPFSFSPYDSQVAFRWDGHIFLFERHGRPKNTDDPTSLIIRCLGSTRNICNLLEECRRQYEASHDKCSIFHHSRGEWQRTPNVKLRPLSTVILPKGERNRFVQEMDPFFSPNHREWLRERGLPVRKGYLLYGPPGTGKTSLAQGLANDQKLDLYVIDLLSLNNEQLFALFQSLPKKCAVLLEDIDDWQTKALSEVEAPGLVFVSMSALLNAIDGASAREDRVLFMTTNRRAILSDALIRKGRIDREVRLAEVDKDMARDLFLLIFGSEQQSSKEVDQQQLAARAVQFGEQVPPDTYSPAQIIGFLTEAKDSADMAPEMFEAWKESQKALQSS

SEQ ID NO: 6200 - DNA, 1070 bp, Muscodor strobelii
  misc_feature: SGI EST ID NO. CUFF.15607.0
  misc_feature: Variant of the nucleotide sequence at SEQ ID NO 6198
tcctgatttacgttctcaacctttgtttacctaaactaagtactatcatggcgtcactgttatcctatctctcactgttcaaggttatccttccaagcttcgctcggccgatgcttgagggtttcctcaccaacatgcaagtctgggaaataataccgattgttggcctgatgttcctactcttccactccggaaagccagtcgcccttttcctaagctcttgggtcaagttctactggccacaacttacgtgaactacaatagcctccttttccgactccgttcttacctatatacaacagcgaccatcagcaagataccgtactccgacccgagtttcgacattttcatgtggtgggtcacacagcagccctgggctgtgagggctccgtcggtgcttgccacctgtaatcccgcagctcgcacagggctcttcttcatggacaatctaaagctgagccatgaagactacaagacacctttctcattctccccttatgattcacaggtcgcttttcggtgggatggacatatcttcttgttcgagcgccatgggcggccaaaaaacaccgacgacccaacttctcttatcattcggtgcctcggctcgactaggaatatttgtaaccttctcgaggaatgtcgtcgccagtatgaggcctcacatgacaaatgctccatctttcaccacagcagaggcgaatggcaaagaacccctaatgtgaaactccgacccttatccaccgttatacttcccaagggcgagcgaaatcgattcgtccaagagatggatccattcttttccccaaatcatcgcgagtggcttcgagaacggggcctgccagtacgaaaagggtacctcctctatggaccgccgggcacagggaagaccagtttggctcaagggctggcgaatgatcagaagcttgacctttatgtcatcgacctactgagcctcaataacgaacagctttttgctctattccagagcctgcctaagaaatgcgccgtcttgcttgaagatattgacgactggcaaacaaaagccctgtctgaggttgaggctccgg

SEQ ID NO: 6201 - DNA, 1413 bp, Muscodor strobelii
  misc_feature: SGI cDNA ID NO. 561802
  misc_feature: Encodes the peptide sequence at SEQ ID NO 6202
atgcccgcgaggatgtggcgtcacggcattcacagctttcttgaactgctgcgccaccgtttgcctgcgtctttggagcatatgcttacattcatatatttggcatattctatgatggcccttttatacgagacagttccggcctttgaagatacttggatcgagtgtttgggagacttgggccgatacaggatggcaatagaagatgaagatataagagatcgagaagtttggacttccgtctcgagacactggtactcgcgggcgtccgataaggcaccgacgacggggcgtttataccaccatcttgccatacttgcgcgtcccgttgcgctacagcaattgttttactacaccaaatctctctgtgtacccatacccttcggctcagctcgagagtcaatcatgactttgttcgagccaattctgaacgtgagtggctacgatcacgcccgactcattcccattgatgttgcgttcgtcaaggcgcatggtattctgttcagtcagaagtttcaagatgactatcgaccagctgtgaacgggtttctcagccttctcaatgggcacattggccggattacaagaagatggatggaatcaggctattacattggaatcgcgaactgctgtgccttgctttcgtacggcaaagaggaaaatgtgatcatgagagcgatccagagctttagtgaagagacagccgatcgcacggagctcgcgacagccgcaaagctgtcttctgatttcgaagaagctctttatctcgtgacgggaactcacgaagtcgtgtttcgacgactcggcgatcctaatgtcctgccttacgttcatgtcatcatcgtcttcatgtcctacgtctcaaggtttccaagcgccatggcccgtctcgaaaaagggttcccatggaagtgggcttctataatcctcaactctcttcttgtctcgtatcaggactacaaacgtatcaagagcaaggaatttcccagagagaatgaggaagcgcctcggccattgcctgaggattttgcactcaaagggctcttgtgggtcgatcattactaccctgccgactggttttcaaatgacaagatcgacgacgacgaaaagtattttgagatgccctccatgacagacattcgaaaggaaaggattctttggctggcgtaccaaatagcactagcgggaaacgggctggtgtacgacgagatgctgaaccaatttggtgtgatgcctgaatatgagcaggtaattgatgagatggccaaggacgcagatatgataaacatctccggcggagagccgcaagcatctaccttaaaatcggaagtagcagacgaagatttcatggacgttgatgacgacgtatcgcagcgaagagaagaagggtcacctagctaccaagcaaaatag

SEQ ID NO: 6202 - protein, 470 aa, Muscodor strobelii
  misc_feature: SGI Peptide ID NO. 561802
  misc_feature (1)..(415): NCBI GI: 46135793 Blast Desc: FG09412.1 [Gibberella zeae PH-1]
  misc_feature (1)..(421): NCBI GI: 256727644 Blast Desc: NECHADRAFT_66648 [Nectria haematococca mpVI 77-13-4]
  misc_feature (1)..(415): NCBI GI: 171683933 Blast Desc: protein product [Podospora anserina] gi|170941927|emb|CAP67579.1| protein product [Podospora anserina]
  misc_feature (1)..(435): NCBI GI: 164428463 Blast Desc: NCU00611 [Neurospora crassa OR74A] gi|157072156|gb|EAA36515.2| conserved [Neurospora crassa OR74A]
  misc_feature (1)..(458): NCBI GI: 261353274 Blast Desc: conserved [Verticillium albo-atrum VaMs.102]
  misc_feature (1)..(410): NCBI GI: 156050837 Blast Desc: SS1G_08006 [Sclerotinia sclerotiorum 1980] gi|154692406|gb|EDN92144.1| SS1G_08006 [Sclerotinia sclerotiorum 1980]
  misc_feature (1)..(410): NCBI GI: 156058500 Blast Desc: SS1G_03262 [Sclerotinia sclerotiorum 1980] gi|154701049|gb|EDO00788.1| SS1G_03262 [Sclerotinia sclerotiorum 1980]
  misc_feature (1)..(435): NCBI GI: 116192981 Blast Desc: CHGG_06208 [Chaetomium globosum CBS 148.51] gi|88182121|gb|EAQ89589.1| CHGG_06208 [Chaetomium globosum CBS 148.51]
  misc_feature (1)..(453): NCBI GI: 119181765 Blast Desc: CIMG_05962 [Coccidioides immitis RS]
  misc_feature (1)..(393): NCBI GI: 240109047 Blast Desc: CPC735_025520 [Coccidioides posadasii C735 delta SOWgp]
MPARMWRHGIHSFLELLRHRLPASLEHMLTFIYLAYSMMALLYETVPAFEDTWIECLGDLGRYRMAIEDEDIRDREVWTSVSRHWYSRASDKAPTTGRLYHHLAILARPVALQQLFYYTKSLCVPIPFGSARESIMTLFEPILNVSGYDHARLIPIDVAFVKAHGILFSQKFQDDYRPAVNGFLSLLNGHIGRITRRWMESGYYIGIANCCALLSYGKEENVIMRAIQSFSEETADRTELATAAKLSSDFEEALYLVTGTHEVVFRRLGDPNVLPYVHVIIVFMSYVSRFPSAMARLEKGFPWKWASIILNSLLVSYQDYKRIKSKEFPRENEEAPRPLPEDFALKGLLWVDHYYPADWFSNDKIDDDEKYFEMPSMTDIRKERILWLAYQIALAGNGLVYDEMLNQFGVMPEYEQVIDEMAKDADMINISGGEPQASTLKSEVADEDFMDVDDDVSQRREEGSPSYQAK

SEQ ID NO: 6203 - DNA, 351 bp, Muscodor strobelii
  misc_feature: SGI cDNA ID NO. 561803
  misc_feature: Encodes the peptide sequence at SEQ ID NO 6204
atggacttttccgcaaaggtccaggccattctggcgcatctttggccatctcggcagccatctgggcaggaggaactcgactcacgattgatagaagctgccgaagcaactggactcatgttggtgtctgtatcacgaagagaacaaatgagaaaggacttggcagaaaccgttatgccggaggaccatcgtcagaaaggaatagagcatcttagtgggctagatgggtgcagacatccttcacaggaagaaatggaccgtttcctcgaggcactcggcaatgtcaatgtgcctaaggacccaaaggactggatcgtgtttggagatgcattgaacggggtaatcaactag

SEQ ID NO: 6204 - protein, 116 aa, Muscodor strobelii
  misc_feature: SGI Peptide ID NO. 561803
MDFSAKVQAILAHLWPSRQPSGQEELDSRLIEAAEATGLMLVSVSRREQMRKDLAETVMPEDHRQKGIEHLSGLDGCRHPSQEEMDRFLEALGNVNVPKDPKDWIVFGDALNGVIN

SEQ ID NO: 6205 - DNA, 565 bp, Muscodor strobelii
  misc_feature: SGI EST ID NO. CUFF.15629.0
  misc_feature: Variant of the nucleotide sequence at SEQ ID NO 6203
gtttcccaccatccctctgaggaaagcatatgaatacaaatgtcaacctgctttcaccttggcagtctcatcacctccaaatctagttgccagcacttttggcttttgtgccgcatacggtttctcttctttgacacatccccgaccaggacgtttcacaatggacttttccgcaaaggtccaggccattctggcgcatctttggccatctcggcagccatctgggcaggaggaactcgactcacgattgatagaagctgccgaagcaactggactcatgttggtgtctgtatcacgaagagaacaaatgagaaaggacttggcagaaaccgttatgccggaggaccatcgtcagaaaggaatagagcatcttagtgggctagatgggtgcagacatccttcacaggaagaaatggaccgtttcctcgaggcactcggcaatgtcaatgtgcctaaggacccaaaggactggatcgtgtttggagatgcattgaacggggtaatcaactagaatagacgacttaataatagtccagacccagctgacaaggaaatgacacatgcg

SEQ ID NO: 6206 - DNA, 438 bp, Muscodor strobelii
  misc_feature: SGI cDNA ID NO. 561804
  misc_feature: Encodes the peptide sequence at SEQ ID NO 6207
atggaccaaccgcttgcctcgctaagcttggacgagcaaaaaggttctaaggacgacgaaagtgtttcttacaacgacggagacgtctctgggaggatgtctgtcgagaagaccaaggagatcatggatgaaatacacgagcatctcgttcactacctgctgcttctggttctctatggttcgccccctccactatgggatgcgcttgctcttgagggccacaaggccctcgaccactatcgcctggctgcggacgacttccctgtagtcttactgggccttttcgtctttggttccgcggccatcggcataaccacgagtgcactcccggccctcgtcttgctcctggtgttcactgtgtcttgggtcatgtttcattgttctgtcgggctgcatgccgcacttgccagtgagttctctcccctgtctttttcctag

SEQ ID NO: 6207 - protein, 145 aa, Muscodor strobelii
  misc_feature: SGI Peptide ID NO. 561804
MDQPLASLSLDEQKGSKDDESVSYNDGDVSGRMSVEKTKEIMDEIHEHLVHYLLLLVLYGSPPPLWDALALEGHKALDHYRLAADDFPVVLLGLFVFGSAAIGITTSALPALVLLLVFTVSWVMFHCSVGLHAALASEFSPLSFS

SEQ ID NO: 6208 - DNA, 615 bp, Muscodor strobelii
  misc_feature: SGI cDNA ID NO. 561805
  misc_feature: Encodes the peptide sequence at SEQ ID NO 6209
atgaagcacatcatgcagccggatgcccccatctatcaagtagcggtactgggagatgcaaacgttgggaagacagcacttgtcatccagctctgcctcaaagcatttcccgaggagtacgatcctacaattgaagactcgtattggcttcccttaacaatcgatgggcaaccgcgcaaaataaaatgtctggacacggcgggactatgcgcctaccgaagcggagaggcgtcttggatcagcagatgctcaggctttgtggtggtatacagtgttacgtcgccagattcgttcgagaacgcgaggcgtctggtccaagagatcttccagcagaagggttgggatccccaggacgcaacgaaacggccaatcacggtcgtgggcagcaagatcgatgacagattaagacgaagggtagattatcgcaaagcaaaagaacttgcagattcatatagacttgcgtatttcgaaacatcggccaagtttagtgtcaatgtgggaaagcccttcgttcatgtagctgcatcgttgattcaccccccagcgccggagaagtctgacgatgatctatctcccaaggaaagttcagaggccgcctgttgcattctcatgtaa

SEQ ID NO: 6209 - protein, 204 aa, Muscodor strobelii
  misc_feature: SGI Peptide ID NO. 561805
  misc_feature (13)..(132): Pfam Id: PF08477 Pfam Desc: Miro-like protein
  misc_feature (13)..(179): Pfam Id: PF00071 Pfam Desc: Ras family
  misc_feature (9)..(170): NCBI GI: 50547057 Blast Desc: YALI0B16984p [Yarrowia lipolytica] gi|49646864|emb|CAG83251.1| YALI0B16984p [Yarrowia lipolytica]
  misc_feature (5)..(174): NCBI GI: 71006248 Blast Desc: UM01643.1 [Ustilago maydis 521] gi|27752293|gb|AAO19639.1| small G-protein Ras2 [Ustilago maydis] gi|46097191|gb|EAK82424.1| UM01643.1 [Ustilago maydis 521]
  misc_feature (5)..(174): NCBI GI: 23506657 Blast Desc: ras-like protein Ras1 [Ustilago maydis]
  misc_feature (11)..(177): NCBI GI: 256732182 Blast Desc: [Nectria haematococca mpVI 77-13-4]
  misc_feature (11)..(177): NCBI GI: 46137197 Blast Desc: FG10114.1 [Gibberella zeae PH-1]
  misc_feature (11)..(177): NCBI GI: 85102512 Blast Desc: GTPase KRas [Neurospora crassa OR74A] gi|30316372|sp|Q01387.2|RAS2_NEUCR RecName: Full=Protein ras-2; Flags: Precursor gi|12718404|emb|CAC28712.1| RAS-2 PROTEIN GTPase
  misc_feature (12)..(203): NCBI GI: 157123069 Blast Desc: RAS protein, [Aedes aegypti] gi|108874538|gb|EAT38763.1| RAS protein, [Aedes aegypti]
  misc_feature (5)..(177): NCBI GI: 189211105 Blast Desc: GTPase NRas precursor [Pyrenophora tritici-repentis Pt-1C-BFP] gi|187977976|gb|EDU44602.1| GTPase NRas precursor [Pyrenophora tritici-repentis Pt-1C-BFP]
  misc_feature (8)..(203): NCBI GI: 262094999 Blast Desc: ras protein let-60 [Phytophthora infestans T30-4] gi|262108318|gb|EEY66370.1| ras protein let-60 [Phytophthora infestans T30-4]
  misc_feature (5)..(177): NCBI GI: 169600943 Blast Desc: SNOG_03326 [Phaeosphaeria nodorum SN15] gi|160705550|gb|EAT90057.2| SNOG_03326 [Phaeosphaeria nodorum SN15]
MKHIMQPDAPIYQVAVLGDANVGKTALVIQLCLKAFPEEYDPTIEDSYWLPLTIDGQPRKIKCLDTAGLCAYRSGEASWISRCSGFVVVYSVTSPDSFENARRLVQEIFQQKGWDPQDATKRPITVVGSKIDDRLRRRVDYRKAKELADSYRLAYFETSAKFSVNVGKPFVHVAASLIHPPAPEKSDDDLSPKESSEAACCILM

SEQ ID NO: 6210 - DNA, 795 bp, Muscodor strobelii
  misc_feature: SGI cDNA ID NO. 561806
  misc_feature: Encodes the peptide sequence at SEQ ID NO 6211
atgcaaaaccagatgatagacaatcaagcggaaatattacgccatctcgagagactaaatgaaaacttggcaaatttcatttccaaatccaataatgagtcgcaatccataaagcgagagtctccatcgacgtcaccttcggtatatcctgccatcgtgactgcgtcaagtccctcccaggccgatggaaggcagctggccgtccatgacgatcaggcagaatgggacgagaagagtgtgatggcctacgtcgagaaatacaaaggcgcagcgttatatcacgacatagtaccgcacgtacagcttgatggcatggttggccggttcttcgaaaaggtgcccagattacaagtaggcacgaagagaaagcgagcaacgagcatggacacaggatgggataggcctcccgacattgatggcgacgatgctcttgtcttacttgtacttgctattggcaagctatgtgcgaatggaccgggtctgtctcactctccctcggggattatgtatttcagtcgcggcaaagaccttttcgataaatcggtctcgcgagatatgatccattgcgttccggcgcatgccttgatcggcgcctacctctgtgaggttggtgatgtgaaaaagggcttaccgtatctgggctgggctctccacacgacgcgagctttgctcttcgagttcgtcctattaaaggacgaaaaagcaacctctggaccttctgatcaaacacattctagcagatttcatcatgtctgccgtatattgaacagccagaactggttccatacggcttga

SEQ ID NO: 6211 - protein, 264 aa, Muscodor strobelii
  misc_feature: SGI Peptide ID NO. 561806
MQNQMIDNQAEILRHLERLNENLANFISKSNNESQSIKRESPSTSPSVYPAIVTASSPSQADGRQLAVHDDQAEWDEKSVMAYVEKYKGAALYHDIVPHVQLDGMVGRFFEKVPRLQVGTKRKRATSMDTGWDRPPDIDGDDALVLLVLAIGKLCANGPGLSHSPSGIMYFSRGKDLFDKSVSRDMIHCVPAHALIGAYLCEVGDVKKGLPYLGWALHTTRALLFEFVLLKDEKATSGPSDQTHSSRFHHVCRILNSQNWFHTA

SEQ ID NO: 6212 - DNA, 1482 bp, Muscodor strobelii
  misc_feature: SGI cDNA ID NO. 561807
  misc_feature: Encodes the peptide sequence at SEQ ID NO 6213
atggccacacggcggccaccgagattagggtctcgccttgtctacaagttcgaaaaagaaatccgccctttgaactgcaaatgtgaatgtccgcagttcgatcctgatctgacctgctacgaaaacgcacaatccggctttgactggctcgttaggcaccaggacgatgacgagaacactagcagaggaccggaaatcgacagcgacgatactgcaacacagccaccgaatattactgtaacgcccgatgttgcaaccgaaatgacgatttcccgaccgcaacagactgctctcgtgcccaggaagcgccttggagttgatgaggggacaccggttatacttaaggtccgaacgccttatgaaaagcggtcggtggtagagaatattgcccatcgcctggcagagaagatcaaatctggcgttcgtaggtttgtagcactaaagggtcagtccttgaagcttcgagcacgaatcgagaaattaaccaaccagtgtttggatcgccaaggagataagaaaaaactatgggattatgtccgtgagttagagatgaagcttgcagacaagtcaaacatgctttctgggatgggagaccattcccgatggcgacgggcgagcgctgccaatgtgatctttggcattgtcgataagcttctccctacagaaggcatcgacgccctcggtgtcattggaggactggctgttcactaccatactctcacggatgcttcggtgaaaggcgtagaggatcaagagagaatcagcacactggtggcttataagctacgtggacaactctctgcccttccgaacgagtgcgatattccatacccagccgaatgggtgagcatggtcactcaagttaggtctctcgggatgagcaatcttgcctattttcgatcgcccctaggcagcgccattgtaggtgaagaaaatgtgtttcgcgcaaatatcaatgtgggccaagccaggcagatatggtctgctttcgaatcgcatgtcaatagcgaaatgcggacccgtaaagaggccgagggattgcggcagtcggcaggcttcgacaacatgacgccgtacagcaaccatataaccacttatactcaattaatcagccagtatatggcttcggagtcacctcaaatacttgatgttgcagccaaggagttctcgcgattggttcatgcgtgggacgagtgccggggccagatagaagactgtacgacaccaagcgtattgacaccgcagggtgaccccgagccgtctccactgaacatgctacttgtggcggcccatcaagcggatgcagcttcgggaacccaaatatgtcgtggctttgaacatcagccacttcggcagggcagtgtcactgaaacaagcgatcctatgggctttggcacagagtggtctcttccggctggacttgagctctgggaagatttcaatttggatcagaatatcggtggcttcggcacacccgtatga

SEQ ID NO: 6213 - protein, 493 aa, Muscodor strobelii
  misc_feature: SGI Peptide ID NO. 561807
MATRRPPRLGSRLVYKFEKEIRPLNCKCECPQFDPDLTCYENAQSGFDWLVRHQDDDENTSRGPEIDSDDTATQPPNITVTPDVATEMTISRPQQTALVPRKRLGVDEGTPVILKVRTPYEKRSVVENIAHRLAEKIKSGVRRFVALKGQSLKLRARIEKLTNQCLDRQGDKKKLWDYVRELEMKLADKSNMLSGMGDHSRWRRASAANVIFGIVDKLLPTEGIDALGVIGGLAVHYHTLTDASVKGVEDQERISTLVAYKLRGQLSALPNECDIPYPAEWVSMVTQVRSLGMSNLAYFRSPLGSAIVGEENVFRANINVGQARQIWSAFESHVNSEMRTRKEAEGLRQSAGFDNMTPYSNHITTYTQLISQYMASESPQILDVAAKEFSRLVHAWDECRGQIEDCTTPSVLTPQGDPEPSPLNMLLVAAHQADAASGTQICRGFEHQPLRQGSVTETSDPMGFGTEWSLPAGLELWEDFNLDQNIGGFGTPV

SEQ ID NO: 6214 - DNA, 549 bp, Muscodor strobelii
  misc_feature: SGI cDNA ID NO. 561808
  misc_feature: Elevated expression when VOC is produced
  misc_feature: Encodes the peptide sequence at SEQ ID NO 6215
atgtctctgcatcctatcctcctcgtcaagacaatacttcccgttgtcacgctcccccacttgaccgttgaaaacggctggcaaaagatttccttcagcgatccaaaagtcaccgatgacgttaccgaactgtatcagcttgcgcgttctgagcgcgacgtagaaattggccggcagattagcaaggaacatgaggcgtggttaactgagtgggcagagggatcatttgaatggggtgtccatgcgtatgtgcttaagggctttgtcaagggacagaaggatgtagtcagtatatgttggccgacagacagtgtcgacgaggtgcggcttgtccgctcgttcggggtcggaactgctgaagagtgtcgaaaatcgactcccatcccatggtccaagcggcaatatgtcgtgctacatgatgaaagtgatgccattggatcactaaatagagcgcttatgtcattctacatggtgcgtgtttggaagaagccaaaagagcatggagagagcgagcaaaatgcacagaagtctggaggcagacagtcttaa

SEQ ID NO: 6215 - protein, 182 aa, Muscodor strobelii
  misc_feature: SGI Peptide ID NO. 561808
  misc_feature: Useful for introducing or modulating the production of volatile compounds
MSLHPILLVKTILPVVTLPHLTVENGWQKISFSDPKVTDDVTELYQLARSERDVEIGRQISKEHEAWLTEWAEGSFEWGVHAYVLKGFVKGQKDVVSICWPTDSVDEVRLVRSFGVGTAEECRKSTPIPWSKRQYVVLHDESDAIGSLNRALMSFYMVRVWKKPKEHGESEQNAQKSGGRQS

SEQ ID NO: 6216 - DNA, 863 bp, Muscodor strobelii
  misc_feature: SGI EST ID NO. CUFF.15665.0
  misc_feature: Variant of the nucleotide sequence at SEQ ID NO 6214
tggcagtgcaggcagcataaaaaggccactcctcgattcttttcgttgacaatatgctgtagccttccatccaagtttctttttttctctccaaacaactatgtctctgcatcctatcctcctcgtcaagacaatacttcccgttgtcacgctcccccacttgaccgttgaaaacggctggcaaaagatttccttcagcgatccaaaagtcaccgatgacgttaccgaactgtatcagcttgcgcgttctgagcgcgacgtagaaattggccggcagattagcaaggaacatgaggcgtggttaactgagtgggcagagggatcatttgaatggggtgtccatgcgtatgtgcttaagggctttgtcaagggacagaaggatgtagtcagtatatgttggccgacagacagtgtcgacgaggtgcggcttgtccgctcgttcggggtcggaactgctgaagagtgtcgaaaatcgactcccatcccatggtccaagcggcaatatgtcgtgctacatgatgaaagtgatgccattggatcactaaatagagcgcttatgtcattctacatggtgcgtgtttggaagaagccaaaagagcatggagagagcgagcaaaatgcacagaagtctggaggcagacagtcttaaatgcggcccttggtaaagctcatcgctaattacatatctgtcctggatcgtctaagagtcctgcgagtgatcatacgggtgtgccgaagccaccgatattctgatccaaattgaaatcttcccagagctcaagtccagccggaagagaccactctgtgccaaagcccataggatcgcttgtttcagtgacactgccctgccgaagtggctgatg

SEQ ID NO: 6217 - DNA, 516 bp, Muscodor strobelii
  misc_feature: SGI cDNA ID NO. 561809
  misc_feature: Encodes the peptide sequence at SEQ ID NO 6218
atggcgtcaattacattcacactagatgcagcaaagagggctctcatcgaagagggtctttttaccttaggcgactcactgatagggacgcgtatcttagagatggagaggaggggcttcccatacttcaccgagtacggcttggatttttgcaaacaatttgcctttgatgcatgtacccttggacactggttgcgatacgaggagttccctggacatgttgaatgtttcagaaggggtggcccaaaagccggacagggtgttctgacggttcatctttgggctaaaggatcgagagtgacagtgattcttgatgcacgactcggcttcgaaattaagcaaggatatgcaattacgtttctatttgcggtagacgaggtagtcgccaagtgggctaaaataatccttccctactcggaggggctggccaaaaaggtcgctgatatggagaaggagagcgtacagattgggctgaacttcgcatttgaaacttctcctggaagcagaggttcataa

SEQ ID NO: 6218 - protein, 171 aa, Muscodor strobelii
  misc_feature: SGI Peptide ID NO. 561809
  misc_feature (1)..(170): NCBI GI: 242763454 Blast Desc: TSTA_066400 [Talaromyces stipitatus ATCC 10500] gi|218723773|gb|EED23190.1| TSTA_066400 [Talaromyces stipitatus ATCC 10500]
  misc_feature (1)..(100): NCBI GI: 255930479 Blast Desc: [Penicillium chrysogenum Wisconsin 54-1255] gi|211581412|emb|CAP79189.1| [Penicillium chrysogenum Wisconsin 54-1255]
  misc_feature (1)..(100): NCBI GI: 242763459 Blast Desc: TSTA_066400 [Talaromyces stipitatus ATCC 10500] gi|218723774|gb|EED23191.1| TSTA_066400 [Talaromyces stipitatus ATCC 10500]
  misc_feature (18)..(163): NCBI GI: 154281299 Blast Desc: [Ajellomyces capsulatus NAm1] gi|150411641|gb|EDN07029.1| [Ajellomyces capsulatus NAm1]
  misc_feature (20)..(163): NCBI GI: 154280136 Blast Desc: [Ajellomyces capsulatus NAm1] gi|150412824|gb|EDN08211.1| [Ajellomyces capsulatus NAm1]
  misc_feature (18)..(163): NCBI GI: 240275673 Blast Desc: conserved [Ajellomyces capsulatus H143]
  misc_feature (1)..(154): NCBI GI: 261361612 Blast Desc: VDBG_10150 [Verticillium albo-atrum VaMs.102]
MASITFTLDAAKRALIEEGLFTLGDSLIGTRILEMERRGFPYFTEYGLDFCKQFAFDACTLGHWLRYEEFPGHVECFRRGGPKAGQGVLTVHLWAKGSRVTVILDARLGFEIKQGYAITFLFAVDEVVAKWAKIILPYSEGLAKKVADMEKESVQIGLNFAFETSPGSRGS

SEQ ID NO: 6219 - DNA, 2671 bp, Muscodor strobelii
  misc_feature: SGI EST ID NO. CUFF.15798.0
  misc_feature: Variant of the nucleotide sequence at SEQ ID NO 6217
ccggcaacagcgcagtctcgtcatggcgtcaattacattcacactagatgcagcaaagagggctctcatcgaagagggtctttttaccttaggcgactcactgatagggacgcgtatcttagagatggagaggaggggcttcccatacttcaccgagtacggcttggatttttgcaaacaatttgcctttgatgcacgcatacgatctgttctcgaagcctccttcgaaaagtgtacccttggacactggttgcgatacgaggagttccctggacatgttgaatgtttcagaaggggtggcccaaaagccggacagggtgttctgacggttcatctttgggctaaaggatcgagagtgacgtactacgttggttcgcaccttcatgatttggttactacgaggggaaggaggtctttacacgaaatacctctatctgagttaagtcgtgtcggttctaagcccgaggaaaaagagttcccggacggcggattagtgattcttgatgcacgactcggcttcgaaattaagcaaggatatgcaattacgtttctatttgcggtagacgaggtagtcgccaagtgggctaaaataatccttccctactcggaggggctggccaaaaaggtcgctgatatggagaaggagagcgtacagattgggctgaacttcgcatttgaaacttctcctggaagcagaggttcataatcatcattgctcatggtatgccaatacttcatttgtgagatttccggtctcatggtttcccatcatccatatcgggacaccattcattatctgcaaaatgggggcatcgaaggtctctaagaaatctagatcttgtgcttgcacttccatcggataagacatgcccgtgtaggcgccagaggattcggccacgttggcgagaggcggcaacgctgtaagtgactgtattgtgaggcgagtttgtgccgcagctgattcgacgtcagtcgagaggggatgaaggggttcgtcaccagtggtgtccgacaaaggatgttggttggtgattttcgcttcttgaatggctgatgtctctgagcccagagctgccactccccacttccgtttcttactctctctgcttcctgataaggcttggaccaatgcgagacccagctgtctgtcggcatgttcacgtaattcctcacatgtttttttggatatatgttgttttccttccacccacgtccgcgtgcttctcggcatgcctcacgaactcgcttgtgagcctgaaaatcttgaaacaacacacacacacttcctcgcatgtgacatctagaggtagcatgtcagaagccttacatatcaatgaaactaggagactgacgttgccagaagtgccgccggagtccttgcttcttcttaaatggttccgatcgttggcacgatgggtggggacaacgatgctgtttggaggttcctttatttttgtctatgctcgtgatatcgctaaagtcattgtattcattgccgtcgcaatcgctttggttgctttgatcatgtccggctctcgaatgggctcgacatatttcgatatcggctcgcagatgttcttcccgggactgcaagatgtcaattaaagagcagcagggaacagtaggtatactaactcgatattcttcaagatgctcgcatagatcgccctcagttgcgaacaaggctgagcaagtacatcgtggcagatttgagaactcgtgtggcatattcgggaaaaggtgaagaccgagcgggcagcggggagttcctgtcttttgtcttgattctaaacccttcttgtttagcgtagaataaacaggggctgtttggaaagttgggctagtcattggtatccaaaattgctgaaatataattggtcaaaggcgctaccttttgggcattgacatggagtgggccacggcatcctctgttaagtacccaacaatatccgtacatgtttaacagatcaaaacttcgcttcagacaacgtacgacactaaaaccattcccgaaccgtctagattcaaaaatctctaccaggacttcgcctcctgaaaagcgaaagatgggtcaatgcgagacttgcggcggtgacaaggtcgttaatggcattccatgccctacctgcagcggcaagggatgagaacaaataagcagaacgacaggcgattgagagacagaaatcggagtgacacaactgcatgagcgtcgttgcgtttgcaagtgcatcggcgctatcaatggaaatttttgttatcccataccagcgtactcaagacataactggatgaagactgctcttgcgctttgccaaaccatttctgggcttggctcgatcatgcacacgagattcgtgtccagaccggtccacttttccccagacagaagaacggagacatgggctgttaatgtacggattaactctattcaaatatggcattggttccgaggctttacatgttcaaaccccataaatatttctgatggggagtcttcagattctgctggtagacggagtgaacgggtcaagctctcacacccgttgctttgggcagccgcggtcgtggccgcagatatgggttcatctagcccagaccttagctagctttttaggttgtagacgtgacactcaggggttcgcaaaatgtgacccctgcagatccatctttc

SEQ ID NO: 6220 - DNA, 825 bp, Muscodor strobelii
  misc_feature: SGI cDNA ID NO. 561810
  misc_feature: Encodes the peptide sequence at SEQ ID NO 6221
atggaccatccattggacgtgatcgagaccaacgaggccttccaagatgtcgatggacattaccaattcacaagcaccctgattgtataccgagatggtgatgatatttaccacgccacctcagaagctcgctactcatcgcccgcagagcttagatcagagcatctctctcacagggtccttatacccatctctgcttatgcgcctctctttcccatcaatttcacggtagtatctgacccgctgccatgcgataccttcgtcaagaaacctcggctgatctcgtacgaccgttatcaccaaggtcttcagccaacctatattgcagacgacgttctccgggaaacagcgatgtgcgagctgcttcggcaaaacccacatccgaacattgccgagtacagaggttgccaagtctccaacaataggatcgttggtatctgttttgctgaatacgaacaaactctgatgcaggcggtcaaccctcaccactatgggaaaaggaagtttcgagcagcacgacaggacctgggaaattatcgtcacattttagaaggagttgagagtgggatacgacatctccataagctcggagttgcccacaacgatatcaatcccagcaacatcatgctcaatggcggcgtgccaatcatcattgacttcacttcttcccggaaagtaggggaaagtctagatagcgttggtcgtacctacgaatggtatgatgagacggttcagtcttctcttcccaagaatgacctggatgcattgcaagaaattcgggtatggttatttgaagattctacagcatttcagtttcaggattag

SEQ ID NO: 6221 - protein, 274 aa, Muscodor strobelii
  misc_feature: SGI Peptide ID NO. 561810
  misc_feature (5)..(274): NCBI GI: 242773157 Blast Desc: conserved [Talaromyces stipitatus ATCC 10500] gi|218721802|gb|EED21220.1| conserved [Talaromyces stipitatus ATCC 10500]
  misc_feature (5)..(272): NCBI GI: 255946942 Blast Desc: Pc22g01940 [Penicillium chrysogenum Wisconsin 54-1255] gi|211591255|emb|CAP97482.1| Pc22g01940 [Penicillium chrysogenum Wisconsin 54-1255]
  misc_feature (5)..(273): NCBI GI: 255931033 Blast Desc: Pc12g01780 [Penicillium chrysogenum Wisconsin 54-1255] gi|211581692|emb|CAP79805.1| Pc12g01780 [Penicillium chrysogenum Wisconsin 54-1255]
  misc_feature (5)..(272): NCBI GI: 115400227 Blast Desc: [Aspergillus terreus NIH2624] gi|114191368|gb|EAU33068.1| [Aspergillus terreus NIH2624]
  misc_feature (7)..(272): NCBI GI: 255944443 Blast Desc: Pc20g04430 [Penicillium chrysogenum Wisconsin 54-1255] gi|211587724|emb|CAP85772.1| Pc20g04430 [Penicillium chrysogenum Wisconsin 54-1255]
  misc_feature (112)..(272): NCBI GI: 238482277 Blast Desc: conserved [Aspergillus flavus NRRL3357] gi|220700427|gb|EED56765.1| conserved [Aspergillus flavus NRRL3357]
  misc_feature (5)..(263): NCBI GI: 225555345 Blast Desc: conserved [Ajellomyces capsulatus G186AR]
  misc_feature (5)..(263): NCBI GI: 240273912 Blast Desc: conserved [Ajellomyces capsulatus H143]
  misc_feature (5)..(263): NCBI GI: 255946926 Blast Desc: Pc22g01860 [Penicillium chrysogenum Wisconsin 54-1255] gi|211591247|emb|CAP97474.1| Pc22g01860 [Penicillium chrysogenum Wisconsin 54-1255]
  misc_feature (5)..(274): NCBI GI: 255930775 Blast Desc: Pc12g00400 [Penicillium chrysogenum Wisconsin 54-1255] gi|211581563|emb|CAP79667.1| Pc12g00400 [Penicillium chrysogenum Wisconsin 54-1255]
MDHPLDVIETNEAFQDVDGHYQFTSTLIVYRDGDDIYHATSEARYSSPAELRSEHLSHRVLIPISAYAPLFPINFTVVSDPLPCDTFVKKPRLISYDRYHQGLQPTYIADDVLRETAMCELLRQNPHPNIAEYRGCQVSNNRIVGICFAEYEQTLMQAVNPHHYGKRKFRAARQDLGNYRHILEGVESGIRHLHKLGVAHNDINPSNIMLNGGVPIIIDFTSSRKVGESLDSVGRTYEWYDETVQSSLPKNDLDALQEIRVWLFEDSTAFQFQD

SEQ ID NO: 6222 - DNA, 1668 bp, Muscodor strobelii
  misc_feature: SGI cDNA ID NO. 561811
  misc_feature: Reduced expression when VOC is produced
  misc_feature: Encodes the peptide sequence at SEQ ID NO 6223
atgatggatcagcaccagctcggggttattcaagcccatcctctcggcgcacatctcaatgcagtatatgcgtcactacttgaagtcaccgggactcccgcagatctcgatgccgtgagctcagaagttcttcgggatatagtgcttgatcttctccctttgctacagaaccatccagcctctcgccgtctgtcctccgttacaggtcgcggcaccctccgaacggatctactgcggttcgaggcctcctttgaatctggcgagctcgacttgagccgcatccgacctgttttgaatgtcgtgcttacgaatgcgcccgatacccacatctgggaacaagtctaccatgccgttgccgaatccacccctccgcggaagcctgcctcttctttccaacacacgcccttagtgtacaggacaagcagcatcgtaaattcctccgagaggcgcgactacatggacaatgcgctccgagaagaactaggcgttatgtacgtcgacattcccgatctctacgaggccttcttcagcgacatcccaaacctcgatgcggcatcaggggagatcttccaaaagtgtaaggcagagccacaaccacttttccgtgaagaccaaggctgggctgcgtggcccgagactataaacgaagctggtgtcctgtcttggcttgccgacttagtcgaacgcctcaccccatgggcacgagactgcagaccaacaacccgcagacctctggctcggcccaataccccgctcgacggctccgctgcgaagcgtaagctcgacgttggcttcgtagacgtccccgacgcccgaatggacaccaaatatcattggtcgcatgtcctgatacctggtgagctgaagagcaaccccagcgacgacaccccgtccaaggcccggctcgacctagcaagatacgtcagagaagtcttcactgcccagcccacgcgccgcttcgtcttggcctttaccctatgcggctcgtggatgcgactctgggaattcgaccgcctcggcggcattgcgtctaccaattttgacatacaccaggaaggtcgattgttggtgtcgaccctcctcggcttcctatggatgggcaacgatcgtctcggcctggatcccactatcgtcacatcggctggtcaacaatatatcgaaatcaaacggcatgacaagacagaacgtctaatcatcgaccaactcgtgagaggagcacaaggtatcgtgggtcgtgcgacgacgtgctggagagcacatgcagacagcgatgactcttcgtcttttgttatcaaggactcgtggcagtatcccgagcgtcatgaagaaggcgaactgctccaagaggcaactgataagggggtgatcaatgttgcgcggcattaccaccacgagaccgttcaggttgggggtgaagacgatgatatccaaagcaacattcgtaaaggattggatattaccaaagccagcaactatcgccaagcacgtctgactgcatcgtctcctcaatcgcgtgcgagttccacaggctcaaaacggttcggtatcgcccacgaagtttggaaggcagcctctcccgaatcgaatccaccggcgtatcattttacgcgattacgggaagcctatttacgaggcgtcttctcgggtggccttgttaaaggcacttga

SEQ ID NO: 6223 - protein, 555 aa, Muscodor strobelii
  misc_feature: SGI Peptide ID NO. 561811
  misc_feature (1)..(512): NCBI GI: 256725210 Blast Desc: NECHADRAFT_102251 [Nectria haematococca mpVI 77-13-4]
  misc_feature (1)..(513): NCBI GI: 261361614 Blast Desc: conserved [Verticillium albo-atrum VaMs.102]
  misc_feature (9)..(513): NCBI GI: 159125639 Blast Desc: AFUB_070970 [Aspergillus fumigatus A1163]
  misc_feature (106)..(515): NCBI GI: 189197961 Blast Desc: conserved [Pyrenophora tritici-repentis Pt-1C-BFP] gi|187981266|gb|EDU47892.1| conserved [Pyrenophora tritici-repentis Pt-1C-BFP]
  misc_feature (1)..(531): NCBI GI: 154274231 Blast Desc: [Ajellomyces capsulatus NAm1] gi|150415575|gb|EDN10928.1| [Ajellomyces capsulatus NAm1]
  misc_feature (41)..(513): NCBI GI: 239611210 Blast Desc: conserved [Ajellomyces dermatitidis ER-3]
  misc_feature (6)..(513): NCBI GI: 226287436 Blast Desc: conserved [Paracoccidioides brasiliensis Pb18]
  misc_feature (41)..(513): NCBI GI: 261205700 Blast Desc: conserved [Ajellomyces dermatitidis SLH14081] gi|239592646|gb|EEQ75227.1| conserved [Ajellomyces dermatitidis SLH14081]
  misc_feature (2)..(513): NCBI GI: 239606394 Blast Desc: conserved [Ajellomyces dermatitidis ER-3]
  misc_feature (2)..(513): NCBI GI: 261190192 Blast Desc: conserved [Ajellomyces dermatitidis SLH14081] gi|239591334|gb|EEQ73915.1| conserved [Ajellomyces dermatitidis SLH14081]
  misc_feature: Useful for introducing or modulating the production of volatile compounds
MMDQHQLGVIQAHPLGAHLNAVYASLLEVTGTPADLDAVSSEVLRDIVLDLLPLLQNHPASRRLSSVTGRGTLRTDLLRFEASFESGELDLSRIRPVLNVVLTNAPDTHIWEQVYHAVAESTPPRKPASSFQHTPLVYRTSSIVNSSERRDYMDNALREELGVMYVDIPDLYEAFFSDIPNLDAASGEIFQKCKAEPQPLFREDQGWAAWPETINEAGVLSWLADLVERLTPWARDCRPTTRRPLARPNTPLDGSAAKRKLDVGFVDVPDARMDTKYHWSHVLIPGELKSNPSDDTPSKARLDLARYVREVFTAQPTRRFVLAFTLCGSWMRLWEFDRLGGIASTNFDIHQEGRLLVSTLLGFLWMGNDRLGLDPTIVTSAGQQYIEIKRHDKTERLIIDQLVRGAQGIVGRATTCWRAHADSDDSSSFVIKDSWQYPERHEEGELLQEATDKGVINVARHYHHETVQVGGEDDDIQSNIRKGLDITKASNYRQARLTASSPQSRASSTGSKRFGIAHEVWKAASPESNPPAYHFTRLREAYLRGVFSGGLVKGT

SEQ ID NO: 6224 - DNA, 1910 bp, Muscodor strobelii
  misc_feature: SGI EST ID NO. CUFF.15738.1
  misc_feature: Variant of the nucleotide sequence at SEQ ID NO 6222
cctaggtactggctgcaggtccgtgcaccaacagtgtagccattcttaaccggcataaatcattgccctgccgacataccagtaccatttccataaacacgccatcttgtcacgatgccatgatggatcagcaccagctcggggttattcaagcccatcctctcggcgcacatctcaatgcagtatatgcgtcactacttgaagtcaccgggactcccgcagatctcgatgccgtgagctcagaagttcttcgggatatagtgcttgatcttctccctttgctacagaaccatccagcctctcgccgtctgtcctccgttacaggtcgcggcaccctccgaacggatctactgcggttcgaggcctcctttgaatctggcgagctcgacttgagccgcatccgacctgttttgaatgtcgtgcttacgaatgcgcccgatacccacatctgggaacaagtctaccatgccgttgccgaatccacccctccgcggaagcctgcctcttctttccaacacacgcccttagtgtacaggacaagcagcatcgtaaattcctccgagaggcgcgactacatggacaatgcgctccgagaagaactaggcgttatgtacgtcgacattcccgatctctacgaggccttcttcagcgacatcccaaacctcgatgcggcatcaggggagatcttccaaaagtgtaaggcagagccacaaccacttttccgtgaagaccaaggctgggctgcgtggcccgagactataaacgaagctggtgtcctgtcttggcttgccgacttagtcgaacgcctcaccccatgggcacgagactgcagaccaacaacccgcagacctctggctcggcccaataccccgctcgacggctccgctgcgaagcgtaagctcgacgttggcttcgtagacgtccccgacgcccgaatggacaccaaatatcattggtcgcatgtcctgatacctggtgagctgaagagcaaccccagcgacgacaccccgtccaaggcccggctcgacctagcaagatacgtcagagaagtcttcactgcccagcccacgcgccgcttcgtcttggcctttaccctatgcggctcgtggatgcgactctgggaattcgaccgcctcggcggcattgcgtctaccaattttgacatacaccaggaaggtcgattgttggtgtcgaccctcctcggcttcctatggatgggcaacgatcgtctcggcctggatcccactatcgtcacatcggctggtcaacaatatatcgaaatcaaacggcatgacaagacagaacgtctaatcatcgaccaactcgtgagaggagcacaaggtatcgtgggtcgtgcgacgacgtgctggagagcacatgcagacagcgatgactcttcgtcttttgttatcaaggactcgtggcagtatcccgagcgtcatgaagaaggcgaactgctccaagaggcaactgataagggggtgatcaatgttgcgcggcattaccaccacgagaccgttcaggttgggggtgaagacgatgatatccaaagcaacattcgtaaaggattggatattaccaaagccagcaactatcgccaagcacgtctgactgcatcgtctcctcaatcgcgtgcgagttccacaggctcaaaacggtctgccagtcaaatcggcatctctctcccacctggcaagcgctcccgttcaggttcggtatcgcccacgaagtttggaaggcagcctctcccgaatcgaatccaccggcgtatcattttacgcgattacgggaagcctatttacgaggcgtcttctcgggtggccttgttaaaggcacttgaaggatgcatccaaggacacgaatctctctacagagccggctttcttcatagggacatctcgattaacaat

SEQ ID NO: 6225 - DNA, 3222 bp, Muscodor strobelii
  misc_feature: SGI cDNA ID NO. 561812
  misc_feature: Encodes the peptide sequence at SEQ ID NO 6226
atgactacgatagacaatggcccgtccggcagctctcctgccgcctcgcgctcggcctccccaacgaacaccacccctataactcccgtctccgtctccgaccatgctcctcagcctcaagacccccctcaagactcgccgaagacccaagccgaagacattgcaactaagatattccaattcctctcaacggccactccctccacattcggagccatcggcgtagggttagccgccgtgacatatttcatcctcggtcagatagggctggtgttgattggcgcatttggtggtattgccctgttcgttgcttgggagtctaggaatcccgaggtggcccgcgcagtccacggtgaaaagggctatgtcttgttggatcgactgcttgaggtatcggagagagaacggcccgagaaagggaagacaaacgaggacgaagatgccgcaacgctcgcccacagcttcgacgacttccagcccgtcacccgtgatgccttgtacgaattagtcgacgctgtcatccgcgactatgtggactggtggtatggccctatcgtcccatcggacacgtcgttccctctatcgtgtcgaagagtcttcaccaagttcgtcttgagcttctccaataccctgcgtcgcaagcgccctgccgatgccttcgtcgacttcgtcacccattcatgctccatcatcatcgtcttcttcaccgagatggcatctgcatatgctgagttgcccgtcgatagccacatgacagctgctgatgccatctacaactatctggctactcacaatgatgctcccctgtccaatctcctgaaccagcgacagcaggcagccaagttcaagatggtggctgacgaccttctcggattcttggagaagccgacctatgactgtgacccggccagagcgtttctgcgagaaatcctgtcgaccgtcatcctcgagggaaccttgcagacatgctccaaggctgagtggattaacgcatggatcgtgtatctgctcgaatctggagaaacggatctttcccaggccatagacgaagccatccaggaccagaagacctacggcgacatcgatgggaacgtgggcaatatcgggctgtcgacgggaaatcgtagctcttatgagttgaataggcagcgccgaaaggacatggtgcacaagaagaagctttcgaaagcagacgaggagatggagaaagccatggaagagatgaaacgacttaatgaaatgattgccgaggctgataagaacaagcctgcgcaacagagtggtgttgaggccaacggtcgactgaatgacgcgatgaaagataacgatcaagaattggatttgaacatgaaacggaagccggaaagcttccctgcagaaacgccaaggtcatcaatggcagcatctgatagtgatccgagatcatcccgggatggcggaacagacgagaccaacaagagcggatcgatatcgccaggtgctctgaactcgcaagcgcctagttctaacaacaattcggtaccgcctcagaacgatcctgtgccgcatcagccattcactagtttcgaccagttcgttcctccaggaaaggaggagagcgatgaggtggccccaacgagggcaccaccgctcactatacacaatgcttctatcaatatccatgacgatgggaccgctgataatggtaaactgcgaactaagccaaattgggaatacttggtccaggtcgagcccgcgtcttcctatcactccggctggatggtgatgaaaacatatgcacagttcgagagcttacatgaaagcttgcggcggatcgctacaatctctggtgccatggctttcttagaagcgcactcccagtttccaggatggaatctacacacgagatcttccctacgtggtgagatagagagatacatgcggacagcctgtgctgagaaaccgttagctgaatcagaagctatgaagcgtttcttggacagagcccaagaccccaaaggcggcctgaatcgtgggttttcattcaactcgatgggcaagggaatgatggatgcatttcagaatacgcagaaaggcgctcttgatggtggcaaattagtcatgggtgaaataactggcgtgttcggcaatattggcacactcggcagacgttctacgaatgcttcttcgcaggatatcaaagctcctcagaatggtacgtccaatgggtcgcgaccagtgtctttgcctccagctctgcctccaaggatcgacacaactacgtccatgactggatccagaatgtcaagagacagtttggacagccagagatcgtcaattgtgtccgtgcaaccgggcaagataccgcctatggatcggcgtgccagctatcaaatggacgcggacctggagagctcgttgcatccgtcgcacgctgaccgagaacggaagtcatctctcagcgcagccagtagtcgtgttcatagccgggcatctagtgttggccctgcacgctcgcctctgcgctcgccgtcggagattagtctcagcaacctgaagttacctcctcctccaaatgagatcactgatgactatgattcgcccgtcaggacgaggaccagcacagagagcttttcgaggttcaacgactcttacgtgtctcccacacgtacatctatatcagatcctcaagcccgaccgccccagactaatggcgctcctcccagacgcccggtcaaacacttcctgcctctgtcagaacaggagactcgggtagctgtcgagcttctctttgccgtcatcaacgagctttatactttgtcttcagcctggaatttcaggagaacgctattaacggccgcgaagtctttcttgttacggccgggaaacccatcgctggtctcaatccagtcactcatacagcagtcactgctcgacagtaacacatcagacgatggtcttgcaacacatattcgcaagctgcgggagaactccttgccgaccgaagaagagcgcaaggcatggccggccgaactcacggccgatgagaaagaggagcttcgagtgaaagcgagaaagttgttcattcaaagcagtgttcctgcggcgctcatgggcatcatgggtcagtccgcaactaatgaggcattgggccgtgtcttcgactgcctgcagatagaggaggtggcacgtggtctgatgttcggactcttgctacaggctatcagagtcgtcacgcattaa

SEQ ID NO: 6226 - protein, 1073 aa, Muscodor strobelii
  misc_feature: SGI Peptide ID NO. 561812
  misc_feature (937)..(1055): Pfam Id: PF08628 Pfam Desc: Sorting nexin C terminal
  misc_feature (159)..(341): Pfam Id: PF02194 Pfam Desc: PXA domain
  misc_feature (87)..(1073): NCBI GI: 261352030 Blast Desc: PX domain-containing protein [Verticillium albo-atrum VaMs.102]
  misc_feature (26)..(1073): NCBI GI: 145610961 Blast Desc: MGG_00772 [Magnaporthe grisea 70-15] gi|145018293|gb|EDK02572.1| MGG_00772 [Magnaporthe grisea 70-15]
  misc_feature (52)..(1073): NCBI GI: 85090161 Blast Desc: NCU04585 [Neurospora crassa OR74A] gi|28919631|gb|EAA29050.1| conserved [Neurospora crassa OR74A] gi|28950024|emb|CAD70779.1| conserved [Neurospora crassa]
  misc_feature (56)..(1073): NCBI GI: 156043233 Blast Desc: SS1G_10619 [Sclerotinia sclerotiorum 1980] gi|154695007|gb|EDN94745.1| SS1G_10619 [Sclerotinia sclerotiorum 1980]
  misc_feature (154)..(1073): NCBI GI: 154316444 Blast Desc: BC1G_04153 [Botryotinia fuckeliana B05.10] gi|150845953|gb|EDN21146.1| BC1G_04153 [Botryotinia fuckeliana B05.10]
  misc_feature (36)..(1073): NCBI GI: 189191848 Blast Desc: conserved [Pyrenophora tritici-repentis Pt-1C-BFP] gi|187973869|gb|EDU41368.1| conserved [Pyrenophora tritici-repentis Pt-1C-BFP]
  misc_feature (12)..(1028): NCBI GI: 169623415 Blast Desc: SNOG_14947 [Phaeosphaeria nodorum SN15] gi|160704977|gb|EAT77799.2| SNOG_14947 [Phaeosphaeria nodorum SN15]
  misc_feature (57)..(1073): NCBI GI: 256732143 Blast Desc: [Nectria haematococca mpVI 77-13-4]
  misc_feature (48)..(1073): NCBI GI: 46137343 Blast Desc: FG10187.1 [Gibberella zeae PH-1]
  misc_feature (39)..(1073): NCBI GI: 171691753 Blast Desc: protein product [Podospora anserina] gi|170945825|emb|CAP72625.1| protein product [Podospora anserina]
MTTIDNGPSGSSPAASRSASPTNTTPITPVSVSDHAPQPQDPPQDSPKTQAEDIATKIFQFLSTATPSTFGAIGVGLAAVTYFILGQIGLVLIGAFGGIALFVAWESRNPEVARAVHGEKGYVLLDRLLEVSERERPEKGKTNEDEDAATLAHSFDDFQPVTRDALYELVDAVIRDYVDWWYGPIVPSDTSFPLSCRRVFTKFVLSFSNTLRRKRPADAFVDFVTHSCSIIIVFFTEMASAYAELPVDSHMTAADAIYNYLATHNDAPLSNLLNQRQQAAKFKMVADDLLGFLEKPTYDCDPARAFLREILSTVILEGTLQTCSKAEWINAWIVYLLESGETDLSQAIDEAIQDQKTYGDIDGNVGNIGLSTGNRSSYELNRQRRKDMVHKKKLSKADEEMEKAMEEMKRLNEMIAEADKNKPAQQSGVEANGRLNDAMKDNDQELDLNMKRKPESFPAETPRSSMAASDSDPRSSRDGGTDETNKSGSISPGALNSQAPSSNNNSVPPQNDPVPHQPFTSFDQFVPPGKEESDEVAPTRAPPLTIHNASINIHDDGTADNGKLRTKPNWEYLVQVEPASSYHSGWMVMKTYAQFESLHESLRRIATISGAMAFLEAHSQFPGWNLHTRSSLRGEIERYMRTACAEKPLAESEAMKRFLDRAQDPKGGLNRGFSFNSMGKGMMDAFQNTQKGALDGGKLVMGEITGVFGNIGTLGRRSTNASSQDIKAPQNGTSNGSRPVSLPPALPPRIDTTTSMTGSRMSRDSLDSQRSSIVSVQPGKIPPMDRRASYQMDADLESSLHPSHADRERKSSLSAASSRVHSRASSVGPARSPLRSPSEISLSNLKLPPPPNEITDDYDSPVRTRTSTESFSRFNDSYVSPTRTSISDPQARPPQTNGAPPRRPVKHFLPLSEQETRVAVELLFAVINELYTLSSAWNFRRTLLTAAKSFLLRPGNPSLVSIQSLIQQSLLDSNTSDDGLATHIRKLRENSLPTEEERKAWPAELTADEKEELRVKARKLFIQSSVPAALMGIMGQSATNEALGRVFDCLQIEEVARGLMFGLLLQAIRVVTH

SEQ ID NO: 6227 - DNA, 549 bp, Muscodor strobelii
  misc_feature: SGI cDNA ID NO. 561813
  misc_feature: Encodes the peptide sequence at SEQ ID NO 6228
atgcccggatacaagagccgcaagcgagaggcctcgagcgacgacgacgaggtcgtcaagcccaccaagaagtccaagaccaaggccaagaccgccggtgacgaaggaagagatgatgacggcaatgccttctggcagcttgcaccgatgcgcagactcaccgtctcagacttcaagggcaagacgttcgtcaacatccgagagtactggaccgatcaatccggcgacatgaagccgggcaagaagggcatcatgctcaccatcgagcaatacaccgccatggtcgaagctctccccgccgtcaacgccgaactcgagtctaagggtgtcaaggtccccagcctttcctcctccaagttcaatgccaaacccaaggtcccggtcgtagatgacgacgatgacgatagcgacgcctcggggtcaccgatcaagcccaagtccaaatccaaggagaaggacaagaagcagaagcagaagaaaaagaagatgaacatcgaggccaccagcgacgaagaggaggaggaggagcttgacgatgacgaggaatag

SEQ ID NO: 6228 - protein, 182 aa, Muscodor strobelii
  misc_feature: SGI Peptide ID NO. 561813
  misc_feature (17)..(105): Pfam Id: PF02229 Pfam Desc: Transcriptional Coactivator p15 (PC4)
  misc_feature (1)..(173): NCBI GI: 46137341 Blast Desc: FG10186.1 [Gibberella zeae PH-1]
  misc_feature (5)..(173): NCBI GI: 256731753 Blast Desc: NECHADRAFT_100558 [Nectria haematococca mpVI 77-13-4]
  misc_feature (5)..(171): NCBI GI: 39974147 Blast Desc: [Magnaporthe grisea 70-15] gi|145018284|gb|EDK02563.1| [Magnaporthe grisea 70-15]
  misc_feature (1)..(169): NCBI GI: 171691751 Blast Desc: protein product [Podospora anserina] gi|170945824|emb|CAP72624.1| protein product [Podospora anserina]
  misc_feature (5)..(176): NCBI GI: 67539272 Blast Desc: AN5806.2 [Aspergillus nidulans FGSC A4] gi|40739125|gb|EAA58315.1| AN5806.2 [Aspergillus nidulans FGSC A4] gi|259480040|tpe|CBF70810.1| TPA: RNA polymerase II nidulans
  misc_feature (5)..(176): NCBI GI: 242775903 Blast Desc: RNA polymerase II transcriptional coactivator, [Talaromyces stipitatus ATCC 10500] gi|218722352|gb|EED21770.1| RNA polymerase II transcriptional coactivator, [Talaromyces ATCC
  misc_feature (4)..(113): NCBI GI: 212532551 Blast Desc: RNA polymerase II transcriptional coactivator, [Penicillium marneffei ATCC 18224] gi|210071796|gb|EEA25885.1| RNA polymerase II transcriptional coactivator, [Penicillium ATCC
  misc_feature (1)..(175): NCBI GI: 261352029 Blast Desc: conserved [Verticillium albo-atrum VaMs.102]
  misc_feature (38)..(176): NCBI GI: 121698023 Blast Desc: RNA polymerase II transcriptional coactivator, [Aspergillus clavatus NRRL 1] gi|119395831|gb|EAW06263.1| RNA polymerase II transcriptional coactivator, [Aspergillus clavatus
  misc_feature (38)..(172): NCBI GI: 119480475 Blast Desc: RNA polymerase II transcriptional coactivator, [Neosartorya fischeri NRRL 181] gi|119408420|gb|EAW18369.1| RNA polymerase II transcriptional coactivator, [Neosartorya fischeri
MPGYKSRKREASSDDDEVVKPTKKSKTKAKTAGDEGRDDDGNAFWQLAPMRRLTVSDFKGKTFVNIREYWTDQSGDMKPGKKGIMLTIEQYTAMVEALPAVNAELESKGVKVPSLSSSKFNAKPKVPVVDDDDDDSDASGSPIKPKSKSKEKDKKQKQKKKKMNIEATSDEEEEEELDDDEE

SEQ ID NO: 6229 - DNA, 5560 bp, Muscodor strobelii
  misc_feature: SGI EST ID NO. CUFF.15761.0
  misc_feature: Variant of the nucleotide sequence at SEQ ID NO 6227
cgaaaagaagtcattgtcgagtacagcccgtctgaagtacgactgtttacaatcaacgctaaacgcaatcacgccggcctcacacatgccatcattaggtactcataccgccaagaacgtttgactgcatagtaatagtgcattctgttctcggcatgagaaacacacatcacctgtcgaaattcataccaccacggcaaattcgaaagctagttcttcatatctcagtatgaaacgactaaaagtcgaacatccctctactctaatgtacgtttgctatgtagtgatatctccactataggcgccaatcagctggggcaggggccagccttctttctgctagtgtacataacctcatcccatgaaagttcatgataatacatagtatcgttaatgcgtgacgactctgatagcctgtagcaagagtccgaacatcagaccacgtgccacctcctctatctgcaggcagtcgaagacacggcccaatgcctcattagttgcggactgacccatgatgcccatgagcgccgcaggaacactgctttgaatgaacaactttctcgctttcactcgaagctcctctttctcatcggccgtgagttcggccggccatgccttgcgctcttcttcggtcggcaaggagttctcccgcagcttgcgaatatgtgttgcaagaccatcgtctgatgtgttactgtcgagcagtgactgctgtatgagtgactggattgagaccagcgatgggtttcccggccgtaacaagaaagacttcgcggccgttaatagcgttctcctgaaattccaggctgaagacaaagtataaagctcgttgatgacggcaaagagaagctcgacagctacccgagtctcctgttctgacagaggcaggaagtgtttgaccgggcgtctgggaggagcgccattagtctggggcggtcgggcttgaggatctgatatagatgtacgtgtgggagacacgtaagagtcgttgaacctcgaaaagctctctgtgctggtcctcgtcctgacgggcgaatcatagtcatcagtgatctcatttggaggaggaggtaacttcaggttgctgagactaatctccgacggcgagcgcagaggcgagcgtgcagggccaacactagatgcccggctatgaacacgactactggctgcgctgagagatgacttccgttctcggtcagcgtgcgacggatgcaacgagctctccaggtccgcgtccatttgatagctggcacgccgatccataggcggtatcttgcccggttgcacggacacaattgacgatctctggctgtccaaactgtctcttgacattctggatccagtcatggacgtagttgtgtcgatccttggaggcagagctggaggcaaagacactggtcgcgacccattggacgtaccattctgaggagctttgatatcctgcgaagaagcattcgtagaacgtctgccgagtgtgccaatattgccgaacacgccagttatttcacccatgactaatttgccaccatcaagagcgcctttctgcgtattctgaaatgcatccatcattcccttgcccatcgagttgaatgaaaacccacgattcaggccgcctttggggtcttgggctctgtccaagaaacgcttcatagcttctgattcagctaacggtttctcagcacaggctgtccgcatgtatctctctatctcaccacgtagggaagatctcgtgtgtagattccatcctggaaactgggagtgcgcttctaagaaagccatggcaccagagattgtagcgatccgccgcaagctttcatgtaagctctcgaactgtgcatatgttttcatcaccatccagccggagtgataggaagacgcgggctcgacctggaccaagtattcccaatttggcttagttcgcagtttaccattatcagcggtcccatcgtcatggatattgatagaagcattgtgtatagtgagcggtggtgccctcgttggggccacctcatcgctctcctcctttcctggaggaacgaactggtcgaaactagtgaatggctgatgcggcacaggatcgttctgaggcggtaccgaattgttgttagaactaggcgcttgcgagttcagagcacctggcgatatcgatccgctcttgttggtctcgtctgttccgccatcccgggatgatctcggatcactatcagatgctgccattgatgaccttggcgtttctgcagggaagctttccggcttccgtttcatgttcaaatccaattcttgatcgttatctttcatcgcgtcattcagtcgaccgttggcctcaacaccactctgttgcgcaggcttgttcttatcagcctcggcaatcatttcattaagtcgtttcatctcttccatggctttctccatctcctcgtctgctttcgaaagcttcttcttgtgcaccatgtcctttcggcgctgcctattcaactcataagagctacgatttcccgtcgacagcccgatattgcccacgttcccatcgatgtcgccgtaggtcttctggtcctggatggcttcgtctatggcctgggaaagatccgtttctccagattcgagcagatacacgatccatgcgttaatccactcagccttggagcatgtctgcaaggttccctcgaggatgacggtcgacaggatttctcgcagaaacgctctggccgggtcacagtcataggtcggcttctccaagaatccgagaaggtcgtcagccaccatcttgaacttggctgcctgctgtcgctggttcaggagattggacaggggagcatcattgtgagtagccagatagttgtagatggcatcagcagctgtcatgtggctatcgacgggcaactcagcatatgcagatgccatctcggtgaagaagacgatgatgatggagcatgaatgggtgacgaagtcgacgaaggcatcggcagggcgcttgcgacgcagggtattggagaagctcaagacgaacttggtgaagactcttcgacacgatagagggaacgacgtgtccgatgggacgatagggccataccaccagtccacatagtcgcggatgacagcgtcgactaattcgtacaaggcatcacgggtgacgggctggaagtcgtcgaagctgtgggcgagcgttgcggcatcttcgtcctcgtttgtcttccctttctcgggccgttctctctccgatacctcaagcagtcgatccaacaagacatagcccttttcaccgtggactgcgcgggccacctcgggattcctagactcccaagcaacgaacagggcaataccaccaaatgcgccaatcaacaccagccctatctgaccgaggatgaaatatgtcacggcggctaaccctacgccgatggctccgaatgtggagggagtggccgttgagaggaattggaatatcttagttgcaatgtcttcggcttgggtcttcggcgagtcttgaggggggtcttgaggctgaggagcatggtcggagacggagacgggagttataggggtggtgttcgttggggaggccgagcgcgaggcggcaggagagctgccggacgggccattgtctatcgtagtcattgggaaaggcgcaagatgtcacaagaagttctcagattcggaaggggcggtaatattacaacatgtcaaagacggataggtcggcgggtgacacgggcattagtaaagagtatagtctaaagggccaattaaggaagtatagcaatcaacagtgcgcttagaaagtaattggaatgtcagattgtgaagtggcgccggctagggagaagagaagaatgagagacaggagcacgcgaccagagtcgagttgagaggagttgtatggacaatgggagtagttagatgaattaatgcgattaggggatttggtggtaaatgtggtgtcttggtggtgtggcgcatccctcacatccgcgcaatcctgcgatcccacctctaccaaggtagctgcgacagacaacccgcaccagcaaaccagaattcgactaatctaataatatcctttaggagaataaagtctagcctcattgctagcggagtggatctgcctgtcccgtccttcccttcctctgcccttcgtttcgaaactcgaaactgccaatctcaacagatttcaacgcttggagaaggaatacccggagcgcactagacccaatccaggtcaattaaatctgtatttgccctggctgccggcttctgtccgcgcgagcgcccaggtcttggattcaagccaacccagcgagccggctcattgggtgcgtgcaccaggtacaggtacctaagacaaggcgcgtctcactcaagccatcaaccgcgtctaaacccctccataactccttcctgctccaagcacatccttgcaacgcaacacctcatctactctttgtatacaactataacaataactgcaattgcagctcctggcatttgtccacacaagcctacactacgcaaccatgcccggatacaagagccgcaagcgagaggcctcgagcgacgacgacgaggtcgtcaagcccaccaagaagtccaagaccaaggccaagaccgccggtgacgaaggaagagatgatgacggcaatgccttctggcaggtatgcacatctcgcgctagagccatattatggtctctcttttctcttgctgatttgcaatgcgaacagcttgcaccgatgcgcagactcaccgtctcagacttcaagggcaagacgttcgtcaacatccgagagtactggaccgatcaatccggcgacatgaagccgggcaagaagggcatcatgctcaccatcgagcaatacaccgccatggtcgaagctctccccgccgtcaacgccgaactcgagtctaagggtgtcaaggtccccagcctttcctcctccaagttcaatgccaaacccaaggtcccggtcgtagatgacgacgatgacgatagcgacgcctcggggtcaccgatcaagcccaagtccaaatccaaggagaaggacaagaagcagaagcagaagaaaaagaagatgaacatcgaggccaccagcgacgaagaggaggaggaggagcttgacgatgacgaggaataggtcactccgtctcgtagacctaaccttctttggaatggccgccgggcttgactcgcgtaccatttgtgtacaatacgtgctcttggcgttgctggatagcatggtttcttgacattctttcaggcgcgagaatgtcagcggatatgatgcaaagaatgagagtaagattctgtgccatatttgtggctgtaaatgagagaacaggtccaacacaggggtttcgacctcaagacaatcagtcattcaaaagtgattagcaactaactccaattgataccctttgcttcaactcatgcctaatgctaatgatctaaactcgctgcatgtgctttcatgatactacagatatttgatcgctgtccaaactgcgtcagagtcaagttgttgcaacgggctacacatcacaatcgaacatgatatcgttcaattcttga

SEQ ID NO: 6230 - DNA, 417 bp, Muscodor strobelii
  misc_feature: SGI cDNA ID NO. 561814
  misc_feature: Encodes the peptide sequence at SEQ ID NO 6231
atggtggccaaccccatggatcccaaagccatgcccaacactttgcaatcccaggacatcagcagagaaatcttgaacgcgttgcccgatatgaaaagacggctcttcgacccaaacatgcatcagggcccttcgcaagttgtgtctagtgacgaaaacacagatgtgaagtatctatcaccattgcaagtcgaggaacaacaacgcatgttggagcaaaagctgaagcaacggttgtggccacaatcgcaagaagaacttgatagaggagacaaggaggccgagaagaaagaagccgggaagcagtccagccaagcaaatgacaatcccgaagctccgccaccggccccagcatatagattgccatctgaagaatatgacccccaattcccccgggggaggatagaggaattctag

SEQ ID NO: 6231 - protein, 138 aa, Muscodor strobelii
  misc_feature: SGI Peptide ID NO. 561814
MVANPMDPKAMPNTLQSQDISREILNALPDMKRRLFDPNMHQGPSQVVSSDENTDVKYLSPLQVEEQQRMLEQKLKQRLWPQSQEELDRGDKEAEKKEAGKQSSQANDNPEAPPPAPAYRLPSEEYDPQFPRGRIEEF

SEQ ID NO: 6232 - DNA, 3068 bp, Muscodor strobelii
  misc_feature: SGI EST ID NO. CUFF.15688.0
  misc_feature: Variant of the nucleotide sequence at SEQ ID NO 6230
gtttgaagctctttcattcctagacgaggtcagatttggtgagattcaaattgacgacgatgataaggacgcggaaacactcgaaattgccgcagacgtgggagacattgttggttgtttattgagactttctacgtctattaggaatcctgccccacatgaccattacatgtcgtctaagtccatcgacacatcgtatttcgaggactatgacattgagcatgtcaaatcgaagctttcaaatatagatagcgcattggcgacacgactggggaaagcaatatcgcaaaggcgacagtactttaagtatcgagaatcgcatcgtcagaaacttagccaagggcttttgaaccaagacccagccaaatccgaggctggaggtctgagtacagtcgcatcttcaattccattggcactgaaggacacgaaaacaaatgacccctcatttgcgatccgtgatgaggacgaagagtccagctctggcgcctcccagacatcatatgcgacttctgggcctgcttctgggcgcctcaagatgcccccgcttcctgaccaggcatcacaagggccatttgagtgcccatactgctacatgatcatatcagtcgacacgacaatacagtggaaaaaacatgtcagtgccgatttgagaccttacatatgtctcgagctagactgcccatatcctgagcagcaatatataaagcgacacgactggcttgatcatttaagtcagaagcactggcaactattcaaatgcccttacagctgccaagacgagaagttcatattagcgagcgaactagaacatcacattcgtcacttacatccagaacttacatctcagcgagacattgggatggttttagatttctgcaaggaaccgagaccgtggccgaatcgagttccctgtcccctctgcgagcagacattacactctaaacaggaatatggtcgtcacgtggggcgacaccagactgaactggctttgttcgccctaccgaataattccgaagacgccaatgaaagtgacggcacgagcaagaatggagaaaccgatgacgaaaacaagtcgacttattctgaaagctccaacgttcaatatggccctcggatgatcttccaattcatggacgaacgtttcaaggctttcgtagagtcggaaaatatcccattggactccgaatcggcgatagcaggccgagttgtgaatttagtgcatctattttatcttgtcgtcacacagtttgaaggatacagcaacgtatgccaccgagacttgtggatcggcgtggcagactggtttggtattccatcggagagaatcagcgaggcagcgagagagctgaaagctatttatgaacgagatctggtcagccacgaaacagcatggtggcagtcacaaggggttggagtcttcagcattgttgaagatcgcaattcaggcaccgatcctgagctgtccacagacgaccctgaaatacgaagtacggttgcggaacaagacgacgatcgtgacaacgaagaaaatcgtggaagaactcttccaagcacctgcgatcgttgtcttgaacgtgttcaacagtgtgacggaaacacaccatgccagaactgtatttggggtgaagccgaatgccgtcgttcaatgaactatgtgtgcgacgagtgcggacgacgtttcgaccagatccataaactgaatcatcacaaacgatatcacgatcgctcgcatgcatgtgattgggccggttgcgataaaaggtttgggactcgaactcaccttgatcggcacattaatgacaaacacctgaagaaggcgtcatatcactgcgcagagccgagctgtccatactttaaggggggaaagactttccccagaaaggacaactggagacgacatatgatcaaaaagcatggctggacggtacagtcattcgacgagttcgaagaatcgcaaaacgcaccatcagctccatatccgaaaccacgtactagacaacccgacgtcactgcgtcaaatgaacctgccgccccttctccaacctccggcgcaccgcctgacaacatggtggccaaccccatggatcccaaagccatgcccaacactttgcaatcccaggacatcagcagagaaatcttgaacgcgttgcccgatatgaaaagacggctcttcgacccaaacatgcatcagggcccttcgcaagttgtgtctagtgacgaaaacacagatgtgaagtatctatcaccattgcaagtcgaggaacaacaacgcatgttggagcaaaagctgaagcaacggttgtggccacaatcgcaagaagaacttgatagaggagacaaggaggccgagaagaaagaagccgggaagcagtccagccaagcaaatgacaatcccgaagctccgccaccggccccagcatatagattgccatctgaagaatatgacccccaattcccccgggggaggatagaggaattctagtctctctgaacaaaatagccccttcatatgtaattctgccagtcatataactatctcctcaggcaccccctccctattttcaccacagccaaattctcctcagtgataaacggcttatcaaaacgccagcatcaatgaacgcacggtcctacagcttacatataatagtcacattattcgtgaggacacgagctcaagatttctaattctacacatcagaatacgcgaactgcgctttcgagactggctaagcaaatatgttgcggttggctgagccgttgatgtcggcgattgttgcaagagcgtctgcatgtgagaactgtctggaggccgcagcgtcgaaggcgacgaaagctttaattatgagaaagcattcatcgttgagaggagatgtataatatgctcgggaacgaaggggttaaaggaagggtaccgatgagttcaatagaatcgatcgttacggaataacgagggcgtcagatgtgcatcatgcggatttcttatctcaagtattttgcagagcttgaaatggacattggagtcttagttacatacatataaacatctactgcgttggcactcgaat

SEQ ID NO: 6233 - DNA, 1824 bp, Muscodor strobelii
  misc_feature: SGI cDNA ID NO. 561815
  misc_feature: Encodes the peptide sequence at SEQ ID NO 6234
atgtctggtatcgaagtcgctggacttgttctaggagccattccactcctcatcacagcgctagaacattttcatgatggcaaaagcgctgtttccacattccgacgacacgtaagggtgattcaaagcctcactcgcaatctcaaaacggagcatggcaagatgtacaatacgtgcgaaacgcttctcggcggcatcgttgcccctaccaagattgaaccaatgctcaaggaaccgtttggaccattgtggcatgacaaggatacatcggctcggatcgagaagaggctcgatcatatgtttcacactttcgaggaaactgtcaaggatatgttgtctattatcgaggagctgaaaaggaacttaggccttgattctgagggtcagttcgacgtgtccatgggcggcacggtcaaacgcaacgtgatgcgggcttccctcgtcattaagcggtcttcgtatgaagaagcattacaagacttaattactaagaatcaaactcttgagacgattgtcattggcagtttacgacttgagccaagccgccagaaacgatctcgtgggaagtatctggacttgttccggaaggtgttgagcaatatctatagggcaatccacctggggctttgtgatcacggtccgcttggacacgaattgagcttgcaacttgtctctccacaactgtgtctacgaggcgacgaagagaatgcgatcaagaaagtagcctttcgtgtgatcctttctcatcacgctccagatttcgacgatgtcagcctttggcctcggatctggaaatggagagaggtaagcttgcgtgtagacgatctgccattgccactaacgaagaatcttgttcatcatccaagatctcctatcgaagaagggtttcgtaaaagcaaacgggtgaagttctctgacccaagcacgagtctcaacatagttcgtgctgttgaaagagacaaaccagataccgtcaatcccgcacttatcatgctaccaccaaaatctgcgcctggaagattgtgccaggctcttagcatagggtcactaagtccaattatctgcggatatgtggacgatccatcagcacagacgtttagcagatttggggtttcttctgttaacgagagctgcgacaatcgcaacttgtcttttgtatccatccgagaaatgatggcggctcatccataccagcgacacctcagtaccccatccttgcctgagaaactttccatagcttctgctgttgcctctgctgttctacagctgcacaacacaccatggctatcaagatcgataacaagccacacgttgtattttgcgcagttcgatgagattgcgtgtttcagtcaagtatacatctccaatgtcaagcaggatggctgtcaacatgaacctcgctgctctggtgcgtgtggcgttggcggaaatgtaataagccaaatgggaaacgagctcatgtgggctttgtttattcttctcacggagatcattctctggaatccaatggacaacatcttgtccggccgattctccgctaatctagcgcgagacttgccgagtcaggttttcgactacacaacggaagaagggttctgcagagtacgagaaatactcagcaaggttgcaatggtcggcggccaagaatactgcagcgcagtcgaatgctgcttgaagcttgcattcagttatcccagactagacctggaacaggaagagcttagacagcagatatttgccgatatcgcgacccctattgaagcgagctgggagagttcaaaaacactaaccatcatgcaaggtggctttggcgttaaatattga

SEQ ID NO: 6234 - protein, 607 aa, Muscodor strobelii
  misc_feature: SGI Peptide ID NO. 561815
  misc_feature (1)..(594): NCBI GI: 256734980 Blast Desc: NECHADRAFT_90584 [Nectria haematococca mpVI 77-13-4]
  misc_feature (1)..(594): NCBI GI: 46137989 Blast Desc: FG10509.1 [Gibberella zeae PH-1]
  misc_feature (1)..(587): NCBI GI: 169615082 Blast Desc: SNOG_10696 [Phaeosphaeria nodorum SN15] gi|111060970|gb|EAT82090.1| SNOG_10696 [Phaeosphaeria nodorum SN15]
  misc_feature (1)..(206): NCBI GI: 256724298 Blast Desc: NECHADRAFT_53534 [Nectria haematococca mpVI 77-13-4]
  misc_feature (1)..(179): NCBI GI: 119196583 Blast Desc: CIMG_02666 [Coccidioides immitis RS]
  misc_feature (95)..(587): NCBI GI: 164422634 Blast Desc: NCU09957 [Neurospora crassa OR74A] gi|157069754|gb|EAA29228.2| [Neurospora crassa OR74A]
  misc_feature (75)..(587): NCBI GI: 46139091 Blast Desc: FG11060.1 [Gibberella zeae PH-1]
  misc_feature (1)..(305): NCBI GI: 169597841 Blast Desc: SNOG_01711 [Phaeosphaeria nodorum SN15] gi|111070240|gb|EAT91360.1| SNOG_01711 [Phaeosphaeria nodorum SN15]
  misc_feature (1)..(442): NCBI GI: 242795329 Blast Desc: conserved [Talaromyces stipitatus ATCC 10500] gi|218719151|gb|EED18571.1| conserved [Talaromyces stipitatus ATCC 10500]
  misc_feature (1)..(591): NCBI GI: 189198668 Blast Desc: [Pyrenophora tritici-repentis Pt-1C-BFP] gi|187982770|gb|EDU48258.1| [Pyrenophora tritici-repentis Pt-1C-BFP]
MSGIEVAGLVLGAIPLLITALEHFHDGKSAVSTFRRHVRVIQSLTRNLKTEHGKMYNTCETLLGGIVAPTKIEPMLKEPFGPLWHDKDTSARIEKRLDHMFHTFEETVKDMLSIIEELKRNLGLDSEGQFDVSMGGTVKRNVMRASLVIKRSSYEEALQDLITKNQTLETIVIGSLRLEPSRQKRSRGKYLDLFRKVLSNIYRAIHLGLCDHGPLGHELSLQLVSPQLCLRGDEENAIKKVAFRVILSHHAPDFDDVSLWPRIWKWREVSLRVDDLPLPLTKNLVHHPRSPIEEGFRKSKRVKFSDPSTSLNIVRAVERDKPDTVNPALIMLPPKSAPGRLCQALSIGSLSPIICGYVDDPSAQTFSRFGVSSVNESCDNRNLSFVSIREMMAAHPYQRHLSTPSLPEKLSIASAVASAVLQLHNTPWLSRSITSHTLYFAQFDEIACFSQVYISNVKQDGCQHEPRCSGACGVGGNVISQMGNELMWALFILLTEIILWNPMDNILSGRFSANLARDLPSQVFDYTTEEGFCRVREILSKVAMVGGQEYCSAVECCLKLAFSYPRLDLEQEELRQQIFADIATPIEASWESSKTLTIMQGGFGVKY

SEQ ID NO: 6235 - DNA, 2276 bp, Muscodor strobelii
  misc_feature: SGI EST ID NO. CUFF.15696.1
  misc_feature: Variant of the nucleotide sequence at SEQ ID NO 6233
ggaaacgatccactctacgacaacagccgccgtgtcgcatgttacatgcatgctgacttcttgaagacaccaatctcaatcttttggctgcaaagcgttatggctatcgcaacatccgctatcctcacacaatgtctggtatcgaagtcgctggacttgttctaggagccattccactcctcatcacagcgctagaacattttcatgatggcaaaagcgctgtttccacattccgacgacacgtaagggtgattcaaagcctcactcgcaatctcaaaacggagcatggcaagatgtacaatacgtgcgaaacgcttctcggcggcatcgttgcccctaccaagattgaaccaatgctcaaggaaccgtttggaccattgtggcatgacaaggatacatcggctcggatcgagaagaggctcgatcatatgtttcacactttcgaggaaactgtcaaggatatgttgtctattatcgaggagctgaaaaggaacttaggccttgattctgagggtcagttcgacgtgtccatgggcggcacggtcaaacgcaacgtgatgcgggcttccctcgtcattaagcggtcttcgtatgaagaagcattacaagacttaattactaagaatcaaactcttgagacgattgtcattggcagtttacgacttgagccaagccgccagaaacgatctcgtgggaagtatctggacttgttccggaaggtgttgagcaatatctatagggcaatccacctggggctttgtgatcacggtccgcttggacacgaattgagcttgcaacttgtctctccacaactgtgtctacgaggcgacgaagagaatgcgatcaagaaagtagcctttcgtgtgatcctttctcatcacgctccagatttcgacgatgtcagcctttggcctcggatctggaaatggagagaggtaagcttgcgtgtagacgatctgccattgccactaacgaagaatcttgttcatcatccaagatctcctatcgaagaagggtttcgtaaaagcaaacgggtgaagttctctgacccaagcacgagtctcaacatagttcgtgctgttgaaagagacaaaccagataccgtcaatcccgcacttatcatgctaccaccaaaatctgcgcctggaagattgtgccaggctcttagcatagggtcactaagtccaattatctgcggatatgtggacgatccatcagcacagacgtttagcagatttggggtttcttctgttaacgagagctgcgacaatcgcaacttgtcttttgtatccatccgagaaatgatggcggctcatccataccagcgacacctcagtaccccatccttgcctgagaaactttccatagcttctgctgttgcctctgctgttctacagctgcacaacacaccatggctatcaagatcgataacaagccacacgttgtattttgcgcagttcgatgagattgcgtgtttcagtcaagtatacatctccaatgtcaagcaggatggctgtcaacatgaacctcgctgctctggtgcgtgtggcgttggcggaaatgtaataagccaaatgggaaacgagctcatgtgggctttgtttattcttctcacggagatcattctctggaatccaatggacaacatcttgtccggccgattctccgctaatctagcgcgagacttgccgagtcaggttttcgactacacaacggaagaagggttctgcagagtacgagaaatactcagcaaggttgcaatggtcggcggccaagaatactgcagcgcagtcgaatgctgcttgaagcttgcattcagttatcccagactagacctggaacaggaagagcttagacagcagatatttgccgatatcgcgacccctattgaagcgagctgggagagttcaaaaacactaaccatcatgcaaggtggctttggcgttaaatattgattgaatagcactattaattcattgagaacataaacgacaagaattactctggtatccaaataaatcatgtcgatttttctcgtatttatgagcgtttgcctagatgtgttcttcgactatagtaccgttgttgattgattgcaatgatgtcttgccgattaagctattgtcccgaaggacgaatggtacagtggatattccagtatacgtccgaccactgtcgtttctgatcagaactgagtgcggaaccaaagccttctactctacgagctccagggtagggagctggcgaggctggctcttcatagtaatctactcctg

SEQ ID NO: 6236 - DNA, 4092 bp, Muscodor strobelii
  misc_feature: SGI cDNA ID NO. 561816
  misc_feature: Encodes the peptide sequence at SEQ ID NO 6237
atgggctctattagtcaatcggggcgcggagtccgcatcgccatagatcgtggtggtacgttcactgactgcgttgggacactgggcgacaaagatgttgtcatcaaacttctctcggaagacccggcgaactacgacgatgcgccacttgagggaatcaggcgcatcatgagccatttcaaaagcaaagatataccccgaggcaaggccctagacacgtctgatatcgaaagtatacggatgggcacaacggtagcaacaaacgctctactagaacgcaagggcgagaagatagctcttgttgtcacgaagggcttcaaggactgtctgacaattggcaaccagagccggcccaagatttttgatctagctatcaagaagccagacgtattatatgaggcagtggtggagatagacgagagagtcacgcttgaagattacgctgaagacccatacaggaatataacgaaatcagatgtcaaagctagtacacaagaagccgggacagccgatctagtaacggggctatcaggcgaaaccgtgcgtgtacttcggcgcccagaggaaatggtaataaaagatcaactgaagagcatacatgataaaggcatccgcagtattgccgtctgcttgatgcatggttacaccttcccaaatcatgaagctcttgtcggaaaaatcgccaaagaagtcggctttgagcacatctcgctcagccataagctgatgccgatgatcaaacttgtgtcgcgtgcgacaagcgtgtgcgctgatgcgtatctgacacccgctatcaagaagtatatcgccggtttccaaaagggcttcaaaggtggcctgggcacgaagagcgttatgaaagagcaaggagatagaggggcacgatgcgagttcatgcagagtgatggcgggcttgtcgatgtggaaaaattcacagggcttaaagctatcttatccggccctgcaggtggtgtagtggggtatgcaataacgagttatgatgaggaaacgaagatccccgtcatcgggttcgacatgggtggcaccagcacagacgtttcaagatacggtgagggaagatatgagcatgtctttgaaacgacaacagctggtgtcacgatccaatccccacagctcgatataaacacggttgccgccggaggtggcagtcgattgttcttcaagaatggtctcttcgtcgtcgggccagagtctgcgggtgcacatcctgggccggcatgttatcgcaaaggtggtcctgctgcggttactgatgctaatctgtttctggggcggctcttgccagagttcttcccgaagatatttggcaaaaatgaggatgagggtctggactacgaagcaagtagaagggtcatccaagagcttgccgagcagattaaggaagagacggggaaagacatgaccttagacgaagtagcgtatggtttcttgacaattgcaaatgaggcgatgacgagacctatcaggtcgatcacggaagctaaagggcatgactcttcaaagcatcggctcgcgacgttcggtggagcaggcggtcaacatgccgtggctattgcacaagccctgggtatcaagcagatacttgtgcaccggtattcgtccgtactgtcagcatatggcatggccttagcagacgtggtcgatgaaagacaagagcctgagtcgaaggtctggtacgacaagggagaagttgtcgaggaattaaggacaaaaatggagaaacttaaagagaagtcaagacaagctcttcatgaccaaggattcaaagatgaagagattgttttcgaagaatacctgaacatgcgctaccgaggtacagaatccgcccttatgattgtcaggcccagcgaggaggatgcaaaggcgatattcaatggcgaagagtgggccttcggaaaagcgttcgtgaaacaccaccgctatgagttcggattcacactcgacgatagagatatcatcgtcgacgatgtgcgcgtacgtggcataggcaagagtttcacgtaccaggacaagactgtcgaccagcagctcaaggaagtcaagcgcttgtcagttggcgataagaaagctcatggatcatctcaagtgtattttgaaggtggccggctggagactccgatatataagctagaagacttggacgttggtgatgagatcagcggccctgccatgctagccgatggaacccaaactattgttgttacgccaaacgcgaaggctctcattctgaaaacacatgttgtcatcgacctaaacacagagagcaaagaaggagcggaaaagaacagatcagggggtcgtgaggtggatcccatcatgcttagtatcttcggccatcgtttcatggccattgctgagcagatggggagagcgcttcagaagacaagtgtcagcacgaacgtcaaagagcggctcgatttctcatgtgcaatcttcgatgccaatggtggattggtcgcgaatgcaccacatctacctgtgcacttaggatctatgtcgacatgcgtgagaacacaagccaaaatatgggaaggaaagcttaagaaaggcgatgtgatcatatccaatcacccttcctacggcggcacacatcttccagatatcaccctcttaatgcctgccttcgatggcaagggagataacatcctcttctatgcagcttctcgtgcccatcacgccgatatcggcggcattactgctggtagcatgccgcctcattcacgagagttgttccaggaaggtgcggcaatcaagagtgaaaaaattgtcagcgagggaaaattcgacgaggatagaattacagacctcctctacaaggagcctgcacagtacacaggatgcagtggcacgcggtgcttggcagacaatatcaatgacctccgggcgcaggtgtctgccaatcaaaaggggatttctctcatcgagaatctcattcaagaatatggagaagagacagttcagttctacatggtcaacattcagaacaatgcagaacaatgcgtgcgtacgctgctgaaacaagtctacaagcgcttcgaaggcaaggatctttcagctgtagattacatggatgatggaacgccaatcaagctgcgcgtgacaattgacgctgagaaaggcgaggcagtcttcgactttaatggcacaggtccgcaggtctacggtaacatcaatgcgcccgaagcagtgtcatatagtgctatcatctactgtctgcgttgtctaatctcagaggacatacccctgaatcaaggttgtctgaaaccgattcatgtcaagattccaccgaagtcattactctcgccatcgacaggagccgctgtcgttgggggcaacgtgctcacaagtcaacgtgtcacggacgttattttcaaggcatttgaagcttgcgctgctagccagggagactgtaacaaccttactttcggatttggtggcaacctatcaggagaggcggaggtgaaaggcttcggctattacgagaccattgctggaggctcaggtgccggaccaacgtgggagggtacaagcggtgttcatactcacatgacaaacactcgtattaccgattcggaagtctttgagcgacgataccctgtcatcctcagggagttctcaatcagagagggttctggtggcaaaggccagcataagggtggtgatggagtagtgagagacatcgagttccgcattccggtccaggtctccatcctcagcgaaaggcgtgtgtatcacccatatggtctcgcaggcggtgaggacgcagcttgtggcctcaatgtctgggttcgaagggtcgcgaagagcgatcctgagaaagaccttgctgctcacggccgtcgcaagagcgaaaacgttgagcagattgagtacgaagaacgtcacataagcatgggtgcaaagaacacggctccaatgaaaccaggagacaggatcatcgtaaatacacctggcggaggtggatggggtcctgtgggtggggataagaaagtaggttctggaagggatcacactgaggcatggcgaaagggaagtcatgctgccagagaggatatggcactgcaggcttag

SEQ ID NO: 6237 - protein, 1363 aa, Muscodor strobelii
  misc_feature: SGI Peptide ID NO. 561816
  misc_feature (12)..(232): Pfam Id: PF05378 Pfam Desc: Hydantoinase/oxoprolinase N-terminal region
  misc_feature (251)..(557): Pfam Id: PF01968 Pfam Desc: Hydantoinase/oxoprolinase
  misc_feature (776)..(1338): Pfam Id: PF02538 Pfam Desc: Hydantoinase B/oxoprolinase
  misc_feature (776)..(1272): Pfam Id: PF02538 Pfam Desc: Hydantoinase B/oxoprolinase
  misc_feature (1299)..(1338): Pfam Id: PF02538 Pfam Desc: Hydantoinase B/oxoprolinase
  misc_feature (1)..(1363): NCBI GI: 39974165 Blast Desc: MGG_00771 [Magnaporthe grisea 70-15] gi|145018294|gb|EDK02573.1| MGG_00771 [Magnaporthe grisea 70-15]
  misc_feature (9)..(1363): NCBI GI: 256732133 Blast Desc: [Nectria haematococca mpVI 77-13-4]
  misc_feature (1)..(1363): NCBI GI: 46137375 Blast Desc: FG10203.1 [Gibberella zeae PH-1]
  misc_feature (1)..(1363): NCBI GI: 28950008 Blast Desc: related to 5-oxoprolinase [Neurospora crassa]
  misc_feature (10)..(1362): NCBI GI: 171691733 Blast Desc: protein product [Podospora anserina] gi|170945815|emb|CAP72615.1| protein product [Podospora anserina]
  misc_feature (1)..(1363): NCBI GI: 154310096 Blast Desc: BC1G_06968 [Botryotinia fuckeliana B05.10] gi|150851529|gb|EDN26722.1| BC1G_06968 [Botryotinia fuckeliana B05.10]
  misc_feature (1)..(1363): NCBI GI: 156043185 Blast Desc: SS1G_10595 [Sclerotinia sclerotiorum 1980] gi|154694983|gb|EDN94721.1| SS1G_10595 [Sclerotinia sclerotiorum 1980]
  misc_feature (3)..(1358): NCBI GI: 226293692 Blast Desc: 5-oxoprolinase [Paracoccidioides brasiliensis Pb18]
  misc_feature (9)..(1356): NCBI GI: 239606517 Blast Desc: 5-oxoprolinase [Ajellomyces dermatitidis ER-3]
  misc_feature (9)..(1356): NCBI GI: 261197089 Blast Desc: 5-oxoprolinase [Ajellomyces dermatitidis SLH14081] gi|239595577|gb|EEQ78158.1| 5-oxoprolinase [Ajellomyces dermatitidis SLH14081]
  misc_feature (5)..(1323): SWISSPROT Homolog: EC 3.5.2.9 5-oxoprolinase (ATP-hydrolyzing)
MGSISQSGRGVRIAIDRGGTFTDCVGTLGDKDVVIKLLSEDPANYDDAPLEGIRRIMSHFKSKDIPRGKALDTSDIESIRMGTTVATNALLERKGEKIALVVTKGFKDCLTIGNQSRPKIFDLAIKKPDVLYEAVVEIDERVTLEDYAEDPYRNITKSDVKASTQEAGTADLVTGLSGETVRVLRRPEEMVIKDQLKSIHDKGIRSIAVCLMHGYTFPNHEALVGKIAKEVGFEHISLSHKLMPMIKLVSRATSVCADAYLTPAIKKYIAGFQKGFKGGLGTKSVMKEQGDRGARCEFMQSDGGLVDVEKFTGLKAILSGPAGGVVGYAITSYDEETKIPVIGFDMGGTSTDVSRYGEGRYEHVFETTTAGVTIQSPQLDINTVAAGGGSRLFFKNGLFVVGPESAGAHPGPACYRKGGPAAVTDANLFLGRLLPEFFPKIFGKNEDEGLDYEASRRVIQELAEQIKEETGKDMTLDEVAYGFLTIANEAMTRPIRSITEAKGHDSSKHRLATFGGAGGQHAVAIAQALGIKQILVHRYSSVLSAYGMALADVVDERQEPESKVWYDKGEVVEELRTKMEKLKEKSRQALHDQGFKDEEIVFEEYLNMRYRGTESALMIVRPSEEDAKAIFNGEEWAFGKAFVKHHRYEFGFTLDDRDIIVDDVRVRGIGKSFTYQDKTVDQQLKEVKRLSVGDKKAHGSSQVYFEGGRLETPIYKLEDLDVGDEISGPAMLADGTQTIVVTPNAKALILKTHVVIDLNTESKEGAEKNRSGGREVDPIMLSIFGHRFMAIAEQMGRALQKTSVSTNVKERLDFSCAIFDANGGLVANAPHLPVHLGSMSTCVRTQAKIWEGKLKKGDVIISNHPSYGGTHLPDITLLMPAFDGKGDNILFYAASRAHHADIGGITAGSMPPHSRELFQEGAAIKSEKIVSEGKFDEDRITDLLYKEPAQYTGCSGTRCLADNINDLRAQVSANQKGISLIENLIQEYGEETVQFYMVNIQNNAEQCVRTLLKQVYKRFEGKDLSAVDYMDDGTPIKLRVTIDAEKGEAVFDFNGTGPQVYGNINAPEAVSYSAIIYCLRCLISEDIPLNQGCLKPIHVKIPPKSLLSPSTGAAVVGGNVLTSQRVTDVIFKAFEACAASQGDCNNLTFGFGGNLSGEAEVKGFGYYETIAGGSGAGPTWEGTSGVHTHMTNTRITDSEVFERRYPVILREFSIREGSGGKGQHKGGDGVVRDIEFRIPVQVSILSERRVYHPYGLAGGEDAACGLNVWVRRVAKSDPEKDLAAHGRRKSENVEQIEYEERHISMGAKNTAPMKPGDRIIVNTPGGGGWGPVGGDKKVGSGRDHTEAWRKGSHAAREDMALQA

SEQ ID NO: 6238 - DNA, 4616 bp, Muscodor strobelii
  misc_feature: SGI EST ID NO. CUFF.15702.0
  misc_feature: Variant of the nucleotide sequence at SEQ ID NO 6236
agcggggttcattggggggtggtggggttggacctagatgacggcattggtaagctatcggagcatcggtaaatggcgggcactattcccatcactcgtgagaatatcgtagaagctggtaatagcacttcatttttatttatttttgggttttccttcatcaggtggtctcccgactccgttagacggcaatagagccttgctagaccgctcaaccacttcgaacagtcggaaggtcttgtcagaagagccgatacctaaatatctccgccttacccaaacatcaacactttaatgacacggattcatgcctattgtgcacactcacttcggcttcattcttggtaacataatggtccctgagtgattattctagatcgagcaatttactttattgcatcacttcattaccctcgtttccatatataacagatcttatcaataccgtcgcaatgggctctattagtcaatcggggcgcggagtccgcatcgccatagatcgtggtggtacgttcactgactgcgttgggacactgggcgacaaagatgttgtcatcaaacttctctcggaagacccggcgaactacgacgatgcgccacttgagggaatcaggcgcatcatgagccatttcaaaagcaaagatataccccgaggcaaggccctagacacgtctgatatcgaaagtatacggatgggcacaacggtagcaacaaacgctctactagaacgcaagggcgagaagatagctcttgttgtcacgaagggcttcaaggactgtctgacaattggcaaccagagccggcccaagatttttgatctagctatcaagaagccagacgtattatatgaggcagtggtggagatagacgagagagtcacgcttgaagattacgctgaagacccatacaggaatataacgaaatcagatgtcaaagctagtacacaagaagccgggacagccgatctagtaacggggctatcaggcgaaaccgtgcgtgtacttcggcgcccagaggaaatggtaataaaagatcaactgaagagcatacatgataaaggcatccgcagtattgccgtctgcttgatgcatggttacaccttcccaaatcatgaagctcttgtcggaaaaatcgccaaagaagtcggctttgagcacatctcgctcagccataagctgatgccgatgatcaaacttgtgtcgcgtgcgacaagcgtgtgcgctgatgcgtatctgacacccgctatcaagaagtatatcgccggtttccaaaagggcttcaaaggtggcctgggcacgaagagcgttatgaaagagcaaggagatagaggggcacgatgcgagttcatgcagagtgatggcgggcttgtcgatgtggaaaaattcacagggcttaaagctatcttatccggccctgcaggtggtgtagtggggtatgcaataacgagttatgatgaggaaacgaagatccccgtcatcgggttcgacatgggtggcaccagcacagacgtttcaagatacggtgagggaagatatgagcatgtctttgaaacgacaacagctggtgtcacgatccaatccccacagctcgatataaacacggttgccgccggaggtggcagtcgattgttcttcaagaatggtctcttcgtcgtcgggccagagtctgcgggtgcacatcctgggccggcatgttatcgcaaaggtggtcctgctgcggttactgatgctaatctgtttctggggcggctcttgccagagttcttcccgaagatatttggcaaaaatgaggatgagggtctggactacgaagcaagtagaagggtcatccaagagcttgccgagcagattaaggaagagacggggaaagacatgaccttagacgaagtagcgtatggtttcttgacaattgcaaatgaggcgatgacgagacctatcaggtcgatcacggaagctaaagggcatgactcttcaaagcatcggctcgcgacgttcggtggagcaggcggtcaacatgccgtggctattgcacaagccctgggtatcaagcagatacttgtgcaccggtattcgtccgtactgtcagcatatggcatggccttagcagacgtggtcgatgaaagacaagagcctgagtcgaaggtctggtacgacaagggagaagttgtcgaggaattaaggacaaaaatggagaaacttaaagagaagtcaagacaagctcttcatgaccaaggattcaaagatgaagagattgttttcgaagaatacctgaacatgcgctaccgaggtacagaatccgcccttatgattgtcaggcccagcgaggaggatgcaaaggcgatattcaatggcgaagagtgggccttcggaaaagcgttcgtgaaacaccaccgctatgagttcggattcacactcgacgatagagatatcatcgtcgacgatgtgcgcgtacgtggcataggcaagagtttcacgtaccaggacaagactgtcgaccagcagctcaaggaagtcaagcgcttgtcagttggcgataagaaagctcatggatcatctcaagtgtattttgaaggtggccggctggagactccgatatataagctagaagacttggacgttggtgatgagatcagcggccctgccatgctagccgatggaacccaaactattgttgttacgccaaacgcgaaggctctcattctgaaaacacatgttgtcatcgacctaaacacagagagcaaagaaggagcggaaaagaacagatcagggggtcgtgaggtggatcccatcatgcttagtatcttcggccatcgtttcatggccattgctgagcagatggggagagcgcttcagaagacaagtgtcagcacgaacgtcaaagagcggctcgatttctcatgtgcaatcttcgatgccaatggtggattggtcgcgaatgcaccacatctacctgtgcacttaggatctatgtcgacatgcgtgagaacacaagccaaaatatgggaaggaaagcttaagaaaggcgatgtgatcatatccaatcacccttcctacggcggcacacatcttccagatatcaccctcttaatgcctgccttcgatggcaagggagataacatcctcttctatgcagcttctcgtgcccatcacgccgatatcggcggcattactgctggtagcatgccgcctcattcacgagagttgttccaggaaggtgcggcaatcaagagtgaaaaaattgtcagcgagggaaaattcgacgaggatagaattacagacctcctctacaaggagcctgcacagtacacaggatgcagtggcacgcggtgcttggcagacaatatcaatgacctccgggcgcaggtgtctgccaatcaaaaggggatttctctcatcgagaatctcattcaagaatatggagaagagacagttcagttctacatggtcaacattcagaacaatgcagaacaatgcgtgcgtacgctgctgaaacaagtctacaagcgcttcgaaggcaaggatctttcagctgtagattacatggatgatggaacgccaatcaagctgcgcgtgacaattgacgctgagaaaggcgaggcagtcttcgactttaatggcacaggtccgcaggtctacggtaacatcaatgcgcccgaagcagtgtcatatagtgctatcatctactgtctgcgttgtctaatctcagaggacatacccctgaatcaaggttgtctgaaaccgattcatgtcaagattccaccgaagtcattactctcgccatcgacaggagccgctgtcgttgggggcaacgtgctcacaagtcaacgtgtcacggacgttattttcaaggcatttgaagcttgcgctgctagccagggagactgtaacaaccttactttcggatttggtggcaacctatcaggagaggcggaggtgaaaggcttcggctattacgagaccattgctggaggctcaggtgccggaccaacgtgggagggtacaagcggtgttcatactcacatgacaaacactcgtattaccgattcggaagtctttgagcgacgataccctgtcatcctcagggagttctcaatcagagagggttctggtggcaaaggccagcataagggtggtgatggagtagtgagagacatcgagttccgcattccggtccaggtctccatcctcagcgaaaggcgtgtgtatcacccatatggtctcgcaggcggtgaggacgcagcttgtggcctcaatgtctgggttcgaagggtcgcgaagagcgatcctgagaaagaccttgctgctcacggccgtcgcaagagcgaaaacgttgagcagattgagtacgaagaacgtcacataagcatgggtgcaaagaacacggctccaatgaaaccaggagacaggatcatcgtaaatacacctggcggaggtggatggggtcctgtgggtggggataagaaagtaggttctggaagggatcacactgaggcatggcgaaagggaagtcatgctgccagagaggatatggcactgcaggcttaggttcgttgcaggccccaagtaatagacattagaagacagatgtattattcaatgagacatattgcattcaag

SEQ ID NO: 6239 - DNA, 2910 bp, Muscodor strobelii
  misc_feature: SGI cDNA ID NO. 561817
  misc_feature: Reduced expression when VOC is produced
  misc_feature: Encodes the peptide sequence at SEQ ID NO 6240
atgaagccagcaagttcttcgttggccattgctgccactgcgtttgcagcaacagcattggctattcccgtcaagtaccctacaaagtgcaagctacctctcgtgcaggacaaagcgtttgtcgactcagtcattctagatgacctgctagcatgctctcaaaagctccaggatattgcttatgcgacgccgagtcgcaaccgagtccacggctctgagggccatattaactcagtcaagtactttgaggaggagctcaagtctttgggcgactattacgacgttgaactccaacccttcactaccgaggtcactttggcagagtatatggcgttttccgtcggcgagactccctacgacaccaagtcatttgagtttggcaataacggcacttggaccgatcttgccctcgtcagcgttgctaacttgggttgcgcagccgatgacgtccccgaggacgttgctggcaaggttgccctgattgctcgtggcgagtgcacctttgttcagaagctggaaaatgccggcgctaagggtgcgattgctgcgatgatctataataatgttgaggttggtgtcgccactggcacactggctggcgtcaatgatcttatcccagtgggtggcctcacgcaagccgacggtgaggcccttgttgcccaacttacagctggggacgaggttcttacctcaggcgagtactgggcttacgtgaccgctacaatgagctataacgttctggcgacatccaaatacggcgatccggacaacgtgttattcttgggcgctcactccgattctgtcaccgctggccctggcatcaatgacaacggtagtggctcctgcggtatcctaactgtcgccaaggccctatccaagttccgaacaaacaaccagatcaaattcggatggtggacggcggaggaagaagggttgcttggagccgaatactttgtcaatcaatcaactccggaagacctgtctaagattcgtctttacctcaattttgatatgatcgcttcacctaactacttccttggcatttatgatggtgacgggagcacatacaacctcacaggcccgcccggctctgccgaggtagagtctctgttcgaggactggttcgccgcccagggcttgtcgtcctttggggccgagttcaacggcagatctgattatgggccttttctagacaagagtatcccttgcggtggacttgatactggttctgatggcatcaagactgaagaacaggaaagtctctacggaggcgttgctggcgagcagtatgaccagaattatcattctgcccaggacactgggtctaatctcgctccggttccctatgaacttaacgccaagggcatggctcatgccatcgccacatacggtaagagctggaagggcttccccgaacgtgttccttccaacgcaacagtccctcgcacgataactgcttgcgacgaaacacatggttatagcactggaccacttagaaaaattccaggtccgttcctagccaaaataaccaatctttggtatgcatggcaggtcaacgtcggagacttcgagttaaagaatatagagctacatagagttcatggcccaatcgtccgatatggacctaatcgctattccttcagcgatcctgctgccatcaacaccatctacggacttgggaataagtttcccaagtcttcttggtattcgacatttaatactccgcataagacgagcctattctcagagacgtcaatgaagaaccactcgaacattcgccgtctgtatcagagcgcgtactcgatgacctcgcttgtggactacgagccctttgtggatacctgcgcggatatcttcgcgcagcgtctcgacgagaccgctgaggccggcaagccaatagatatggcccattggttccaatgctacgctttcgacgtcatcggagaaatgacgttcggcaagcgctttggtttcctcgacgatggtcaagatcccgagggtatcatgccagctgtcgacctatcgatgtcttacggcgctctggttggagttttccccaggtttcattctttggcaaccaaagtgatgaatttactagctgggaaaaagggctctggccgaacctacgtattcgcatgggctagcgctcgaatcgccgaacaccaagaatcccgaaagggaggattgaaacgtgagaaggcagaatcattcctctccaagtttctgacgggacatgaggcagacccagagcgattctcattctggagggtgtttgccggctgcagtatgaatatcggagctggctccgacacaaccggtatcagcctttcagcagtgctgtattatctactaaggaatcctcaatatctgcaaaaactgcgtgaggaggtcgaggatttctcagcaggaagtgaggggcctacgataatatcttacaaggaatctcagcagttgccatatttacatgccgttatcaaagaaacactgagagtacattccgccacgggcctgccccttgagcgagtagtgcccgaaggaggcgcttcgatatgcggaactttctttccggctggtactatcgttggtgtgaacccctgggtaatccacagagatgaacaagttttcggggtagacgccaagcaattcaatcctgataggtggttcacgaaggacgaagaaaaactcgcggctatgaaccgatcgtggattccgtttggtctgggttctcggacgtgtattggacgccatatctcgacattggagatgtataaactgatcccgcgcatcttccgagatttcgatttcgaactcactccggagttcgccggctcagaaaaatattggaaaacacgtaatattctatttgtaaagcccctgggtttgaaagtgaaggtatcgcgtcgcaactga

SEQ ID NO: 6240 - protein, 969 aa, Muscodor strobelii
  misc_feature: SGI Peptide ID NO. 561817
  misc_feature (126)..(222): Pfam Id: PF02225 Pfam Desc: PA domain
  misc_feature (502)..(965): Pfam Id: PF00067 Pfam Desc: Cytochrome P450
  misc_feature (257)..(453): Pfam Id: PF04389 Pfam Desc: Peptidase family M28
  misc_feature (765)..(965): Pfam Id: PF00067 Pfam Desc: Cytochrome P450
  misc_feature (502)..(666): Pfam Id: PF00067 Pfam Desc: Cytochrome P450
  misc_feature (257)..(444): Pfam Id: PF04389 Pfam Desc: Peptidase family M28
  misc_feature (497)..(968): NCBI GI: 46114836 Blast Desc: FG03260.1 [Gibberella zeae PH-1]
  misc_feature (497)..(965): NCBI GI: 256733362 Blast Desc: NECHADRAFT_36590 [Nectria haematococca mpVI 77-13-4]
  misc_feature (496)..(969): NCBI GI: 256725852 Blast Desc: NECHADRAFT_43561 [Nectria haematococca mpVI 77-13-4]
  misc_feature (497)..(969): NCBI GI: 189196883 Blast Desc: pisatin demethylase [Pyrenophora tritici-repentis Pt-1C-BFP] gi|187980727|gb|EDU47353.1| pisatin demethylase [Pyrenophora tritici-repentis Pt-1C-BFP]
  misc_feature (497)..(968): NCBI GI: 256729810 Blast Desc: NECHADRAFT_95420 [Nectria haematococca mpVI 77-13-4]
  misc_feature (494)..(969): NCBI GI: 169778009 Blast Desc: [Aspergillus oryzae RIB40] gi|83772207|dbj|BAE62337.1| protein product [Aspergillus oryzae]
  misc_feature (487)..(968): NCBI GI: 119479803 Blast Desc: cytochrome P450 pisatin demethylase, [Neosartorya fischeri NRRL 181] gi|119408084|gb|EAW18033.1| cytochrome P450 pisatin demethylase, [Neosartorya fischeri NRRL 181]
  misc_feature (499)..(968): NCBI GI: 240111121 Blast Desc: Cytochrome P450 family protein [Coccidioides posadasii C735 delta SOWgp]
  misc_feature (497)..(968): NCBI GI: 121715089 Blast Desc: cytochrome P450 pisatin demethylase, [Aspergillus clavatus NRRL 1] gi|119403310|gb|EAW13728.1| cytochrome P450 pisatin demethylase, [Aspergillus clavatus NRRL 1]
  misc_feature (494)..(968): NCBI GI: 259484990 Blast Desc: TPA: cytochrome P450, (Eurofung) [Aspergillus nidulans FGSC A4]
  misc_feature: Useful for introducing or modulating the production of volatile compounds
MKPASSSLAIAATAFAATALAIPVKYPTKCKLPLVQDKAFVDSVILDDLLACSQKLQDIAYATPSRNRVHGSEGHINSVKYFEEELKSLGDYYDVELQPFTTEVTLAEYMAFSVGETPYDTKSFEFGNNGTWTDLALVSVANLGCAADDVPEDVAGKVALIARGECTFVQKLENAGAKGAIAAMIYNNVEVGVATGTLAGVNDLIPVGGLTQADGEALVAQLTAGDEVLTSGEYWAYVTATMSYNVLATSKYGDPDNVLFLGAHSDSVTAGPGINDNGSGSCGILTVAKALSKFRTNNQIKFGWWTAEEEGLLGAEYFVNQSTPEDLSKIRLYLNFDMIASPNYFLGIYDGDGSTYNLTGPPGSAEVESLFEDWFAAQGLSSFGAEFNGRSDYGPFLDKSIPCGGLDTGSDGIKTEEQESLYGGVAGEQYDQNYHSAQDTGSNLAPVPYELNAKGMAHAIATYGKSWKGFPERVPSNATVPRTITACDETHGYSTGPLRKIPGPFLAKITNLWYAWQVNVGDFELKNIELHRVHGPIVRYGPNRYSFSDPAAINTIYGLGNKFPKSSWYSTFNTPHKTSLFSETSMKNHSNIRRLYQSAYSMTSLVDYEPFVDTCADIFAQRLDETAEAGKPIDMAHWFQCYAFDVIGEMTFGKRFGFLDDGQDPEGIMPAVDLSMSYGALVGVFPRFHSLATKVMNLLAGKKGSGRTYVFAWASARIAEHQESRKGGLKREKAESFLSKFLTGHEADPERFSFWRVFAGCSMNIGAGSDTTGISLSAVLYYLLRNPQYLQKLREEVEDFSAGSEGPTIISYKESQQLPYLHAVIKETLRVHSATGLPLERVVPEGGASICGTFFPAGTIVGVNPWVIHRDEQVFGVDAKQFNPDRWFTKDEEKLAAMNRSWIPFGLGSRTCIGRHISTLEMYKLIPRIFRDFDFELTPEFAGSEKYWKTRNILFVKPLGLKVKVSRRN

SEQ ID NO: 6241 - DNA, 2130 bp, Muscodor strobelii
  misc_feature: SGI EST ID NO. CUFF.16031.1
  misc_feature: Variant of the nucleotide sequence at SEQ ID NO 6239
ccgagggtcacatagttcgcgatgcgagtaaagaccgagtcagtttgcgataaatagccttactcgcaagcactataaccaatttcgtgcgtttcgtgccttgctctgaatttccgagaaagtcatattcaaatcgcgaattattagacacaagaattcattatggaacttgattcgaggctgttttttactttgtatcatttctatgtctgagctatccattttattgttttattctgtctgtcacaggaccacttagaaaaattccaggtccgttcctagccaaaataaccaatctttggtatgcatggcaggtcaacgtcggagacttcgagttaaagaatatagagctacatagagttcatggcccaatcgtccgatatggacctaatcgctattccttcagcgatcctgctgccatcaacaccatctacggacttgggaataagtttcccaagtcttcttggtattcgacatttaatactccgcataagacgagcctattctcagagacgtcaatgaagaaccactcgaacattcgccgtctgtatcagagcgcgtactcgatgacctcgcttgtggactacgagccctttgtggatacctgcgcggatatcttcgcgcagcgtctcgacgagaccgctgaggccggcaagccaatagatatggcccattggttccaatgctacgctttcgacgtcatcggagaaatgacgttcggcaagcgctttggtttcctcgacgatggtcaagatcccgagggtatcatgccagctgtcgacctatcgatgtcttacggcgctctggttggagttttccccaggtttcattctttggcaaccaaagtgatgaatttactagctgggaaaaagggctctggccgaacctacgtattcgcatgggctagcgctcgaatcgccgaacaccaagaatcccgaaagggaggattgaaacgtgagaaggcagaatcattcctctccaagtttctgacgggacatgaggcagacccagagcgattctcattctggagggtgtttgccggctgcagtatgaatatcggagctggctccgacacaaccggtatcagcctttcagcagtgctgtattatctactaaggaatcctcaatatctgcaaaaactgcgtgaggaggtcgaggatttctcagcaggaagtgaggggcctacgataatatcttacaaggaatctcagcagttgccatatttacatgccgttatcaaagaaacactgagagtacattccgccacgggcctgccccttgagcgagtagtgcccgaaggaggcgcttcgatatgcggaactttctttccggctggtactatcgttggtgtgaacccctgggtaatccacagagatgaacaagttttcggggtagacgccaagcaattcaatcctgataggtggttcacgaaggacgaagaaaaactcgcggctatgaaccgatcgtggattccgtttggtctgggttctcggacgtgtattggacgccatatctcgacattggagatgtataaactgatcccgcgcatcttccgagatttcgatttcgaactcactccggagttcgccggctcagaaaaatattggaaaacacgtaatattctatttgtaaagcccctgggtttgaaagtgaaggtatcgcgtcgcaactgagtgtcagcatcgccactttaatatatcagatgtatcaaggacctaaaaacagggaaatacatcatcgtcctgtgctctgaagcaattcagacagggcacgctgcaagtaagcactgcttaatatcatattgaatgcgatattcgaataatgaaaggatataaaaagagtgcttgaattttgctggattggagattgagaagaaccttggtaaacttgtcatgagtccttgttttccagatgcaagaggggtgctagaagtcttgccaggcgaaaaaggagttctaggtcgacgcaacaccagatgaaggaagggttgtacggtcaagtgtacaaagaaacaatcaaagctgctctttaagtgtctctcattctccttaacaagccgtgaagtttagagcattatccactaatgaccaccattgcaagcctatctaacggtagtcataaatcagttca

SEQ ID NO: 6242 - DNA, 2199 bp, Muscodor strobelii
  misc_feature: SGI cDNA ID NO. 561818
  misc_feature: Elevated expression when VOC is produced
  misc_feature: Encodes the peptide sequence at SEQ ID NO 6243
atgatcgaatcagatggagttccggcaaagagcaaaagggttcgaactgggtgtttgacctgtagagaacgtcatctcaagtgcgatgaggaatcgccagattgcaggaattgtcggaaaagcaatcgagaatgcaaacgaggcattcgattaaatttcatcgatactcaaattaggacactgagtcatatagagctcgcggatgaatggaaagtggagtttcacgatgagtcaagattaattgcctcggaatatcgaggcggcctatcaagttatgccaaatttgatccgccaatggccacgccgcctcaagaaacatatgtcgaggctcgtcttccaatgaagcctcgtgcgatagagatccatgataagcaattgagtatggaaccaaggtctgcgacgataggtagacacccatctcagccgattgtctatgatgaacaggccgaaacacatccggatctgcgccttgacgcccagtatcattcacgtaaaagcagcgggatcacatacacaccaccaacagcaagttcgtctggagtccccaactatgcatccgatgggtacgtggccattaaggatgaggaagccagatactctcctcatcagggttatatgagtagcaacggctcatccacacactccgtagcgggtgaaacaggagtcggaccgccttcgacgacgagagtctcaccaaatctccatgatctaaatagaggtcctgacaacggaacaattacaccgtcgagtgagaagtcgggagaacgtgaatatctgaactcatcagaggagctagagcttatgcagatcttcatcaacgaggttggattatggatggacagcctcgataaggagaaacacttttctcgtgtgataccctttcatgcgctcaagtgcccgatgctgcttaacgccctactagcctgcggcgcgaagcatttatctttgactgagcaatatagcgatgagaaggcactattttactacgacactgcaacgacacaacttctccgtagcttacaaaatccagaacgcaacaccgccgagtgtgccacaacagccgttatactcaacgtctacgaagtaatgagtgagaagccgactaaacgaatgagccacatagccggcgcacgcgccttgatccgcgagtgtcagtggaatgcaaagacaccggggttgggcgcagcatgtttctggctcaacgtcggcatggaactactctcgtgcctagcatttaactgggcgacatcgtgggaacccgagggatggggcgtgaatatggacttcaatactgagagggaccaaggcaatgaagagatctgggtccatcgcatattcttcatcgtcgcgaaaatcgccaatttccgcgccagcgtgccgaaattccaggaggcgagcccgcatgacgaacagctgcgcgtgcagtatcggatggggcagtgggaacagctcaagagcatgtgtaaagattgggataattcatgtccgaggtccatgcacccttttggctatgtatacccaagtcagcacaatggtgctcgtaaatcgctgtttcctaacatctggctcgtcaaaagagcagcatcggtagggcgcctctactaccacatggcgctctgcatcctcgcacaagccaacccatccgcgcaaaaagactcccaagacgcgcgcataacacagcaacatcacgcacaccaagtctgcggcatagtagcgcacaacaaagaccggggcatagcatcagtctgcatccggtccacagcaatagtagccgaagtcctgaccgattatgccgagcaagaagaagtcgtctcaatactcgagcgcatcgactccgagaccgcgtggtgtctcggcgccgtagtaaagggcctcaagaaatcatggggctgggaaaaagaccggacgcacagcctcgcaagctccattgcggcggggataggcatgccgccgagtatgcttagtagtttgagcagcgagaggaattcgatgacaccgcctaagatgtcgatgagtatggcgcatacgccgactactaccatgccgcagcagatgcagccccttgctgttgcggccccgagaccgatacgcgttaatccgcttggctttgcggatttcaaactcccgaaccatccgtatcagaattggtataagccgccgagtcggagtaatgcttataattcgcaagggctttcttaa

SEQ ID NO: 6243 - protein, 732 aa, Muscodor strobelii
  misc_feature: SGI Peptide ID NO. 561818
  misc_feature (16)..(54): Pfam Id: PF00172 Pfam Desc: Fungal Zn(2)-Cys(6) binuclear cluster domain
  misc_feature (16)..(45): Pfam Id: PF00172 Pfam Desc: Fungal Zn(2)-Cys(6) binuclear cluster domain
  misc_feature (10)..(634): NCBI GI: 145613103 Blast Desc: MGG_01887 [Magnaporthe grisea 70-15] gi|145020244|gb|EDK04373.1| MGG_01887 [Magnaporthe grisea 70-15]
  misc_feature (9)..(727): NCBI GI: 154303705 Blast Desc: BC1G_08737 [Botryotinia fuckeliana B05.10] gi|150854531|gb|EDN29723.1| BC1G_08737 [Botryotinia fuckeliana B05.10]
  misc_feature (139)..(731): NCBI GI: 261359836 Blast Desc: C6 zinc finger domain-containing protein [Verticillium albo-atrum VaMs.102]
  misc_feature (10)..(724): NCBI GI: 239611987 Blast Desc: C6 zinc finger domain-containing protein [Ajellomyces dermatitidis ER-3]
  misc_feature (10)..(724): NCBI GI: 261201926 Blast Desc: C6 zinc finger domain-containing protein [Ajellomyces dermatitidis SLH14081] gi|239590274|gb|EEQ72855.1| C6 zinc finger domain-containing protein [Ajellomyces dermatitidis SLH14081]
  misc_feature (246)..(726): NCBI GI: 156049315 Blast Desc: SS1G_08364 [Sclerotinia sclerotiorum 1980] gi|154692763|gb|EDN92501.1| SS1G_08364 [Sclerotinia sclerotiorum 1980]
  misc_feature (4)..(719): NCBI GI: 189205883 Blast Desc: C6 zinc finger domain containing protein [Pyrenophora tritici-repentis Pt-1C-BFP] gi|187975369|gb|EDU41995.1| C6 zinc finger domain containing protein [Pyrenophora tritici-repentis
  misc_feature (7)..(720): NCBI GI: 70997599 Blast Desc: C6 transcription factor (ArcA) [Aspergillus fumigatus Af293] gi|66851177|gb|EAL91503.1| C6 transcription factor (ArcA), [Aspergillus fumigatus Af293] gi|159126727|gb|EDP51843.1| C6
  misc_feature (10)..(720): NCBI GI: 242762350 Blast Desc: C6 transcription factor (ArcA), [Talaromyces stipitatus ATCC 10500] gi|218723554|gb|EED22971.1| C6 transcription factor (ArcA), [Talaromyces stipitatus ATCC 10500]
  misc_feature (4)..(522): NCBI GI: 256726013 Blast Desc: NECHADRAFT_43849 [Nectria haematococca mpVI 77-13-4]
  misc_feature: Useful for introducing or modulating the production of volatile compounds
MIESDGVPAKSKRVRTGCLTCRERHLKCDEESPDCRNCRKSNRECKRGIRLNFIDTQIRTLSHIELADEWKVEFHDESRLIASEYRGGLSSYAKFDPPMATPPQETYVEARLPMKPRAIEIHDKQLSMEPRSATIGRHPSQPIVYDEQAETHPDLRLDAQYHSRKSSGITYTPPTASSSGVPNYASDGYVAIKDEEARYSPHQGYMSSNGSSTHSVAGETGVGPPSTTRVSPNLHDLNRGPDNGTITPSSEKSGEREYLNSSEELELMQIFINEVGLWMDSLDKEKHFSRVIPFHALKCPMLLNALLACGAKHLSLTEQYSDEKALFYYDTATTQLLRSLQNPERNTAECATTAVILNVYEVMSEKPTKRMSHIAGARALIRECQWNAKTPGLGAACFWLNVGMELLSCLAFNWATSWEPEGWGVNMDFNTERDQGNEEIWVHRIFFIVAKIANFRASVPKFQEASPHDEQLRVQYRMGQWEQLKSMCKDWDNSCPRSMHPFGYVYPSQHNGARKSLFPNIWLVKRAASVGRLYYHMALCILAQANPSAQKDSQDARITQQHHAHQVCGIVAHNKDRGIASVCIRSTAIVAEVLTDYAEQEEVVSILERIDSETAWCLGAVVKGLKKSWGWEKDRTHSLASSIAAGIGMPPSMLSSLSSERNSMTPPKMSMSMAHTPTTTMPQQMQPLAVAAPRPIRVNPLGFADFKLPNHPYQNWYKPPSRSNAYNSQGLS

SEQ ID NO: 6244 - DNA, 4510 bp, Muscodor strobelii
  misc_feature: SGI EST ID NO. CUFF.15736.0
  misc_feature: Variant of the nucleotide sequence at SEQ ID NO 6242
ggcgtcttctgcccttgtccgcctctgcaagtggtcgttggatacctgttcctctcaatgtattgttctggttttcggcctctctcgctcgcccgtgttcaaatgcttggcccagaccaatgatcagcaacatcactaacggaattaaacccacttggtggccactggcgttgttttcagctccagatccaaggctcagcagagctaaggccatacgtagtttaagcagtcgatccctatgcaggagcacgcgatcttctctcgttccgtcttgctctctttcttcgaattgcattcgcattgtacgtggctttggcttcatatcgttcatctttgagatacgcaatttgccaggatcctcgcaataccaaacggaaaacgtccgacaaggtacagctcctccacctaggcgggaatttgagacattcggcgtgtgccggtttctgcacccgatcccgaccctggctctatcttaccggcgactatcgcatttgaatgtcgttgtcgctttcagctgcgcaaaggaaaattcggtggaaatatcgtgtcaatcaaatcactagaatttgaaccctttctgctacttttcgcgctctttgacatctcaaagcgctctcaacattattaaccatcaattgttgtaaggtttggccgctggtcgacgattaaaacggcgtctagttggcgactacatcgatttcgaatctttgcagactaaacacagaacacaaatcgtagtaatccagagagggcttcgatttcggcgtctttgctcgcgatcgcgtcttcttccagaacttaggagaaaaggttattttgcgtgccggatatctcttcaccgaatagcttcgcagtggccaaccatctcggcgcaattgcgctgtctggaaaccagcatgaagagctgcctttcccgccgcatattgtcagtagcggcttgggaagcagacgttgtgatatcccattctcaggcagaaagtcggtgtttactcgaagcactcctaaccagattgccaaaatgatcgaatcagatggagttccggcaaagagcaaaagggttcgaactgggtgtttgacctgtagagaacgtcatctcaagtgcgatgaggaatcgccagattgcaggaattgtcggaaaagcaatcgagaatgcaaacgaggcattcgattaaatttcatcgatactcaaattaggacactgagtcatatagagctcgcggatgaatggaaagtggagtttcacgatgagtcaagattaattgcctcggaatatcgaggcggcctatcaagttatgccaaatttgatccgccaatggccacgccgcctcaagaaacatatgtcgaggctcgtcttccaatgaagcctcgtgcgatagagatccatgataagcaattgagtatggaaccaaggtctgcgacgataggtagacacccatctcagccgattgtctatgatgaacaggccgaaacacatccggatctgcgccttgacgcccagtatcattcacgtaaaagcagcgggatcacatacacaccaccaacagcaagttcgtctggagtccccaactatgcatccgatgggtacgtggccattaaggatgaggaagccagatactctcctcatcagggttatatgagtagcaacggctcatccacacactccgtagcgggtgaaacaggagtcggaccgccttcgacgacgagagtctcaccaaatctccatgatctaaatagaggtcctgacaacggaacaattacaccgtcgagtgagaagtcgggagaacgtgaatatctgaactcatcagaggagctagagcttatgcagatcttcatcaacgaggttggattatggatggacagcctcgataaggagaaacacttttctcgtgtgataccctttcatgcgctcaagtgcccgatgctgcttaacgccctactagcctgcggcgcgaagcatttatctttgactgagcaatatagcgatgagaaggcactattttactacgacactgcaacgacacaacttctccgtagcttacaaaatccagaacgcaacaccgccgagtgtgccacaacagccgttatactcaacgtctacgaagtaatgagtgagaagccgactaaacgaatgagccacatagccggcgcacgcgccttgatccgcgagtgtcagtggaatgcaaagacaccggggttgggcgcagcatgtttctggctcaacgtcggcatggaactactctcgtgcctagcatttaactgggcgacatcgtgggaacccgagggatggggcgtgaatatggacttcaatactgagagggaccaaggcaatgaagagatctgggtccatcgcatattcttcatcgtcgcgaaaatcgccaatttccgcgccagcgtgccgaaattccaggaggcgagcccgcatgacgaacagctgcgcgtgcagtatcggatggggcagtgggaacagctcaagagcatgtgtaaagattgggataattcatgtccgaggtccatgcacccttttggctatgtatacccaagtcagcacaatggtgctcgtaaatcgctgtttcctaacatctggctcgtcaaaagagcagcatcggtagggcgcctctactaccacatggcgctctgcatcctcgcacaagccaacccatccgcgcaaaaagactcccaagacgcgcgcataacacagcaacatcacgcacaccaagtctgcggcatagtagcgcacaacaaagaccggggcatagcatcagtctgcatccggtccacagcaatagtagccgaagtcctgaccgattatgccgagcaagaagaagtcgtctcaatactcgagcgcatcgactccgagaccgcgtggtgtctcggcgccgtagtaaagggcctcaagaaatcatggggctgggaaaaagaccggacgcacagcctcgcaagctccattgcggcggggataggcatgccgccgagtatgcttagtagtttgagcagcgagaggaattcgatgacaccgcctaagatgtcgatgagtatggcgcatacgccgactactaccatgccgcagcagatgcagccccttgctgttgcggccccgagaccgatacgcgttaatccgcttggctttgcggatttcaaactcccgaaccatccgtatcagaattggtataagccgccgagtcggagtaatgcttataattcgcaagggctttcttaattattttcccactaggatgggagcgggcaaatacgaatgagggggcagtgcataggtatacagagatttaacggctcgtttatggatacccttacggaagtaaatgttttgcagtagaagcaaatagggggcgcaacatgtataggtattataggtacgaatctcagagacatgactggcgttggggcaaggggtttgggctttatggcgttgggtttaatggggtggtggctcggttgcatagacaagacatagtgtcaatttggataccccacgagaatcgcaatacacattgcttgttgttggacatgaaataagtgtgtgttcgccgtgtctctattgataactctcctgctggtgatgaaggcgctgggtattgtatcttgtgattcacaaaacttatcaaggaatgatatttgggtctttgagggtacagtttacttctatatgctttcaggatgtttattgttatttttgtcttatgctctgctagagttgctaagcatcgtttctacatctttagtactcttattcgccgactggaacctgctctgggtctcagaagcagttctgtccatacttggacatggccgatgccgtgctcagagcttaacagacagttatcattttaaaactatcgtctcggtgtcaaatgttcgttccaggatttacccttacaacagtatgaacagtatgtaggtttggtgctcactgacgtgaaaattagtaattcgcctctctggttgcccgtcctacttggtcgtcctttagtcgctaaggaagccttttggcttctaagtgatcatggtgctggttccttggtataatcactcattatgaaggggacgttcagcattgaagccggattttcaggcagattttcagcaatagagccttggtcccgagttgcaactcgcatgtcctttcacttatgatcgtgacatttggacaataaaacatgctgaaagatgcttgaatcccacccgtggcccagcaaaaagtatagtgctctattcctaggccaatgggcatatggatattcaaaattttcaagcaaccatacgccaatgtgcagtatcgcgtgatactaggttcgtatcaggagacagcctgttttccagtaaaaacagcccactggcgtggcatcgttatcgatcggtgtatttcttcacgtcgctggaagttgccggtgataactgaagtacccaaggcgcgaaagcaataacagctccttgattttatcgtgcgtctctttacctcgggtcgttcacaaatctttcaagaaatgcgcct

SEQ ID NO: 6245 - DNA, 1236 bp, Muscodor strobelii
  misc_feature: SGI cDNA ID NO. 561819
  misc_feature: Encodes the peptide sequence at SEQ ID NO 6246
atgtcgcagaatgcagtagcgcaccctaagtcagtacttcgaggacacagcgcggctgtgcatgtcacaacgttcatcaggaaaaacgaacgccttgcgtctggcgatgcagatggctttgtggtgctttgggacctcactatcatgcggcctcgtgccgtctggcgagcacatgccaacgcaatgttgggcatttgtgggtggggcgacgacaaaattatcactcaaggaagagacaacaaattgatcgtttggaagattacggcaaaggacgaagaaactctcagcgcagcccttcctctcgacgaatctgcctctgaacggccacatccttggattcttcacattctcgagatcaataccatgaacttctgctcattcgcaacatgccccgcacatccagacgcgaattacgatacatccgaggacgtactaattgcagtgccaaacacacttgctagcgaaaacatcgatatttatcaactcccgaagcagcagcgtctactcacaatctccttcggagacaaaacagggaaattgggaatggcaatggcactatctctattctggctcgctggacgtcttcatcttgtggctggatacgaaaatggacaggcaattgtgtacaggcgcggctacggtgattcttgggactgtctatacaaatgccaggcgcacagccagcccgtcctctcactcgacgtccatctcgataaaacccacttctttacttcgagtgctgatgcctttgtcgtcaagcatccgatacctaatctcaattctctcgtaggctccgcagaaataagacctgaggacgaaccgctgaaaaaaatcaacacgaaacacgcaggacagcaaggtgtgagaattcgctctgacgggcgtatcttcgccacagcgggttgggattccaagatccgtgtttattctaccaaaaccatggcagagctggcggtgctgaaatggcatgatgtgggctgctatgccgtggcatttgctgcaaccagtaatgactcaaagcctacctcaaacaccccgaaagccgactctctgaatcatgaccaagctgcggcacagaatgaagacaattcctcaaccaaagagacgagtctaacagttctaacaaagcttggagagcttagtgtcaaagagaggaggatcaaagtggctaaagaagcacattggcttgcagctggaagcaaagacggaaaaatcagcttatgggatatctattga

SEQ ID NO: 6246 - protein, 411 aa, Muscodor strobelii
  misc_feature: SGI Peptide ID NO. 561819
  misc_feature (314)..(409): Pfam Id: PF00400 Pfam Desc: WD domain, G-beta repeat
  misc_feature (7)..(45): Pfam Id: PF00400 Pfam Desc: WD domain, G-beta repeat
  misc_feature (9)..(411): NCBI GI: 164426385 Blast Desc: NCU11283 [Neurospora crassa OR74A] gi|157071315|gb|EDO65236.1| conserved [Neurospora crassa OR74A]
  misc_feature (1)..(411): NCBI GI: 171688288 Blast Desc: protein product [Podospora anserina] gi|170944106|emb|CAP70216.1| protein product [Podospora anserina]
  misc_feature (8)..(411): NCBI GI: 261359858 Blast Desc: WD repeat-containing protein [Verticillium albo-atrum VaMs.102]
  misc_feature (7)..(411): NCBI GI: 145254540 Blast Desc: An18g01990 [Aspergillus niger] gi|134084239|emb|CAK47271.1| protein product [Aspergillus niger]
  misc_feature (7)..(411): NCBI GI: 119479117 Blast Desc: WD repeat protein [Neosartorya fischeri NRRL 181] gi|119407741|gb|EAW17690.1| WD repeat protein [Neosartorya fischeri NRRL 181]
  misc_feature (7)..(411): NCBI GI: 255953691 Blast Desc: Pc21g05520 [Penicillium chrysogenum Wisconsin 54-1255] gi|211589309|emb|CAP95449.1| Pc21g05520 [Penicillium chrysogenum Wisconsin 54-1255]
  misc_feature (7)..(411): NCBI GI: 121713578 Blast Desc: WD repeat protein [Aspergillus clavatus NRRL 1] gi|119402553|gb|EAW12974.1| WD repeat protein [Aspergillus clavatus NRRL 1]
  misc_feature (7)..(411): NCBI GI: 159126726 Blast Desc: WD repeat protein [Aspergillus fumigatus A1163]
  misc_feature (7)..(411): NCBI GI: 70997601 Blast Desc: WD repeat protein [Aspergillus fumigatus Af293] gi|66851178|gb|EAL91504.1| WD repeat protein [Aspergillus fumigatus Af293]
  misc_feature (7)..(411): NCBI GI: 238495989 Blast Desc: conserved [Aspergillus flavus NRRL3357] gi|220694110|gb|EED50454.1| conserved [Aspergillus flavus NRRL3357]
MSQNAVAHPKSVLRGHSAAVHVTTFIRKNERLASGDADGFVVLWDLTIMRPRAVWRAHANAMLGICGWGDDKIITQGRDNKLIVWKITAKDEETLSAALPLDESASERPHPWILHILEINTMNFCSFATCPAHPDANYDTSEDVLIAVPNTLASENIDIYQLPKQQRLLTISFGDKTGKLGMAMALSLFWLAGRLHLVAGYENGQAIVYRRGYGDSWDCLYKCQAHSQPVLSLDVHLDKTHFFTSSADAFVVKHPIPNLNSLVGSAEIRPEDEPLKKINTKHAGQQGVRIRSDGRIFATAGWDSKIRVYSTKTMAELAVLKWHDVGCYAVAFAATSNDSKPTSNTPKADSLNHDQAAAQNEDNSSTKETSLTVLTKLGELSVKERRIKVAKEAHWLAAGSKDGKISLWDIY

SEQ ID NO: 6247 - DNA, 2857 bp, Muscodor strobelii
  misc_feature: SGI EST ID NO. CUFF.15782.0
  misc_feature: Variant of the nucleotide sequence at SEQ ID NO 6245
gtctcacaaaatcgatctggaaactttccgatttgtttagccgcaatagagcaaggaatagacaatgaaggcaagttttggcgactcataattatcgactacttgaaacctcatctcgttgtcgaagactacatataatccacgatagtcttcgacgggggtctggtcaaaaccacatggcgtctatgtcgggtcagcatattctatattgcgtcagttaccagaccgcattgacggccacgaagaatcacatcttggaagaggagaaagggaagtcgagataaaaggggataggccgagatcaggctgactcaatatcatcatgtcgcagaatgcagtagcgcaccctaagtcagtacttcgaggacacagcgcggctgtgcatgtcacaacgttcatcaggaaaaacgaacgccttgcgtctggcgatgcagatggctttgtggtgctttgggacctcactatcatgcggcctcgtgccgtctggcgagcacatgccaacgcaatgttgggcatttgtgggtggggcgacgacaaaattatcactcaaggaagagacaacaaattgatcgtttggaagattacggcaaaggacgaagaaactctcagcgcagcccttcctctcgacgaatctgcctctgaacggccacatccttggattcttcacattctcgagatcaataccatgaacttctgctcattcgcaacatgccccgcacatccagacgcgaattacgatacatccgaggacgtactaattgcagtgccaaacacacttgctagcgaaaacatcgatatttatcaactcccgaagcagcagcgtctactcacaatctccttcggagacaaaacagggaaattgggaatggcaatggcactatctctattctggctcgctggacgtcttcatcttgtggctggatacgaaaatggacaggcaattgtgtacaggcgcggctacggtgattcttgggactgtctatacaaatgccaggcgcacagccagcccgtcctctcactcgacgtccatctcgataaaacccacttctttacttcgagtgctgatgcctttgtcgtcaagcatccgatacctaatctcaattctctcgtaggctccgcagaaataagacctgaggacgaaccgctgaaaaaaatcaacacgaaacacgcaggacagcaaggtgtgagaattcgctctgacgggcgtatcttcgccacagcgggttgggattccaagatccgtgtttattctaccaaaaccatggcagagctggcggtgctgaaatggcatgatgtgggctgctatgccgtggcatttgctgcaaccagtaatgactcaaagcctacctcaaacaccccgaaagccgactctctgaatcatgaccaagctgcggcacagaatgaagacaattcctcaaccaaagagacgagtctaacagttctaacaaagcttggagagcttagtgtcaaagagaggaggatcaaagtggctaaagaagcacattggcttgcagctggaagcaaagacggaaaaatcagcttatgggatatctattgaggccataacaagtctaagatgctcatctaattgctaagtgaggacgagatctccactggattcaccctcccgagaagtcgaacaacagcaccaacaagtctaacatatctttcgccctctcgcaagacgcatctaagtattcttggtcactacaccaccgacttgatcctccttcatagatgcctcttcctccacctctggcggtggaatgacaataccgtaaaagccataggggaaatttgtaagatcgggatagtatgtggcccaaccatcgtcgtgctcacccagctgatggtgatcgacatcacctgcctcgcccatccgtcctgcgaggatatctctatcacgaccctcgtactccttcttcaacatcggatgaggagcccatacaacgcgcatgcccgctctccgtccagcttcaacacctggtacactgtcctcaaataccagacactcttctggtgtgataggcttttcgccttgcggcaggctatcgttgatggtctttagagcaagcaaatagatgtcgggcatgggctttccgcggccaggttggatacgcttgtcatctcccagaacgcgacgatgagactcgaaaacggcgaaaagctcgttccagttttgcgtcttgacggcaaagttacttgagttactgcttgttgcgagggcaatgtgaactctctgacccttgcctctacccccttccttgtcaaaccaccgagttcggcccaagttagcaagtagcgtctctacacctggtaggggttttgcttctggaaaatgctttgcttgtagggccgaatactgttgcatgtagtcttcctcggtgattgggagttgcgcccaatcacgaaagagggcattggcctctggccccggtctgccttggagtttggcttttatagaccaggggagatttgggcggccgtatttctcgagaaggatgttgatacatagtgtgtagatatcctctgtgtcgagtaataggccatccatgtcgaagagacaggctctgacaggcgggaaactaaagagatacaattagaatacgaaatgtctattccatgttgtctagagaaaggctcaaccctgcagctatgaaaatgaatgagagacacgaaacttacactttctcagacgccatcgcgatctgaattgggccttgaatgagtcgccaaggagctgaccagtaaatccaggcgtgaaaccgttgctgattgtatttgtcttgaaggttatcgtgagtcgtaaaaagaaaagtgaagagttctcaacaaattcataagttgttacttctag

SEQ ID NO: 6248 - DNA, 912 bp, Muscodor strobelii
  misc_feature: SGI cDNA ID NO. 561820
  misc_feature: Encodes the peptide sequence at SEQ ID NO 6249
atggcgtctgagaaagttttcccgcctgtcagagcctgtctcttcgacatggatggcctattactcgacacagaggatatctacacactatgtatcaacatccttctcgagaaatacggccgcccaaatctcccctggtctataaaagccaaactccaaggcagaccggggccagaggccaatgccctctttcgtgattgggcgcaactcccaatcaccgaggaagactacatgcaacagtattcggccctacaagcaaagcattttccagaagcaaaacccctaccaggtgtagagacgctacttgctaacttgggccgaactcggtggtttgacaaggaagggggtagaggcaagggtcagagagttcacattgccctcgcaacaagcagtaactcaagtaactttgccgtcaagacgcaaaactggaacgagcttttcgccgttttcgagtctcatcgtcgcgttctgggagatgacaagcgtatccaacctggccgcggaaagcccatgcccgacatctatttgcttgctctaaagaccatcaacgatagcctgccgcaaggcgaaaagcctatcacaccagaagagtgtctggtatttgaggacagtgtaccaggtgttgaagctggacggagagcgggcatgcgcgttgtatgggctcctcatccgatgttgaagaaggagtacgagggtcgtgatagagatatcctcgcaggacggatgggcgaggcaggtgatgtcgatcaccatcagctgggtgagcacgacgatggttgggccacatactatcccgatcttacaaatttcccctatggcttttacggtattgtcattccaccgccagaggtggaggaagaggcatctatgaaggaggatcaagtcggtggtgtagtgaccaagaatacttag

SEQ ID NO: 6249 - protein, 303 aa, Muscodor strobelii
  misc_feature: SGI Peptide ID NO. 561820
  misc_feature (10)..(224): Pfam Id: PF00702 Pfam Desc: haloacid dehalogenase-like hydrolase
  misc_feature (1)..(292): NCBI GI: 46116694 Blast Desc: FG04189.1 [Gibberella zeae PH-1]
  misc_feature (1)..(292): NCBI GI: 256726012 Blast Desc: [Nectria haematococca mpVI 77-13-4]
  misc_feature (17)..(292): NCBI GI: 171688290 Blast Desc: protein product [Podospora anserina] gi|170944107|emb|CAP70217.1| protein product [Podospora anserina]
  misc_feature (8)..(280): NCBI GI: 145613105 Blast Desc: MGG_11115 [Magnaporthe grisea 70-15] gi|145020245|gb|EDK04374.1| MGG_11115 [Magnaporthe grisea 70-15]
  misc_feature (1)..(292): NCBI GI: 85105682 Blast Desc: NCU08666 [Neurospora crassa OR74A] gi|28923607|gb|EAA32779.1| NCU08666 [Neurospora crassa OR74A]
  misc_feature (8)..(279): NCBI GI: 154299825 Blast Desc: BC1G_10803 [Botryotinia fuckeliana B05.10] gi|150857083|gb|EDN32275.1| BC1G_10803 [Botryotinia fuckeliana B05.10]
  misc_feature (1)..(279): NCBI GI: 156053742 Blast Desc: SS1G_05718 [Sclerotinia sclerotiorum 1980] gi|154703499|gb|EDO03238.1| SS1G_05718 [Sclerotinia sclerotiorum 1980]
  misc_feature (1)..(254): NCBI GI: 116196792 Blast Desc: CHGG_04994 [Chaetomium globosum CBS 148.51] gi|88180907|gb|EAQ88375.1| CHGG_04994 [Chaetomium globosum CBS 148.51]
  misc_feature (7)..(279): NCBI GI: 75859078 Blast Desc: AN9497.2 [Aspergillus nidulans FGSC A4] gi|40747609|gb|EAA66765.1| AN9497.2 [Aspergillus nidulans FGSC A4] gi|259479397|tpe|CBF69582.1| TPA: HAD superfamily hydrolase,
  misc_feature (3)..(277): NCBI GI: 169772605 Blast Desc: [Aspergillus oryzae RIB40] gi|238490518|ref|XP_002376496.1| HAD superfamily hydrolase, [Aspergillus flavus NRRL3357] gi|83768632|dbj|BAE58769.1| protein
MASEKVFPPVRACLFDMDGLLLDTEDIYTLCINILLEKYGRPNLPWSIKAKLQGRPGPEANALFRDWAQLPITEEDYMQQYSALQAKHFPEAKPLPGVETLLANLGRTRWFDKEGGRGKGQRVHIALATSSNSSNFAVKTQNWNELFAVFESHRRVLGDDKRIQPGRGKPMPDIYLLALKTINDSLPQGEKPITPEECLVFEDSVPGVEAGRRAGMRVVWAPHPMLKKEYEGRDRDILAGRMGEAGDVDHHQLGEHDDGWATYYPDLTNFPYGFYGIVIPPPEVEEEASMKEDQVGGVVTKNT

SEQ ID NO: 6250 - DNA, 1954 bp, Muscodor strobelii
  misc_feature: SGI EST ID NO. CUFF.15783.1
  misc_feature: Variant of the nucleotide sequence at SEQ ID NO 6248
taacaacttatgaatttgttgagaactcttcacttttctttttacgactcacgataaccttcaagacaaatacaatcagcaacggtttcacgcctggatttactggtcagctccttggcgactcattcaaggcccaattcagatcgcgatggcgtctgagaaagttttcccgcctgtcagagcctgtctcttcgacatggatggcctattactcgacacagaggatatctacacactatgtatcaacatccttctcgagaaatacggccgcccaaatctcccctggtctataaaagccaaactccaaggcagaccggggccagaggccaatgccctctttcgtgattgggcgcaactcccaatcaccgaggaagactacatgcaacagtattcggccctacaagcaaagcattttccagaagcaaaacccctaccaggtgtagagacgctacttgctaacttgggccgaactcggtggtttgacaaggaagggggtagaggcaagggtcagagagttcacattgccctcgcaacaagcagtaactcaagtaactttgccgtcaagacgcaaaactggaacgagcttttcgccgttttcgagtctcatcgtcgcgttctgggagatgacaagcgtatccaacctggccgcggaaagcccatgcccgacatctatttgcttgctctaaagaccatcaacgatagcctgccgcaaggcgaaaagcctatcacaccagaagagtgtctggtatttgaggacagtgtaccaggtgttgaagctggacggagagcgggcatgcgcgttgtatgggctcctcatccgatgttgaagaaggagtacgagggtcgtgatagagatatcctcgcaggacggatgggcgaggcaggtgatgtcgatcaccatcagctgggtgagcacgacgatggttgggccacatactatcccgatcttacaaatttcccctatggcttttacggtattgtcattccaccgccagaggtggaggaagaggcatctatgaaggaggatcaagtcggtggtgtagtgaccaagaatacttagatgcgtcttgcgagagggcgaaagatatgttagacttgttggtgctgttgttcgacttctcgggagggtgaatccagtggagatctcgtcctcacttagcaattagatgagcatcttagacttgttatggcctcaatagatatcccataagctgatttttccgtctttgcttccagctgcaagccaatgtgcttctttagccactttgatcctcctctctttgacactaagctctccaagctttgttagaactgttagactcgtctctttggttgaggaattgtcttcattctgtgccgcagcttggtcatgattcagagagtcggctttcggggtgtttgaggtaggctttgagtcattactggttgcagcaaatgccacggcatagcagcccacatcatgccatttcagcaccgccagctctgccatggttttggtagaataaacacggatcttggaatcccaacccgctgtggcgaagatacgcccgtcagagcgaattctcacaccttgctgtcctgcgtgtttcgtgttgatttttttcagcggttcgtcctcaggtcttatttctgcggagcctacgagagaattgagattaggtatcggatgcttgacgacaaaggcatcagcactcgaagtaaagaagtgggttttatcgagatggacgtcgagtgagaggacgggctggctgtgcgcctggcatttgtatagacagtcccaagaatcaccgtagccgcgcctgtacacaattgcctgtccattttcgtatccagccacaagatgaagacgtccagcgagccagaatagagatagtgccattgccattcccaatttccctgttttgtctccgaaggagattgtgagtagacgctgctgcttcgggagttgataaat

SEQ ID NO: 6251 - DNA, 852 bp, Muscodor strobelii
  misc_feature: SGI cDNA ID NO. 561821
  misc_feature: Encodes the peptide sequence at SEQ ID NO 6252
atggcgcccgcacagtcctcccagcaagaagacaaggaggccattgacctaaccaccgaccccgaagaatcaacagcacccccaagattctcatcagaagaagaagcgagtctagtctcagaatccaacgccaaaaagtgcacagcaaacaccctcttcaccagttccaaatacgaaaatgccataacagcatacgaagaagcagcagccatctgcccacattatctcgactacgagttgtccgtgctaaaatccaacatagcggcctgccacctgaaactagagcaatacaaagaagccatcaaatccgcgacagaatctctcgacgggctatcccgcgttgaaaaaagcgagacatcatctacacccccaaccaataccccagcagaagcggacgaagaagaagcagaagaagaaataatcagcacaggcgcagccaattccgccccggcccttccacaacacgaaacccccgccgaattagcacttagaaagaggaaagatgacatagcgaggatacgagccaaggctctgatgcgccgcgcgagagcaaggagtgagttgggcggttggtcgaatttgagtggtgccgaggaagattataaggagttgtcgactatgaagaatctcagtgctgctgatgagaagatagtacggactcagttgagagtcctgccagcaaggaccaaggaggcgcaggagaaggagatgagtgagatgtgggggaagttgaaggatcttggaaacggcatcttgagaccgtttggtctttcaacggacaatttcaatatggtcaaggatgaaaagactggtgggtatagtatgaattttaaccagaatcctcagggttga

SEQ ID NO: 6252 - protein, 283 aa, Muscodor strobelii
  misc_feature: SGI Peptide ID NO. 561821
  misc_feature (6)..(283): NCBI GI: 171688292 Blast Desc: protein product [Podospora anserina] gi|170944108|emb|CAP70218.1| protein product [Podospora anserina]
  misc_feature (27)..(277): NCBI GI: 116196790 Blast Desc: CHGG_04993 [Chaetomium globosum CBS 148.51] gi|88180906|gb|EAQ88374.1| CHGG_04993 [Chaetomium globosum CBS 148.51]
  misc_feature (22)..(277): NCBI GI: 85105440 Blast Desc: NCU08664 [Neurospora crassa OR74A] gi|28923553|gb|EAA32729.1| [Neurospora crassa OR74A]
  misc_feature (14)..(280): NCBI GI: 145613107 Blast Desc: MGG_01886 [Magnaporthe grisea 70-15] gi|145020246|gb|EDK04375.1| MGG_01886 [Magnaporthe grisea 70-15]
  misc_feature (19)..(277): NCBI GI: 239614809 Blast Desc: tetratricopeptide repeat protein 1 [Ajellomyces dermatitidis ER-3]
  misc_feature (19)..(277): NCBI GI: 261190580 Blast Desc: tetratricopeptide repeat protein 1 [Ajellomyces dermatitidis SLH14081] gi|239591122|gb|EEQ73703.1| tetratricopeptide repeat protein 1 [Ajellomyces dermatitidis
  misc_feature (20)..(282): NCBI GI: 242819248 Blast Desc: tetratricopeptide repeat protein 1 (TTC1), [Talaromyces stipitatus ATCC 10500] gi|218713744|gb|EED13168.1| tetratricopeptide repeat protein 1 (TTC1), [Talaromyces ATCC
  misc_feature (19)..(277): NCBI GI: 225557308 Blast Desc: conserved [Ajellomyces capsulatus G186AR]
  misc_feature (19)..(277): NCBI GI: 154277296 Blast Desc: conserved [Ajellomyces capsulatus NAm1] gi|150413074|gb|EDN08457.1| conserved [Ajellomyces capsulatus NAm1]
  misc_feature (30)..(282): NCBI GI: 212530224 Blast Desc: tetratricopeptide repeat protein 1 (TTC1), [Penicillium marneffei ATCC 18224] gi|210074667|gb|EEA28754.1| tetratricopeptide repeat protein 1 (TTC1), [Penicillium marneffei
MAPAQSSQQEDKEAIDLTTDPEESTAPPRFSSEEEASLVSESNAKKCTANTLFTSSKYENAITAYEEAAAICPHYLDYELSVLKSNIAACHLKLEQYKEAIKSATESLDGLSRVEKSETSSTPPTNTPAEADEEEAEEEIISTGAANSAPALPQHETPAELALRKRKDDIARIRAKALMRRARARSELGGWSNLSGAEEDYKELSTMKNLSAADEKIVRTQLRVLPARTKEAQEKEMSEMWGKLKDLGNGILRPFGLSTDNFNMVKDEKTGGYSMNFNQNPQG

SEQ ID NO: 6253 - DNA, 2195 bp, Muscodor strobelii
  misc_feature: SGI EST ID NO. CUFF.15757.1
  misc_feature: Variant of the nucleotide sequence at SEQ ID NO 6251
gccaaataagccccgactttgcaggcattgctgtggcccagtaacctcacccaagctcaaagcatttccaacctgtcgtcattctactaacggcgcggagtcaactacataattctcaataattcctcaatcatggcgcccgcacagtcctcccagcaagaagacaaggaggccattgacctaaccaccgaccccgaagaatcaacagcacccccaagattctcatcagaagaagaagcgagtctagtctcagaatccaacgccaaaaagtgcacagcaaacaccctcttcaccagttccaaatacgaaaatgccataacagcatacgaagaagcagcagccatctgcccacattatctcgactacgagttgtccgtgctaaaatccaacatagcggcctgccacctgaaactagagcaatacaaagaagccatcaaatccgcgacagaatctctcgacgggctatcccgcgttgaaaaaagcgagacatcatctacacccccaaccaataccccagcagaagcggacgaagaagaagcagaagaagaaataatcagcacaggcgcagccaattccgccccggcccttccacaacacgaaacccccgccgaattagcacttagaaagaggaaagatgacatagcgaggatacgagccaaggctctgatgcgccgcgcgagagcaaggagtgagttgggcggttggtcgaatttgagtggtgccgaggaagattataaggagttgtcgactatgaagaatctcagtgctgctgatgagaagatagtacggactcagttgagagtcctgccagcaaggaccaaggaggcgcaggagaaggagatgagtgagatgtgggggaagttgaaggatcttggaaacggcatcttgagaccgtttggtctttcaacggacaatttcaatatggtcaaggatgaaaagactggtgggtatagtatgaattttaaccagaatcctcagggttgagactagaggcgggatctagataataccagttgctcctcctcgatacagcgcacaagccgtatcaactcgttaaaggacataagcgatatcaccatgctgtcgatatgcagtaacgttgccatatatctggcgccgtagtattgattaccatgcatttacccctaaacgcccattgtacatgctacgctccaggtcctcctatttactacgtcgctctactgtactcttaccccatcttagaacttatttctttgagaagaaagacatgatgtttccttgtccagctttacccgcagctttcttaggcttcgccttctcttctgccttgacaggctgcggcgttgccttcaccggtgctgatgctggagcggggggctcatcttcagagaacgactcccatccttgttcctgaacagtgactagatagcctttgtcatccataatctgcttcttcttcatgacgcgacgtcgtcctctccgtctgccgcccgtagcactagatacgacttcggctggctcctcaggcttggcctcgggttcaggctcgggcggtgggggttcatcgtcttccatgggctcatctgcactttcttccttctcctgctcttcagcatcgctctcctccatcatgcgttgaagctcggcctggcggacctggcgtctttgtctagctttgctgtcttcctccttgattaccggcttcacctctgtatcatcctcaccgtcatcggacatggcgccagtgctttgattatcctcggtgccactagcaggagttgaatcgctggcctttttgggtttcttaggatttgccgctgctttggcaaacatctgcccgatgcccgaggagccttgacgcttcaaagttccaggagcaggctttttggttggtgccgatgcggatgatccaactttctttgtggtctgcgtagcttcctttggctcgttctttgctgtagccagggtggatgatttggattcttgcttgactgcaggtttcacttcttgcttggccacaggtgcaggtatcggtgcacccttcttccgctcacgtctgcgtacattcgggttcacaatcatgcctaggtccttatttgagtccggattttgcgcagctagctcgtgagcctgtttggcagtgtcggtaagtaattggaggtccttaaatggatggactgccagactgtaaacatggatggaggagattctgc

SEQ ID NO: 6254 - DNA, 1314 bp, Muscodor strobelii
  misc_feature: SGI cDNA ID NO. 561822
  misc_feature: Encodes the peptide sequence at SEQ ID NO 6255
atggaggactacaggcagtatcttgcccaaaagatcctaactgaggatcaaccagtcacatatagactcctaagcagagccttgaacgttcatgtgaacactgccaaagaaatgctctatgactttcataaatggcaaaacgacaagaagccgggcacattgttcgccacgtacctagtctcgggcgttaaaagtactcctgagagtcaagacgaggatgttgagatgaccgactcacaatctcctgctcctgacaatggcatggcaccattctctgacttggtacccacgagtaccatctcgcttgtaaacgagtcgcaactacaagacacactagcacaatatagcagaatctcctccatccatgtttacagtctggcagtccatccatttaaggacctccaattacttaccgacactgccaaacaggctcacgagctagctgcgcaaaatccggactcaaataaggacctaggcatgattgtgaacccgaatgtacgcagacgtgagcggaagaagggtgcaccgatacctgcacctgtggccaagcaagaagtgaaacctgcagtcaagcaagaatccaaatcatccaccctggctacagcaaagaacgagccaaaggaagctacgcagaccacaaagaaagttggatcatccgcatcggcaccaaccaaaaagcctgctcctggaactttgaagcgtcaaggctcctcgggcatcgggcagatgtttgccaaagcagcggcaaatcctaagaaacccaaaaaggccagcgattcaactcctgctagtggcaccgaggataatcaaagcactggcgccatgtccgatgacggtgaggatgatacagaggtgaagccggtaatcaaggaggaagacagcaaagctagacaaagacgccaggtccgccaggccgagcttcaacgcatgatggaggagagcgatgctgaagagcaggagaaggaagaaagtgcagatgagcccatggaagacgatgaacccccaccgcccgagcctgaacccgaggccaagcctgaggagccagccgaagtcgtatctagtgctacgggcggcagacggagaggacgacgtcgcgtcatgaagaagaagcagattatggatgacaaaggctatctagtcactgttcaggaacaaggatgggagtcgttctctgaagatgagccccccgctccagcatcagcaccggtgaaggcaacgccgcagcctgtcaaggcagaagagaaggcgaagcctaagaaagctgcgggtaaagctggacaaggaaacatcatgtctttcttctcaaagaaataa

SEQ ID NO: 6255 - protein, 437 aa, Muscodor strobelii
  misc_feature: SGI Peptide ID NO. 561822
  misc_feature (17)..(437): Pfam Id: PF09507 Pfam Desc: DNA polymerase subunit Cdc27
  misc_feature (1)..(437): NCBI GI: 46116830 Blast Desc: FG04257.1 [Gibberella zeae PH-1]
  misc_feature (1)..(437): NCBI GI: 256725564 Blast Desc: NECHADRAFT_43900 [Nectria haematococca mpVI 77-13-4]
  misc_feature (1)..(437): NCBI GI: 116195940 Blast Desc: CHGG_04568 [Chaetomium globosum CBS 148.51] gi|88180481|gb|EAQ87949.1| CHGG_04568 [Chaetomium globosum CBS 148.51]
  misc_feature (1)..(437): NCBI GI: 85108939 Blast Desc: NCU07998 [Neurospora crassa OR74A] gi|28924279|gb|EAA33432.1| [Neurospora crassa OR74A] gi|39979157|emb|CAE85531.1| [Neurospora crassa]
  misc_feature (3)..(437): NCBI GI: 255956281 Blast Desc: Pc21g19020 [Penicillium chrysogenum Wisconsin 54-1255] gi|211590604|emb|CAP96799.1| Pc21g19020 [Penicillium chrysogenum Wisconsin 54-1255]
  misc_feature (3)..(437): NCBI GI: 238841394 Blast Desc: conserved [Microsporum canis CBS 113480]
  misc_feature (3)..(437): NCBI GI: 212530820 Blast Desc: conserved [Penicillium marneffei ATCC 18224] gi|210074965|gb|EEA29052.1| conserved [Penicillium marneffei ATCC 18224]
  misc_feature (3)..(437): NCBI GI: 154276124 Blast Desc: [Ajellomyces capsulatus NAm1] gi|150413980|gb|EDN09345.1| [Ajellomyces capsulatus NAm1]
  misc_feature (1)..(379): NCBI GI: 171690916 Blast Desc: protein product [Podospora anserina] gi|170945406|emb|CAP71518.1| protein product [Podospora anserina]
  misc_feature (4)..(437): NCBI GI: 226279974 Blast Desc: PAAG_06587 [Paracoccidioides brasiliensis Pb01]
MEDYRQYLAQKILTEDQPVTYRLLSRALNVHVNTAKEMLYDFHKWQNDKKPGTLFATYLVSGVKSTPESQDEDVEMTDSQSPAPDNGMAPFSDLVPTSTISLVNESQLQDTLAQYSRISSIHVYSLAVHPFKDLQLLTDTAKQAHELAAQNPDSNKDLGMIVNPNVRRRERKKGAPIPAPVAKQEVKPAVKQESKSSTLATAKNEPKEATQTTKKVGSSASAPTKKPAPGTLKRQGSSGIGQMFAKAAANPKKPKKASDSTPASGTEDNQSTGAMSDDGEDDTEVKPVIKEEDSKARQRRQVRQAELQRMMEESDAEEQEKEESADEPMEDDEPPPPEPEPEAKPEEPAEVVSSATGGRRRGRRRVMKKKQIMDDKGYLVTVQEQGWESFSEDEPPAPASAPVKATPQPVKAEEKAKPKKAAGKAGQGNIMSFFSKK

SEQ ID NO: 6256 - DNA, 2968 bp, Muscodor strobelii
  misc_feature: SGI EST ID NO. CUFF.15758.2
  misc_feature: Variant of the nucleotide sequence at SEQ ID NO 6254
gatgggtcttgcgacaggggcttgggatgatcctgccggggttgcatgtagagaccccaccacttaacgcgttctttgacgcgctgtcacttggatttcagtggaagtttgataacgtaaggttgtaccgtacctgcttgcatcagaacaagttgaaataccaaacacatcaaactcgtcatcccaagacccttttcactctgtccagatataacagcaacgcaattgtccggcacgcacagatattcgatcaagtggtccaagatggaggactacaggcagtatcttgcccaaaagatcctaactgaggatcaaccagtcacatatagactcctaagcagagccttgaacgttcatgtgaacactgccaaagaaatgctctatgactttcataaatggcaaaacgacaagaagccgggcacattgttcgccacgtacctagtctcgggcgttaaaagtactcctgagagtcaagacgaggatgttgagatgaccgactcacaatctcctgctcctgacaatggcatggcaccattctctgacttggtacccacgagtaccatctcgcttgtaaacgagtcgcaactacaagacacactagcacaatatagcagaatctcctccatccatgtttacagtctggcagtccatccatttaaggacctccaattacttaccgacactgccaaacaggctcacgagctagctgcgcaaaatccggactcaaataaggacctaggcatgattgtgaacccgaatgtacgcagacgtgagcggaagaagggtgcaccgatacctgcacctgtggccaagcaagaagtgaaacctgcagtcaagcaagaatccaaatcatccaccctggctacagcaaagaacgagccaaaggaagctacgcagaccacaaagaaagttggatcatccgcatcggcaccaaccaaaaagcctgctcctggaactttgaagcgtcaaggctcctcgggcatcgggcagatgtttgccaaagcagcggcaaatcctaagaaacccaaaaaggccagcgattcaactcctgctagtggcaccgaggataatcaaagcactggcgccatgtccgatgacggtgaggatgatacagaggtgaagccggtaatcaaggaggaagacagcaaagctagacaaagacgccaggtccgccaggccgagcttcaacgcatgatggaggagagcgatgctgaagagcaggagaaggaagaaagtgcagatgagcccatggaagacgatgaacccccaccgcccgagcctgaacccgaggccaagcctgaggagccagccgaagtcgtatctagtgctacgggcggcagacggagaggacgacgtcgcgtcatgaagaagaagcagattatggatgacaaaggctatctagtcactgttcaggaacaaggatgggagtcgttctctgaagatgagccccccgctccagcatcagcaccggtgaaggcaacgccgcagcctgtcaaggcagaagagaaggcgaagcctaagaaagctgcgggtaaagctggacaaggaaacatcatgtctttcttctcaaagaaataagttctaagatggggtaagagtacagtagagcgacgtagtaaataggaggacctggagcgtagcatgtacaatgggcgtttaggggtaaatgcatggtaatcaatactacggcgccagatatatggcaacgttactgcatatcgacagcatggtgatatcgcttatgtcctttaacgagttgatacggcttgtgcgctgtatcgaggaggagcaactggtattatctagatcccgcctctagtctcaaccctgaggattctggttaaaattcatactatacccaccagtcttttcatccttgaccatattgaaattgtccgttgaaagaccaaacggtctcaagatgccgtttccaagctgccgagttattagtagttaacatatgatcagtaacccatatcattcaaaacctaaatatcaccctcccagaagagaatagaaaaaaagaaagtcagaaactcacatccttcaacttcccccacatctcactcatctccttctcctgcgcctccttggtccttgctggcaggactctcaactgagtccgtactatcttctcatcagcagcactgagattcttcatagtcgacaactccttataatcttcctcggcaccactcaaattcgaccaaccgcccaactcactccttgctctcgcgcggcgcatcagagccttggctcgtatcctcgctatgtcatctttcctctttctaagtgctaattcggcgggggtttcgtgttgtggaagggccggggcggaattggctgcgcctgtgctgattatttcttcttctgcttcttcttcgtccgcttctgctggggtattggttgggggtgtagatgatgtctcgcttttttcaacgcgggatagcccgtcgagagattctgtcgcggatttgatggcttctttgtattgctctagtttcaggtggcaggccgctatgttggattttagcacggacaactcgtagtcgagataatgtgggcagatggctgctgcttcttcgtatgctgttatggcattttcgtatttggaactggtgaagagggtgtttgctgtgcactttttggcgttggattctgagactagactctgagatgggagtgttagatgagtgtggatggtggaagggttggagtgtggacgtgccgcttcttcttctgatgagaatcttgggggtgctgttgattcttcggggtcggtggttaggtcaatggcctccttgtcttcttgctgggaggactgtgcgggcgccatgattgaggaattattgagaattatgtagttgactccgcgccgttagtagaatgacgacaggttggaaatgctttgagcttgggtgaggttactgggccacagcaatgcctgcaaagtcggggcttatttggc

SEQ ID NO: 6257 - DNA, 588 bp, Muscodor strobelii
  misc_feature: SGI cDNA ID NO. 561823
  misc_feature: Encodes the peptide sequence at SEQ ID NO 6258
atgtttgccaaagcagcggcaaatcctaagaaacccaaaaaggccagcgattcaactcctgctagtggcaccgaggataatcaaagcactggcgccatgtccgatgacggtgaggatgatacagaggtgaagccggtaatcaaggaggaagacagcaaagctagacaaagacgccaggtccgccaggccgagcttcaacgcatgatggaggagagcgatgctgaagagcaggagaaggaagaaagtgcagatgagcccatggaagacgatgaacccccaccgcccgagcctgaacccgaggccaagcctgaggagccagccgaagtcgtatctagtgctacgggcggcagacggagaggacgacgtcgcgtcatgaagaagaagcagattatggatgacaaaggctatctagtcactgttcaggaacaaggatgggagtcgttctctgaagatgagccccccgctccagcatcagcaccggtgaaggcaacgccgcagcctgtcaaggcagaagagaaggcgaagcctaagaaagctgcgggtaaagctggacaaggaaacatcatgtctttcttctcaaagaaataa

SEQ ID NO: 6258 - protein, 195 aa, Muscodor strobelii
  misc_feature: SGI Peptide ID NO. 561823
  misc_feature (1)..(195): Pfam Id: PF09507 Pfam Desc: DNA polymerase subunit Cdc27
  misc_feature (2)..(195): Pfam Id: PF09507 Pfam Desc: DNA polymerase subunit Cdc27
  misc_feature (29)..(195): NCBI GI: 46116830 Blast Desc: FG04257.1 [Gibberella zeae PH-1]
  misc_feature (91)..(195): NCBI GI: 255956281 Blast Desc: Pc21g19020 [Penicillium chrysogenum Wisconsin 54-1255] gi|211590604|emb|CAP96799.1| Pc21g19020 [Penicillium chrysogenum Wisconsin 54-1255]
  misc_feature (2)..(195): NCBI GI: 116195940 Blast Desc: CHGG_04568 [Chaetomium globosum CBS 148.51] gi|88180481|gb|EAQ87949.1| CHGG_04568 [Chaetomium globosum CBS 148.51]
  misc_feature (115)..(195): NCBI GI: 212530820 Blast Desc: conserved [Penicillium marneffei ATCC 18224] gi|210074965|gb|EEA29052.1| conserved [Penicillium marneffei ATCC 18224]
  misc_feature (55)..(195): NCBI GI: 154276124 Blast Desc: [Ajellomyces capsulatus NAm1] gi|150413980|gb|EDN09345.1| [Ajellomyces capsulatus NAm1]
  misc_feature (97)..(195): NCBI GI: 258566854 Blast Desc: [Uncinocarpus reesii 1704] gi|237905617|gb|EEP80018.1| [Uncinocarpus reesii 1704]
  misc_feature (32)..(195): NCBI GI: 256725564 Blast Desc: NECHADRAFT_43900 [Nectria haematococca mpVI 77-13-4]
  misc_feature (11)..(195): NCBI GI: 154299736 Blast Desc: BC1G_11494 [Botryotinia fuckeliana B05.10] gi|150857184|gb|EDN32376.1| BC1G_11494 [Botryotinia fuckeliana B05.10]
  misc_feature (55)..(190): NCBI GI: 225555941 Blast Desc: DUF1237 domain-containing protein [Ajellomyces capsulatus G186AR]
  misc_feature (3)..(195): NCBI GI: 238841394 Blast Desc: conserved [Microsporum canis CBS 113480]
MFAKAAANPKKPKKASDSTPASGTEDNQSTGAMSDDGEDDTEVKPVIKEEDSKARQRRQVRQAELQRMMEESDAEEQEKEESADEPMEDDEPPPPEPEPEAKPEEPAEVVSSATGGRRRGRRRVMKKKQIMDDKGYLVTVQEQGWESFSEDEPPAPASAPVKATPQPVKAEEKAKPKKAAGKAGQGNIMSFFSKK

SEQ ID NO: 6259 - DNA, 2968 bp, Muscodor strobelii; identical to SEQ ID NO: 6256
  misc_feature: SGI EST ID NO. CUFF.15758.2
  misc_feature: Variant of the nucleotide sequence at SEQ ID NO 6257

SEQ ID NO: 6260 - DNA, 1344 bp, Muscodor strobelii
  misc_feature: SGI cDNA ID NO. 561824
  misc_feature: Encodes the peptide sequence at SEQ ID NO 6261
atgagtaaccatgcgcttgatactgtcaccgattcgacagactggctttcaacgccgctgtcaggtcttgccaccgtcgaggctgcccttcgctgccagatatgcaaagacttcttcaagacgcccatgttgacctcttgcaatcacacattctgctctctttgcatccgtcgcgcactgtccaccgacggcaaatgtccactatgtcgtgcttcagagcaggagttgaggctgaggagcaattggtccatggaagaagttgttgctgccttcacacaggctcggtctgctgtccttgaatttgctcgaaaacccccaccgacctcccgacgctcgatatcacctccgaagagaacagccagtgaaataaacggcagtcaggaatcatcatcctcaagcaagagactacggtcctcagcacggctcagcaagactcgaagcatggaggccacagcagagatagcgcgacaagaagccgatatgcccgatctagagccagaacccgagccctttgagcctgacgatggtcttgttgcatgtcccatctgctggaaacgcatgaaacctatacaagtggatagacacctcgacacctcctgcccaggggagccgcggccagatccccccaagcggcaggtaaaatctccgccacgagactcctcactaccgaaaagcataacaaaggcttttccttccgcttccagctcatcgaaaacacccataccaacccccgaacgactcccagcacgcaactactcaatgctcaaagacgtccaactgcgcaaagaactagccgaccttggtctctccacagcgggcggtagatcattccaagaaaaacggcacagggaatgggtcatgatgtggaatgcaaattgcgactcccagcgaccaaggcggcgagccgagttgatacatgatctcgatatttgggaacgtacatttggctcacgcgcgccaacgacgtcgcaggccaccactacaggggcgcagataaaagataaggatttcgatggagctgcttgggctacgaagcatgatacttcgtttcgtgatttgatagccaatgcgaggaagtcaaggacgcaggcaaacaaacaaggtgacgaggataagggtagcaaacccagtgatggagataaagagaatgaggtagatggggagattcctgccatggagaatggtgatcggaggatgaatgggaatacgctaccgccagaagggatatcaggcgtatcgaatttaccggattcaaaccagatggttgttgatttgaccagcgatcctgtttcgccaataccaatgagcacaacagagacttcacagcagcaagagactatatag

SEQ ID NO: 6261 - protein, 447 aa, Muscodor strobelii
  misc_feature: SGI Peptide ID NO. 561824
  misc_feature (32)..(69): Pfam Id: PF00097 Pfam Desc: Zinc finger, C3HC4 type (RING finger)
  misc_feature (252)..(286): Pfam Id: PF02037 Pfam Desc: SAP domain
  misc_feature (9)..(393): NCBI GI: 164429187 Blast Desc: NCU05210 [Neurospora crassa OR74A] gi|189031717|sp|P33288.2|RAD18_NEUCR RecName: Full=Postreplication repair E3 ubiquitin-protein ligase rad-18; 2
  misc_feature (1)..(370): NCBI GI: 256725963 Blast Desc: NECHADRAFT_5113 [Nectria haematococca mpVI 77-13-4]
  misc_feature (9)..(393): NCBI GI: 303714 Blast Desc: UVS-2 protein [Neurospora crassa] gi|447143|prf||1913426A uvs-2 gene
  misc_feature (9)..(318): NCBI GI: 116194422 Blast Desc: CHGG_03809 [Chaetomium globosum CBS 148.51] gi|88179722|gb|EAQ87190.1| CHGG_03809 [Chaetomium globosum CBS 148.51]
  misc_feature (11)..(359): NCBI GI: 145258965 Blast Desc: An04g08710 [Aspergillus niger] gi|134074844|emb|CAK38958.1| protein product [Aspergillus niger]
  misc_feature (9)..(414): NCBI GI: 240278567 Blast Desc: postreplication repair E3 ubiquitin-protein ligase rad18 [Ajellomyces capsulatus H143]
  misc_feature (1)..(359): NCBI GI: 156049181 Blast Desc: SS1G_08297 [Sclerotinia sclerotiorum 1980] gi|154692696|gb|EDN92434.1| SS1G_08297 [Sclerotinia sclerotiorum 1980]
  misc_feature (3)..(363): NCBI GI: 225682068 Blast Desc: postreplication repair E3 ubiquitin-protein ligase rad18 [Paracoccidioides brasiliensis Pb03]
  misc_feature (3)..(363): NCBI GI: 226279975 Blast Desc: postreplication repair E3 ubiquitin-protein ligase rad18 [Paracoccidioides brasiliensis Pb01]
  misc_feature (3)..(363): NCBI GI: 226289244 Blast Desc: postreplication repair E3 ubiquitin-protein ligase rad18 [Paracoccidioides brasiliensis Pb18]
MSNHALDTVTDSTDWLSTPLSGLATVEAALRCQICKDFFKTPMLTSCNHTFCSLCIRRALSTDGKCPLCRASEQELRLRSNWSMEEVVAAFTQARSAVLEFARKPPPTSRRSISPPKRTASEINGSQESSSSSKRLRSSARLSKTRSMEATAEIARQEADMPDLEPEPEPFEPDDGLVACPICWKRMKPIQVDRHLDTSCPGEPRPDPPKRQVKSPPRDSSLPKSITKAFPSASSSSKTPIPTPERLPARNYSMLKDVQLRKELADLGLSTAGGRSFQEKRHREWVMMWNANCDSQRPRRRAELIHDLDIWERTFGSRAPTTSQATTTGAQIKDKDFDGAAWATKHDTSFRDLIANARKSRTQANKQGDEDKGSKPSDGDKENEVDGEIPAMENGDRRMNGNTLPPEGISGVSNLPDSNQMVVDLTSDPVSPIPMSTTETSQQQETI

SEQ ID NO: 6262 - DNA, 1452 bp, Muscodor strobelii
  misc_feature: SGI cDNA ID NO. 561825
  misc_feature: Encodes the peptide sequence at SEQ ID NO 6263
atgagtgaactgctggattatctcaggactcaagagcctgatttcaaaagaaatcggctacaagcgttatactccgacttccgatcacaacgatctctcaacccagatggcttcatcgcgaatgtatcagcttggaaacgcggcctatcgaacgcagctctggccggccatgcaccctccaaatcccctacacggagccatctgaccctcgagctcgatgatgcactccttcgctctctcgacagccccgagttcggtcgacctctcgcactaggatcagtgctacaggaggcgctggccagtggagagatgataccactacctcagttccagaaagcaacacagagcatataccacaagtcatggggcagcataccatgggccgtcgcaggctgggcattccgacagatcggcctctccggcggcccaggcgataaaatgcccaagggccaggccgtaatcgtcgttcggaatctagaagctaccgcaaaagcatttgcagacacaacagcggatcgattatcacccttcgagcgcacattctcacgggcccatttccagcgaacattcgagagcagtctactaaaaggccaaagactatccgaccaagacttctccctactcatcaagtttctctcccgagacaaggaaatactagccacagacgggcacacgatcaaaatcaagaatccctccgaaccatccaccatcaccgaagaagactccgccatcgcctccctcaaagaactcacctccgacctaactcgccaaactgaagcgctaagtcgccgcatcgacgagctgaacacagcagcgcaagacgcagtccgtaggaagaaccgcgtctccgcgctcgccgccctcaaatctcgcaaactagccgaatccaacctcgcgacgcgccacgcaacgctgaaccaactagaagaggtagcgaccaagatccaacaagcagccgacaacgtgcagctcgtccgcgtcatgcagtccagcaccggcgccctcaagtctctaaacgcgcaggtcggaggcgcagataaagtcgatgccatactagacgatctgagggagcagatgggcgaggtagacgaagtgggtaatgtcatcgcagaagcgggacaagtaggagtcgtggatgaggcggaggtcgacgatgaactcgaggctatgctcgcggaggagaggaagaaagagaaagaagcggagcgtgtcaaagaagaagcagagcgtgccaagaaagaagcacgggagaaggaagaggcggaggagacgagacgcaagttggcggaactcgagaaactggctcctgtgcctactgaaggagagaagagaccgcttacgcctgtcacggctacggcgagtgagttggatggtatgcatttagatatggacacatctgagaaggagacagagaaagaggaacgggaacgggaacaggtccctgctgaataa

SEQ ID NO: 6263 - protein, 483 aa, Muscodor strobelii
  misc_feature: SGI Peptide ID NO. 561825
  misc_feature (242)..(408): Pfam Id: PF03357 Pfam Desc: Snf7
  misc_feature (242)..(398): Pfam Id: PF03357 Pfam Desc: Snf7
  misc_feature (1)..(390): NCBI GI: 46116834 Blast Desc: FG04259.1 [Gibberella zeae PH-1]
  misc_feature (1)..(434): NCBI GI: 154299744 Blast Desc: BC1G_11498 [Botryotinia fuckeliana B05.10] gi|150857188|gb|EDN32380.1| BC1G_11498 [Botryotinia fuckeliana B05.10]
  misc_feature (1)..(439): NCBI GI: 39944326 Blast Desc: MGG_04174 [Magnaporthe grisea 70-15] gi|145014910|gb|EDJ99478.1| MGG_04174 [Magnaporthe grisea 70-15]
  misc_feature (4)..(373): NCBI GI: 85106503 Blast Desc: NCU05195 [Neurospora crassa OR74A] gi|28923793|gb|EAA32958.1| conserved [Neurospora crassa OR74A] gi|40882271|emb|CAF06095.1| related to protein SNF7 [Neurospora
  misc_feature (1)..(444): NCBI GI: 255956285 Blast Desc: Pc21g19040 [Penicillium chrysogenum Wisconsin 54-1255] gi|211590606|emb|CAP96801.1| Pc21g19040 [Penicillium chrysogenum Wisconsin 54-1255]
  misc_feature (1)..(434): NCBI GI: 156049183 Blast Desc: SS1G_08298 [Sclerotinia sclerotiorum 1980] gi|154692697|gb|EDN92435.1| SS1G_08298 [Sclerotinia sclerotiorum 1980]
  misc_feature (1)..(483): NCBI GI: 242817443 Blast Desc: vacuolar sorting protein SNF7 family protein, [Talaromyces stipitatus ATCC 10500] gi|218713421|gb|EED12845.1| vacuolar sorting protein SNF7 family protein, [Talaromyces ATCC
  misc_feature (4)..(345): NCBI GI: 171683589 Blast Desc: protein product [Podospora anserina] gi|170941754|emb|CAP67408.1| protein product [Podospora anserina]
  misc_feature (1)..(483): NCBI GI: 212530824 Blast Desc: vacuolar sorting protein SNF7 family protein, [Penicillium marneffei ATCC 18224] gi|210074967|gb|EEA29054.1| vacuolar sorting protein SNF7 family protein, [Penicillium ATCC
  misc_feature (1)..(483): NCBI GI: 225682069 Blast Desc: conserved [Paracoccidioides brasiliensis Pb03]
MSELLDYLRTQEPDFKRNRLQALYSDFRSQRSLNPDGFIANVSAWKRGLSNAALAGHAPSKSPTRSHLTLELDDALLRSLDSPEFGRPLALGSVLQEALASGEMIPLPQFQKATQSIYHKSWGSIPWAVAGWAFRQIGLSGGPGDKMPKGQAVIVVRNLEATAKAFADTTADRLSPFERTFSRAHFQRTFESSLLKGQRLSDQDFSLLIKFLSRDKEILATDGHTIKIKNPSEPSTITEEDSAIASLKELTSDLTRQTEALSRRIDELNTAAQDAVRRKNRVSALAALKSRKLAESNLATRHATLNQLEEVATKIQQAADNVQLVRVMQSSTGALKSLNAQVGGADKVDAILDDLREQMGEVDEVGNVIAEAGQVGVVDEAEVDDELEAMLAEERKKEKEAERVKEEAERAKKEAREKEEAEETRRKLAELEKLAPVPTEGEKRPLTPVTATASELDGMHLDMDTSEKETEKEEREREQVPAE

SEQ ID NO: 6264 - DNA, 4360 bp, Muscodor strobelii
  misc_feature: SGI EST ID NO. CUFF.15742.0
  misc_feature: Variant of the nucleotide sequence at SEQ ID NO 6262
cgcgttttttatttctcgacctcttgccgttcattagtccaactctctcccgaggctcatggcacacttgcacataattagagctcggtgactattctagagttcgtagctcagatctctgatttttcaagacgttaaattctaagagtctgcccactccgagagcttcatgtgtttgtatacatacgtacgtgtgaacccataatctcactgttagaatagggttgtattgcccctcttctggtttagattcacagtcgtattccctgatacgcgaagcaaagagtatcacttctgccctttcctcatggctgttctccgtagtccttactttcaacacttgtgagatcacagcagtcgattgagggcggaatagagccccatgacgcataagtataaatgtaatgagttcaaatgacctcgatggacactatgagtataaggctctaggagatcgaaagaaaataattattaacaaagcagatgggcggcaaactgcaagaatatacgtttgtcctacctcaagaaatccggtccagaacggggttaaataagtatgcggactgatgcagccagctgtatccccaaatacttgagctcacagacagcttacaataggtgtattattcaagtaatagagattaactactaaagaagatacagggtgaccaagactgcggattctcagggttgaccatcacggacccgacagttggagttgttgatgcagccaggcaccaaggaccccaagaataaacccggttggcgtgttgttagtgacgtcgcgttgataagacacgataaacacataggcccagaatcgctttccatcccatcaacttgtaaaccattcagcttctctcgttgaacacacatttcatgcctaatgcctggcaaggcaccgagacaatagcgctcggctgaaatatgatgccgtcttgacccacgactgtgtatgcttctgtcttggtttgctcgatgatgtcaggctgtctctttgtgtcacggcttaagcatcacaaccatcaaccgacccgaagtcgggttgacgatcattcaccatgagtgaactgctggattatctcaggactcaagagcctgatttcaaaagaaatcggctacaagcgttatactccgacttccgatcacaacgatctctcaacccagatggcttcatcgcgaatgtatcagcttggaaacgcggcctatcgaacgcagctctggccggccatgcaccctccaaatcccctacacggagccatctgaccctcgagctcgatgatgcactccttcgctctctcgacagccccgagttcggtcgacctctcgcactaggatcagtgctacaggaggcgctggccagtggagagatgataccactacctcagttccagaaagcaacacagagcatataccacaagtcatggggcagcataccatgggccgtcgcaggctgggcattccgacagatcggcctctccggcggcccaggcgataaaatgcccaagggccaggccgtaatcgtcgttcggaatctagaagctaccgcaaaagcatttgcagacacaacagcggatcgattatcacccttcgagcgcacattctcacgggcccatttccagcgaacattcgagagcagtctactaaaaggccaaagactatccgaccaagacttctccctactcatcaagtttctctcccgagacaaggaaatactagccacagacgggcacacgatcaaaatcaagaatccctccgaaccatccaccatcaccgaagaagactccgccatcgcctccctcaaagaactcacctccgacctaactcgccaaactgaagcgctaagtcgccgcatcgacgagctgaacacagcagcgcaagacgcagtccgtaggaagaaccgcgtctccgcgctcgccgccctcaaatctcgcaaactagccgaatccaacctcgcgacgcgccacgcaacgctgaaccaactagaagaggtagcgaccaagatccaacaagcagccgacaacgtgcagctcgtccgcgtcatgcagtccagcaccggcgccctcaagtctctaaacgcgcaggtcggaggcgcagataaagtcgatgccatactagacgatctgagggagcagatgggcgaggtagacgaagtgggtaatgtcatcgcagaagcgggacaagtaggagtcgtggatgaggcggaggtcgacgatgaactcgaggctatgctcgcggaggagaggaagaaagagaaagaagcggagcgtgtcaaagaagaagcagagcgtgccaagaaagaagcacgggagaaggaagaggcggaggagacgagacgcaagttggcggaactcgagaaactggctcctgtgcctactgaaggagagaagagaccgcttacgcctgtcacggctacggcgagtgagttggatggtatgcatttagatatggacacatctgagaaggagacagagaaagaggaacgggaacgggaacaggtccctgctgaataaggggatgggaacacgggaatataaattggacattttggcatgacattgctcaggttgttcctacatacatttcgtgatatgtgtgtgaaatagctacgtgatttgctcgctcgctgctcgtgtagatgctatatagtctcttgctgctgtgaagtctctgttgtgctcattggtattggcgaaacaggatcgctggtcaaatcaacaaccatctggtttgaatccggtaaattcgatacgcctgatatcccttctggcggtagcgtattcccattcatcctccgatcaccattctccatggcaggaatctccccatctacctcattctctttatctccatcactgggtttgctacccttatcctcgtcaccttgtttgtttgcctgcgtccttgacttcctcgcattggctatcaaatcacgaaacgaagtatcatgcttcgtagcccaagcagctccatcgaaatccttatcttttatctgcgcccctgtagtggtggcctgcgacgtcgttggcgcgcgtgagccaaatgtacgttcccaaatatcgagatcatgtatcaactcggctcgccgccttggtcgctgggagtcgcaatttgcattccacatcatgacccattccctgtgccgtttttcttggaatgatctaccgcccgctgtggagagaccaaggtcggctagttctttgcgcagttggacgtctttgagcattgagtagttgcgtgctgggagtcgttcgggggttggtatgggtgttttcgatgagctggaagcggaaggaaaagcctttgttatgcttttcggtagtgaggagtctcgtggcggagattttacctgccgcttggggggatctggccgcggctcccctgggcaggaggtgtcgaggtgtctatccacttgtataggtttcatgcgtttccagcagatgggacatgcaacaagaccatcgtcaggctcaaagggctcgggttctggctctagatcgggcatatcggcttcttgtcgcgctatctctgctgtggcctccatgcttcgagtcttgctgagccgtgctgaggaccgtagtctcttgcttgaggatgatgattcctgactgccgtttatttcactggctgttctcttcggaggtgatatcgagcgtcgggaggtcggtgggggttttcgagcaaattcaaggacagcagaccgagcctgtgtgaaggcagcaacaacttcttccatggaccaattgctcctcagcctcaactcctgctctgaagcacgacatagtggacatttgccgtcggtggacagtgcgcgacggatgcaaagagagcagaatgtgtgattgcaagaggtcaacatgggcgtcttgaagaagtctttgcatatctggcagcgaagggcagcctcgacggtggcaagacctgacagcggcgttgaaagccagtctgtcgaatcggtgacagtatcaagcgcatggttactcatgtttgagacggtcagagtaaatagcgtgatatgaacgtgtttcgatggaacaaggtagatgggagggtatggtcgcaaaagtccgaatcgcagtcaagaagtgaaggtgcccaattcgaacgatttcgaggtcgctatgtgacagccctctgatgtgcaagatagttgtatgtgaggcgatttgggcaatactcttctgaaggtctttgttaggatgccctagtagcagagaacgcatgtggcatggacaacgaataaaatttgggttgctgtcgcaataaactcatggtgtctttgtctcaactaattgaacattttcatgtatgacggggagaatggccgtggcgacggacaacaggcgacgagacgcgcttg

SEQ ID NO: 6265 - DNA, 900 bp, Muscodor strobelii
  misc_feature: SGI cDNA ID NO. 561826
  misc_feature: Elevated expression when VOC is produced
  misc_feature: Encodes the peptide sequence at SEQ ID NO 6266
atggctactattccaacactgaagttgaacgatggaaatgggcttcctgtgctagcttatggattcggcacatcgcacttcgcagcaaaagaggaagatctaacaagtgccgtcgctctagccaccaagaacggctactatcatctggacaacgcagaatgctatctgaacgaagccggtgtcggcgccggcatcaaagcgtctggtatagaccggtctaagctatacgtagcgactaaagtaataggaagcatcggccaggacattgctgcggctctcgacacgtccctggcgaagcttggtctcgattatgttgatttgtacctggtccacacgcctttctctgctggatcagataagggcgaacgtaatatctgggcgcagatggaagccgtgaaggcctctggcaaggccaaatctatcggcgtctccaacttccagattaaggatcttgaaaacattctgagcacagctaaagttgtacctgctgtgaatcaaatcgagtttcatccctaccaccagcagagagagctcgttgacttttgccgcaagaaaggaatcgccgtcagtgcatactcggccctctctgctctaggcgccggcaaacccgggcctgctgacgatgtgtacgccgaacttgctaagaagtacggcgttactgatagcgatattggcttgcgatggtgcttggaccaagatattgccgttgttacgttgagtaagaatgaggagcggctccagggcttcctgaagaatatgttgaaattcaaacttgagccggcggatgttgagaagttgacggaggctggtaaagggaaggcttatcaaggaattggcatctcattcttgtcgaattactacggaaactaccagactggcgttgaagctccgaaggcttga

SEQ ID NO: 6266 - protein, 299 aa, Muscodor strobelii
  misc_feature: SGI Peptide ID NO. 561826
  misc_feature (9)..(271): Pfam Id: PF00248 Pfam Desc: Aldo/keto reductase family
  misc_feature (4)..(278): NCBI GI: 171688682 Blast Desc: protein product [Podospora anserina] gi|170944303|emb|CAP70413.1| protein product [Podospora anserina]
  misc_feature (3)..(278): NCBI GI: 189194960 Blast Desc: aldo-keto reductase family 1 member C13 [Pyrenophora tritici-repentis Pt-1C-BFP] gi|187979697|gb|EDU46323.1| aldo-keto reductase family 1 member C13 [Pyrenophora tritici-repentis
  misc_feature (1)..(278): NCBI GI: 154318898 Blast Desc: BC1G_02838 [Botryotinia fuckeliana B05.10] gi|150857968|gb|EDN33160.1| BC1G_02838 [Botryotinia fuckeliana B05.10]
  misc_feature (4)..(276): NCBI GI: 85083767 Blast Desc: NCU01759 [Neurospora crassa OR74A] gi|7800878|emb|CAB91236.1| related to aldo-keto reductase YPR1 [Neurospora crassa] gi|28918269|gb|EAA27946.1| NCU01759 crassa
  misc_feature (1)..(276): NCBI GI: 239613567 Blast Desc: ketoreductase [Ajellomyces dermatitidis ER-3]
  misc_feature (1)..(276): NCBI GI: 261192886 Blast Desc: ketoreductase [Ajellomyces dermatitidis SLH14081] gi|239588984|gb|EEQ71627.1| ketoreductase [Ajellomyces dermatitidis SLH14081]
  misc_feature (4)..(278): NCBI GI: 39942160 Blast Desc: MGG_03160 [Magnaporthe grisea 70-15] gi|145015859|gb|EDK00349.1| MGG_03160 [Magnaporthe grisea 70-15]
  misc_feature (4)..(278): NCBI GI: 256732959 Blast Desc: [Nectria haematococca mpVI 77-13-4]
  misc_feature (4)..(288): NCBI GI: 115385945 Blast Desc: conserved [Aspergillus terreus NIH2624] gi|114187966|gb|EAU29666.1| conserved [Aspergillus terreus NIH2624]
  misc_feature (3)..(276): NCBI GI: 169597949 Blast Desc: SNOG_01769 [Phaeosphaeria nodorum SN15] gi|160707626|gb|EAT91418.2| SNOG_01769 [Phaeosphaeria nodorum SN15]
  misc_feature (12)..(270): SWISSPROT Homolog: EC 1.1.1.190 Indole-3-acetaldehyde reductase (NADH)
  misc_feature (12)..(270): SWISSPROT Homolog: EC 1.1.1.191 Indole-3-acetaldehyde reductase (NADPH)
  misc_feature: Useful for introducing or modulating the production of volatile compounds
MATIPTLKLNDGNGLPVLAYGFGTSHFAAKEEDLTSAVALATKNGYYHLDNAECYLNEAGVGAGIKASGIDRSKLYVATKVIGSIGQDIAAALDTSLAKLGLDYVDLYLVHTPFSAGSDKGERNIWAQMEAVKASGKAKSIGVSNFQIKDLENILSTAKVVPAVNQIEFHPYHQQRELVDFCRKKGIAVSAYSALSALGAGKPGPADDVYAELAKKYGVTDSDIGLRWCLDQDIAVVTLSKNEERLQGFLKNMLKFKLEPADVEKLTEAGKGKAYQGIGISFLSNYYGNYQTGVEAPKA

SEQ ID NO: 6267 - DNA, 1941 bp, Muscodor strobelii
  misc_feature: SGI EST ID NO. CUFF.15744.0
  misc_feature: Variant of the nucleotide sequence at SEQ ID NO 6265
gttgactagaaacatcggcagtaaatcgatttcgataccgactgaagaccggctaacctgcaaagaattccatctcaagaattgagtttgtcaaaatatataggaatacatttctttcaccatggctactattccaacactgaagttgaacgatggaaatgggcttcctgtgctagcttatggattcggcacatcgcacttcgcagcaaaagaggaagatctaacaagtgccgtcgctctagccaccaagaacggctactatcatctggacaacgcagaatgctatctgaacgaagccggtgtcggcgccggcatcaaagcgtctggtatagaccggtctaagctatacgtagcgactaaagtaataggaagcatcggccaggacattgctgcggctctcgacacgtccctggcgaagcttggtctcgattatgttgatttgtacctggtccacacgcctttctctgctggatcagataagggcgaacgtaatatctgggcgcagatggaagccgtgaaggcctctggcaaggccaaatctatcggcgtctccaacttccagattaaggatcttgaaaacattctgagcacagctaaagttgtacctgctgtgaatcaaatcgagtttcatccctaccaccagcagagagagctcgttgacttttgccgcaagaaaggaatcgccgtcagtgcatactcggccctctctgctctaggcgccggcaaacccgggcctgctgacgatgtgtacgccgaacttgctaagaagtacggcgttactgatagcgatattggcttgcgatggtgcttggaccaagatattgccgttgttacgttgagtaagaatgaggagcggctccagggcttcctgaagaatatgttgaaattcaaacttgagccggcggatgttgagaagttgacggaggctggtaaagggaaggcttatcaaggaattggcatctcattcttgtcgaattactacggaaactaccagactggcgttgaagctccgaaggcttgaacaaaatatatcgcaggtggctccagtcagagttcctcagcagcaaaatgttagatttgattaggaaaagtcagacactatgcaatgactcttactagactgcgctcctaaatgcgagttgttgttacgagttagtggggaaaatagctcttggtgttacccaacgacctattcctatatcgcgaagcaactcatttcacggctgttaagacgggtaagtgtagataaacgaatgtttgctagccaatgaagaccaatctactaactaccagttcttattacgcattaatgtgagcccttcatttgacactcagtcgcaagagcatcatttgctcaaatgcgcctgaatgcctgtattccgcccatgttctatacaattttccaatatcagccttgccgatgctatcgagggaagaaagcgagggacaattccttcgatagcctcgccgtttatccctccatgttatgcccaatgtgtatatgtcgaatcatttatagcacccaggcgacggcggcagcgacgagggccccggtggaaacgaagacactggaggcagcacctggtgttgggatagggtagcagttttgagtaccgccggcacgcctggtcaagttgtggctttcgaccagggagcagatatgtgtggcgttgcggaccgttgcgttggctagatcgccaccctcgggtgggccattcgttgtgaaagttgtgacattgtggttgttcagggcaacggccgtggcgccagtggtgactgccaggacggagagaagagtggtgaattgcatgattgcggttgtagtgaatgtgtaaagttgggttgagatgatgttttcgaacttcaagcgagtgtagatacaaagacacgggttggtgtagtgtggctttggaagttaggtagaaaggaaggaaatcaaag

SEQ ID NO: 6268 - DNA, 297 bp, Muscodor strobelii
  misc_feature: SGI cDNA ID NO. 561827
  misc_feature: Encodes the peptide sequence at SEQ ID NO 6269
atgcaattcaccactcttctctccgtcctggcagtcaccactggcgccacggccgttgccctgaacaaccacaatgtcacaactttcacaacgaatggcccacccgagggtggcgatctagccaacgcaacggtccgcaacgccacacatatctgctccctggtcgaaagccacaacttgaccaggcgtgccggcggtactcaaaactgctaccctatcccaacaccaggtgctgcctccagtgtcttcgtttccaccggggccctcgtcgctgccgccgtcgcctgggtgctataa

SEQ ID NO: 6269 - protein, 98 aa, Muscodor strobelii
  misc_feature: SGI Peptide ID NO. 561827
MQFTTLLSVLAVTTGATAVALNNHNVTTFTTNGPPEGGDLANATVRNATHICSLVESHNLTRRAGGTQNCYPIPTPGAASSVFVSTGALVAAAVAWVL

SEQ ID NO: 6270 - DNA, 1878 bp, Muscodor strobelii
  misc_feature: SGI cDNA ID NO. 561828
  misc_feature: Encodes the peptide sequence at SEQ ID NO 6271
atggctagcataagcgcagagccagttccttccagccagcgagtggtcccaggatctatcaacattcccatagcctcgtggccttcaaccgtggacgtgaacgaagaaacgtgcaatgctatcgagatatcgtctaagatcatagattccttcaacgactctttgaagaaagaagattatcaggctatcgcgaacctattccgcaatgacgggtattggcgggatcacctcggccttgcttgggatctccggactgctaaaggcaaagacaagattatcagttttttgaaagaaggtcatgggctagttaaagttgatatagataattctgcccctgatcatggacctcgagttgttcccttgagacatgacggttcggtgaagggaattcaattttttaccactgtcaccaataaatggggctcagggcgtggcttagtccgtctgatccaggaatcaggagaatggaaaatctggactttcttcacatcgacggatgagcttgtaggccatgaggaagcattgggaccaaaccgagccaatggtgtacaacatggcgctcaagcagggcggaaaaactggctagaaaggaggaaggctgaggtcaacttcgaagatagagatccagaagttttgatcatcggttgtggccaggctggcttgaccgttcacgctcgattaaagatgctccaagttccagcgctcacgatagatcgcagtgagaacattggagacaattggcgaaatcgctatcatcagcttgtgctccatgatcccatctggtacgatcacttcccttacatcccattcccgaaattttggccggttttcacaccaaaggacaaaatcgccgactttctcaaatcatacgccgatatgttggagttgaatgtctggaatagcacggagcttgaatccagcacctgggacaatgacaagaaacagtggacagtggttttgaagcggaaacatgaagatgggaccgtcgagacaaggaccatgcacccaaaacatatcattcaagctactggtcactcaggcaagaagaactatcccgagttcaagggaatggagaccttcaaaggcgatgtgctttgtcattcatcagaattccgcggcgccaagaaggacgcgaagggccgaaaagccgttgtcgttgggtcatgtaattcggcactcgacattgcacaggactactacgaaaacggctatgacgttacaataatccagcggtcttccacagcagtaatgagcagtaagactgttctggagttattactaggcactatctattccgagaacggtccacccgtggaagatggagatatcctgagctggagtacgccccaagaaattttcaaagctatcaacgccgatgtaaacgttctacaagaagcccatgacagagagatcctgaacgggttgaacaaagcgggattcaagactgatagaggaccgatggactgtggcttatggttcaagtatctgcagcgaggtggaggatactacattgatgttggaacgtcgcagttgatcatagatggcaaagtcaaggttcagcatgggtctggtgtcgcagaaattttatcaagcggacttcgccttgagaatggcaccgaacttgaggcagatgaaattgtctgtgctacgggataccaaaatatgcgaacggccacagagctcatattcggacaagatgttgcgagcaaagttgacaacgtctgggggttcgacgaagaaggagaaacaagaattatgtggcgccgtagtggtcatccaggactctggcttcatggaggcaacctggctatgtgtcgctacttttctcgaattgttgctcttcagatcaaagcgcagctagagggcatagctttttaa

SEQ ID NO: 6271 - protein, 625 aa, Muscodor strobelii
  misc_feature: SGI Peptide ID NO. 561828
  misc_feature (516)..(551): Pfam Id: PF00070 Pfam Desc: Pyridine nucleotide-disulphide oxidoreductase
  misc_feature (10)..(623): NCBI GI: 121707378 Blast Desc: conserved [Aspergillus clavatus NRRL 1] gi|119399963|gb|EAW10389.1| conserved [Aspergillus clavatus NRRL 1]
  misc_feature (10)..(623): NCBI GI: 119500684 Blast Desc: FAD dependent oxidoreductase, [Neosartorya fischeri NRRL 181] gi|119415264|gb|EAW25202.1| FAD dependent oxidoreductase, [Neosartorya fischeri NRRL 181]
  misc_feature (10)..(623): NCBI GI: 159125182 Blast Desc: conserved [Aspergillus fumigatus A1163]
  misc_feature (10)..(623): NCBI GI: 70994112 Blast Desc: flavin-binding monooxygenase-like protein [Aspergillus fumigatus Af293] gi|66849537|gb|EAL89865.1| flavin-binding monooxygenase-like protein [Aspergillus fumigatus Af293]
  misc_feature (14)..(623): NCBI GI: 256723461 Blast Desc: NECHADRAFT_94035 [Nectria haematococca mpVI 77-13-4]
  misc_feature (9)..(618): NCBI GI: 169773347 Blast Desc: [Aspergillus oryzae RIB40] gi|83769003|dbj|BAE59140.1| protein product [Aspergillus oryzae]
  misc_feature (12)..(623): NCBI GI: 145257600 Blast Desc: An04g04270 [Aspergillus niger] gi|134058707|emb|CAK38691.1| protein product [Aspergillus niger]
  misc_feature (9)..(618): NCBI GI: 238491316 Blast Desc: flavin-binding monooxygenase-like protein [Aspergillus flavus NRRL3357] gi|220697308|gb|EED53649.1| flavin-binding monooxygenase-like protein [Aspergillus flavus NRRL3357]
  misc_feature (9)..(624): NCBI GI: 115397719 Blast Desc: conserved [Aspergillus terreus NIH2624] gi|114192642|gb|EAU34342.1| conserved [Aspergillus terreus NIH2624]
  misc_feature (1)..(623): NCBI GI: 46116146 Blast Desc: FG03915.1 [Gibberella zeae PH-1]
MASISAEPVPSSQRVVPGSINIPIASWPSTVDVNEETCNAIEISSKIIDSFNDSLKKEDYQAIANLFRNDGYWRDHLGLAWDLRTAKGKDKIISFLKEGHGLVKVDIDNSAPDHGPRVVPLRHDGSVKGIQFFTTVTNKWGSGRGLVRLIQESGEWKIWTFFTSTDELVGHEEALGPNRANGVQHGAQAGRKNWLERRKAEVNFEDRDPEVLIIGCGQAGLTVHARLKMLQVPALTIDRSENIGDNWRNRYHQLVLHDPIWYDHFPYIPFPKFWPVFTPKDKIADFLKSYADMLELNVWNSTELESSTWDNDKKQWTVVLKRKHEDGTVETRTMHPKHIIQATGHSGKKNYPEFKGMETFKGDVLCHSSEFRGAKKDAKGRKAVVVGSCNSALDIAQDYYENGYDVTIIQRSSTAVMSSKTVLELLLGTIYSENGPPVEDGDILSWSTPQEIFKAINADVNVLQEAHDREILNGLNKAGFKTDRGPMDCGLWFKYLQRGGGYYIDVGTSQLIIDGKVKVQHGSGVAEILSSGLRLENGTELEADEIVCATGYQNMRTATELIFGQDVASKVDNVWGFDEEGETRIMWRRSGHPGLWLHGGNLAMCRYFSRIVALQIKAQLEGIAF

SEQ ID NO: 6272 - DNA, 1733 bp, Muscodor strobelii
  misc_feature: SGI EST ID NO. CUFF.15751.0
  misc_feature: Variant of the nucleotide sequence at SEQ ID NO 6270
caattttttaccactgtcaccaataaatggggctcagggcgtggcttagtccgtctgatccaggaatcaggagaatggaaaatctggactttcttcacatcgacggatgagcttgtaggccatgaggaagcattgggaccaaaccgagccaatggtgtacaacatggcgctcaagcagggcggaaaaactggctagaaaggaggaaggctgaggtcaacttcgaagatagagatccagaagttttgatcatcggttgtggccaggctggcttgaccgttcacgctcgattaaagatgctccaagttccagcgctcacgatagatcgcagtgagaacattggagacaattggcgaaatcgctatcatcagcttgtgctccatgatcccatctggtacgatcacttcccttacatcccattcccgaaattttggccggttttcacaccaaaggacaaaatcgccgactttctcaaatcatacgccgatatgttggagttgaatgtctggaatagcacggagcttgaatccagcacctgggacaatgacaagaaacagtggacagtggttttgaagcggaaacatgaagatgggaccgtcgagacaaggaccatgcacccaaaacatatcattcaagctactggtcactcaggcaagaagaactatcccgagttcaagggaatggagaccttcaaaggcgatgtgctttgtcattcatcagaattccgcggcgccaagaaggacgcgaagggccgaaaagccgttgtcgttgggtcatgtaattcggcactcgacattgcacaggactactacgaaaacggctatgacgttacaataatccagcggtcttccacagcagtaatgagcagtaagactgttctggagttattactaggcactatctattccgagaacggtccacccgtggaagatggagatatcctgagctggagtacgccccaagaaattttcaaagctatcaacgccgatgtaaacgttctacaagaagcccatgacagagagatcctgaacgggttgaacaaagcgggattcaagactgatagaggaccgatggactgtggcttatggttcaagtatctgcagcgaggtggaggatactacattgatgttggaacgtcgcagttgatcatagatggcaaagtcaaggttcagcatgggtctggtgtcgcagaaattttatcaagcggacttcgccttgagaatggcaccgaacttgaggcagatgaaattgtctgtgctacgggataccaaaatatgcgaacggccacagagctcatattcggacaagatgttgcgagcaaagttgacaacgtctgggggttcgacgaagaaggagaaacaagaattatgtggcgccgtagtggtcatccaggactctggcttcatggaggcaacctggctatgtgtcgctacttttctcgaattgttgctcttcagatcaaagcgcagctagagggcatagctttttaatggtgcgttagcgatatgatgggtcggtaatactctcacacgagttgctgaagtgacagcatatagcgtctatttgtactacagatatgtagaaatagcaacatctaggggatcataggtaactagttcctataatcagatggtcttgggggtgatgtaagtgttgatgatatccacggccatcgccttagtggattggggtgtacgtacgtatggaagcgtacaagtccactttcttgttgaat

SEQ ID NO: 6273 - DNA, 1263 bp, Muscodor strobelii
  misc_feature: SGI cDNA ID NO. 561829
  misc_feature: Reduced expression when VOC is produced
  misc_feature: Encodes the peptide sequence at SEQ ID NO 6274
atgtccgatcttcgccgtgtcccatcctcaggtgccgttgaggtcggctaccctgccgggcatctaggacacctcacggaacacgaggcacaggcgctcgtagacttcaaggcgcttctagaacagaagaaagcctacaaaccagggccaccgccgtcccacgaagacgctcatttgcttcgatatctacgcgctcgcaaatgggttcctcaagatgcatatgtccagttcagcgagacggagaaattccgcggcgccaatgagatagacgttctctacgacacaatcgacatcgactcgtacgaagcttcgaggaaattgtatcccagatttactggccgtcgcgacaaacgaggcataccgatctacgtctatcaaatccgacatctcgactccaaagcagttgcagactacgagaaatcaaccgagacgacctacagcaaagccaagacagacggaaagacacaacccaagctactgcgtctctttgcattgtacgagaatttgacgaggttcgtccagccgctgtcgaccgagtgcaccgatcgtgaaaatgcgcagacgcccatcacgctctctacgaatatcgtcgatatctcacacgtcagtctacgcatgttctggaatctgaagggccatatgcaagccgccagtcagcttgctactgcgcattatcccgagacgctcgatcgcatcttcatcatcggcgccccctatttcttctcaacggtatggggctggatcaagcgatggtttgaccccgtcaccgtctccaaaatcttcatcctcagcgaccacgacgtgctccccgtcctgacgacattcatggagatgaaagacatacccaaaggctacggcggcgaactcgaatggtccttcttcgacgagccggcctgggacgacgagatcaaaaagatagtaaaatgggagaatggccacactgcattcccgatgggcccttgctattggcaacctaccgcggacggacaacgggtcgagtgtcttgcggtcggtagcaaaggcggaaaggagcgccacgaggtcgtctgcagcatccccaaggccttcccgaagaaagaggcaaacccgactgaagccgtggtagcggatgacgagaaggcagatgccacgacagatgtatcaaagctccaggctgtagctgatttgaagattaccgatcccaaggattcagccgaaggactctctgagaaactcgcttcccaatctcaagagcctacttcggaaaacaaagtagcatcttga

SEQ ID NO: 6274 - protein, 420 aa, Muscodor strobelii
  misc_feature: SGI Peptide ID NO. 561829
  misc_feature (132)..(315): Pfam Id: PF00650 Pfam Desc: CRAL/TRIO domain
  misc_feature (20)..(89): Pfam Id: PF03765 Pfam Desc: CRAL/TRIO, N-terminus
  misc_feature (183)..(292): Pfam Id: PF00650 Pfam Desc: CRAL/TRIO domain
  misc_feature (6)..(360): NCBI GI: 116194918 Blast Desc: CHGG_04057 [Chaetomium globosum CBS 148.51] gi|88179970|gb|EAQ87438.1| CHGG_04057 [Chaetomium globosum CBS 148.51]
  misc_feature (2)..(404): NCBI GI: 170940304 Blast Desc: protein product [Podospora anserina]
  misc_feature (14)..(356): NCBI GI: 145602390 Blast Desc: MGG_04947 [Magnaporthe grisea 70-15] gi|145010818|gb|EDJ95474.1| MGG_04947 [Magnaporthe grisea 70-15]
  misc_feature (12)..(386): NCBI GI: 85107954 Blast Desc: NCU07320 [Neurospora crassa OR74A] gi|28924085|gb|EAA33242.1| conserved [Neurospora crassa OR74A]
  misc_feature (4)..(406): NCBI GI: 261352665 Blast Desc: Sec14 cytosolic factor [Verticillium albo-atrum VaMs.102]
  misc_feature (6)..(414): NCBI GI: 256728087 Blast Desc: [Nectria haematococca mpVI 77-13-4]
  misc_feature (9)..(356): NCBI GI: 46121213 Blast Desc: FG04985.1 [Gibberella zeae PH-1]
  misc_feature (20)..(349): NCBI GI: 67515923 Blast Desc: AN0243.2 [Aspergillus nidulans FGSC A4] gi|40746960|gb|EAA66116.1| AN0243.2 [Aspergillus nidulans FGSC A4] gi|259489539|tpe|CBF89893.1| TPA: phosphatidylinositol FGSC
  misc_feature (9)..(349): NCBI GI: 115400255 Blast Desc: conserved [Aspergillus terreus NIH2624] gi|114191382|gb|EAU33082.1| conserved [Aspergillus terreus NIH2624]
  misc_feature (20)..(382): NCBI GI: 258570887 Blast Desc: conserved [Uncinocarpus reesii 1704] gi|237904517|gb|EEP78918.1| conserved [Uncinocarpus reesii 1704]
  misc_feature: Useful for introducing or modulating the production of volatile compounds
MSDLRRVPSSGAVEVGYPAGHLGHLTEHEAQALVDFKALLEQKKAYKPGPPPSHEDAHLLRYLRARKWVPQDAYVQFSETEKFRGANEIDVLYDTIDIDSYEASRKLYPRFTGRRDKRGIPIYVYQIRHLDSKAVADYEKSTETTYSKAKTDGKTQPKLLRLFALYENLTRFVQPLSTECTDRENAQTPITLSTNIVDISHVSLRMFWNLKGHMQAASQLATAHYPETLDRIFIIGAPYFFSTVWGWIKRWFDPVTVSKIFILSDHDVLPVLTTFMEMKDIPKGYGGELEWSFFDEPAWDDEIKKIVKWENGHTAFPMGPCYWQPTADGQRVECLAVGSKGGKERHEVVCSIPKAFPKKEANPTEAVVADDEKADATTDVSKLQAVADLKITDPKDSAEGLSEKLASQSQEPTSENKVAS

SEQ ID NO: 6275 - DNA, 5756 bp, Muscodor strobelii
  misc_feature: SGI EST ID NO. CUFF.15995.0
  misc_feature: Variant of the nucleotide sequence at SEQ ID NO 6273
gaatatttgaggagagatagatcacatcggcagggcgaccacgggattcttttggatttcagccctacctttaataactcggccgcggatcggctgcctataattgtagatcattagcatcgcagtccgtgccaacgcccgccgctatcgccgagttgtactctagaatagccccggtagctcagctagtcagctactctcgcctcgacaaccagcgtgataccgtgctaccacgtcgttcgctgtcgccatgtccgatcttcgccgtgtcccatcctcaggtgccgttgaggtcggctaccctgccgggcatctaggacacctcacggaacacgaggcacaggcgctcgtagacttcaaggcgcttctagaacagaagaaagcctacaaaccagggccaccgccgtcccacgaagacgctcatttgcttcgatatctacgcgctcgcaaatgggttcctcaagatgcatatgtccagttcagcgagacggagaaattccgcggcgccaatgagatagacgttctctacgacacaatcgacatcgactcgtacgaagcttcgaggaaattgtatcccagatttactggccgtcgcgacaaacgaggcataccgatctacgtctatcaaatccgacatctcgactccaaagcagttgcagactacgagaaatcaaccgagacgacctacagcaaagccaagacagacggaaagacacaacccaagctactgcgtctctttgcattgtacgagaatttgacgaggttcgtccagccgctgtcgaccgagtgcaccgatcgtgaaaatgcgcagacgcccatcacgctctctacgaatatcgtcgatatctcacacgtcagtctacgcatgttctggaatctgaagggccatatgcaagccgccagtcagcttgctactgcgcattatcccgagacgctcgatcgcatcttcatcatcggcgccccctatttcttctcaacggtatggggctggatcaagcgatggtttgaccccgtcaccgtctccaaaatcttcatcctcagcgaccacgacgtgctccccgtcctgacgacattcatggagatgaaagacatacccaaaggctacggcggcgaactcgaatggtccttcttcgacgagccggcctgggacgacgagatcaaaaagatagtaaaatgggagaatggccacactgcattcccgatgggcccttgctattggcaacctaccgcggacggacaacgggtcgagtgtcttgcggtcggtagcaaaggcggaaaggagcgccacgaggtcgtctgcagcatccccaaggccttcccgaagaaagaggcaaacccgactgaagccgtggtagcggatgacgagaaggcagatgccacgacagatgtatcaaagctccaggctgtagctgatttgaagattaccgatcccaaggattcagccgaaggactctctgagaaactcgcttcccaatctcaagagcctacttcggaaaacaaagtagcatcttgaaaatatacccgacatagataacaggataggcatatagatacaggcacacatccaggctatgaggcacattggatctagaggttgccgggatgatcggtgttcaatgatttcagagtgccacattttgaattaacgcgatgtggcacatgcgaattggtacatagaaagggtatcatatttctgctcaacgtacatactggaatgagaccccatgcgatgcactctgtagcttttgcctaagaattagactctatgtatctgatgtatgcaaccgatggagtctggctccaattctcggttttgtttcccagaatgtccccaacgccgtgcttcatgatctcgtgaatgtcctctggtctagttaggtggcatctcgtcgacgccttggcgacgtcgccactccttgatgccgttctcgacctcggcccatgagacaccatctcgaacgagccactgcagcaagagttagctgtgaaatcatagaaagatacgtctgtgaaggcataagtttggtaggaaaaagaaatggaacaaggcaagaaactcctgagcataccatagtaacacccaacgactccgtgtcacgattccgactctcatcatcaaagaacagcatgtctttaaagggaatagaagtgcgcttatgcaggacctcgaaatgtctgatcttagtgcttgggtagcactccaaacccatatcaaagaactcaatcgccttcctcgtcttgtccttgctcttaccactcacagcaccctctgcgccatcaacagccaagacagaagaagcgggcgggacgtggagcagtcgcagcatctccttggcgagatcgggagcctgggtgcgactggcgaccccgagcttgacgcctgcgatggacagcccgtgcaggatggccgtgatgtcgcggtagaagccgaaggactcgccgatcttatcggtgcaggcgctgtggtcggcggtggcgcggaggggcgggtagacgtgcgtgtcgacccaaaagggccaaagcgtgtagtcgaggtcgaagacgatggcgcgtggaagaggcagaccgtcgcggagaattcgggggagggtggagagagcggcggtggtgagggaggtgctggtgttttgtttggagagtttcttcggcatcgtgggttgtgttggtcgcctgactgcgccctgaattgttgaaaagggtatggatagtgacgtgaggaacggaaccaagagcccgaagtatgtcacagatgagaaatgaaggtgctccagctggttctcatcacaaccaggatgtgatcgaggaagaaaagctgaagcgaggagacatgtgattgctaccaaacccaatatcttcttcattcaatggtttgcccccggattcagtgttgaccatggttcaatgttgaccttgattccgccatctgagaagtgctccgtcatggaggggcactttggaggggcagaaacggtcaaatccaggccgtcgccagctgcactcagcactcgtccttccccaaaatgttccccgcaataccaagcgtaccccatcttcgacctcaccctcaccatcatctactccaactttccatgtcactctctccctccatcatatatctgctgtctgcggggttaaaaatgatgccgacaatcttacatgagcattatatatccatcctcccatgtggctagagcctctatggagcgatgtcatggcgctggatcttcctaagccgagcaggagctgtcgtgcatggcttgaacgcaaactcagccctctctaagcaatacatgctacaaaagcagcgtatttcgaactgccgagtatgctcactacacagaaagcggggccggcatacgcggacgtctgcttcgcaccgagctccaacacctaagacctgaatgctccaaggagctgttgtcttagactgcgtttcctaattggttcatctttttactgtacagcatctcgtacgagtaggtcgtaggtcgtaggccgagcatgccacacggactcctccactagcacccgagccgaccactatttaaccgtccttgcgcgagctcatgctgtaatacataagccgcaggcgcgccgcggcccgtctgtgtgtagctggtgacatgtagatgccttttgcgacattttgtagactacaatttatcttctagaaacatccctacctaagtaattatttgctcgagtgtctgcgcttccaacatgacaggcaagatccagctagtgcgcgtggcacacgtctactacaaatacgcagacctcgacaaggccaggacattcctccttgactttggctttaccgaagagaagcaagtgggagacgacaagatctacttccgcggttacggtacagagccatgggtcctctgcgccatcaaggccgagaaaaatgaattcggaggagccggcttcgtcgtcgagtctgaggaagatctacaaacagccacagagatactcccaaaagcatctaagatctacgacttggtcgatgccccgggaggcggcaaatgcgtgacgttccatgatccggttgatggattccctcttcatcttgtttatggccagcaaaaggaacagatgctcgatatacctttgccacatacacctgtgaactatccaacagagaagaatcgacccgtaaataaattccagcgcttcagcaagcggccagcaccagtccataaactgggacacttcggcgtgcgaacgaccaattttgccaaggctcacgagttctacacctccaattttaacttcctcgcgagcgatctaatccacgacgccgataaaatcgaccgcacagtcttttaccggctgaaccgggggtccgaagaagtcgaccaccacgttttcttcttcgccgaaggcagcacctataaagtgcaccactcgtcatttgagacgcatgacttcgacacccaggtgctcggtcatgattggctcagagagaagggatataagaattgctggggcgtcggacggcatgtcctcgggagccagattttcgattactggtatgacccgagcggctttatcatggagcattacgtcgatggggatcaagtcaatgctgacgagccgacacatcgctcgcaagctgggccgggaagtcttcatgtttggggccctgaggtgcctagcgatttcttggattaactgttgggagtctactcgtggtcagattggatccttgtatactcgttatgtaaattcgggaaaattcaggcaaaccaacttaaaagagtgaagattagtgactttagatatcttgatctcgttttaatcattggttgacaattgtatgctattcccattcgactatttgaggcatgtgacgtctacgaaagagtatcatggaagccatgatcatcatgaacttgtatttgacaagttatatttctatatactagcttatagatgctgcgctccagatctgtcaagtctggaaggacatgcactatcccagctattgggtaaatgtgtacataacaccgcatgagcttttgaagcgatgccatctttctcatacttcccagtatatcttctacccatccatactagtgagtacgaatgccgttacggtgttcaatgatgccattgaatataaggaatccagtgttgcaagctctaacgtagcggtgggacgtgccgttttgctattcttgccactacagactttatctggttggccgtttatgttctttaagaacattccatctgcaacgatagatgggtttgcgattggcacacctcggagcaccttctcctcgaagttatcctttatgggcctgagcgtttgctctctggtttaagtgccgtgcaattaacctcacgcacgcttagcatcgtgaatccaattcaggttgcgacaaatgtagttttgtaccgcttgcacggcgataagttagtataatagggagctggctaatgcagatttgtttcttacatgttacttgttgtgatcgcgatgattgttattcgagatgcgagggctatctttctcgggccatgatatcgtcgtctttccagatcgtatatcaccgcctgtcgttgtgcttagatgaatctgcctttcatgacaagacggcgccagactgcctcctcgtcttcatcctggtcggcagatgcattcgtcggcgtcgagtcgattggatctgggttggcacagagttcgaagaaatcttcctccataccttcgcctagtgcaaatccaagattgagtaacgtgtctgtaggaa

SEQ ID NO: 6276 - DNA, 678 bp, Muscodor strobelii
  misc_feature: SGI cDNA ID NO. 561830
  misc_feature: Encodes the peptide sequence at SEQ ID NO 6277
atgccgaagaaactctccaaacaaaacaccagcacctccctcaccaccgccgctctctccaccctcccccgaattctccgcgacggtctgcctcttccacgcgccatcgtcttcgacctcgactacacgctttggcccttttgggtcgacacgcacgtctacccgcccctccgcgccaccgccgaccacagcgcctgcaccgataagatcggcgagtccttcggcttctaccgcgacatcacggccatcctgcacgggctgtccatcgcaggcgtcaagctcggggtcgccagtcgcacccaggctcccgatctcgccaaggagatgctgcgactgctccacgtcccgcccgcttcttctgtcttggctgttgatggcgcagagggtgctgtgagtggtaagagcaaggacaagacgaggaaggcgattgagttctttgatatgggtttggagtgctacccaagcactaagatcagacatttcgaggtcctgcataagcgcacttctattccctttaaagacatgctgttctttgatgatgagagtcggaatcgtgacacggagtcgttgggtgttactatgtggctcgttcgagatggtgtctcatgggccgaggtcgagaacggcatcaaggagtggcgacgtcgccaaggcgtcgacgagatgccacctaactag

SEQ ID NO: 6277 - protein, 225 aa, Muscodor strobelii
  misc_feature: SGI Peptide ID NO. 561830
  misc_feature (1)..(219): NCBI GI: 261352664 Blast Desc: magnesium-dependent phosphatase [Verticillium albo-atrum VaMs.102]
  misc_feature (16)..(223): NCBI GI: 256727919 Blast Desc: NECHADRAFT_46094 [Nectria haematococca mpVI 77-13-4]
  misc_feature (1)..(223): NCBI GI: 46121215 Blast Desc: FG04986.1 [Gibberella zeae PH-1]
  misc_feature (1)..(218): NCBI GI: 156031355 Blast Desc: SS1G_14099 [Sclerotinia sclerotiorum 1980] gi|154699501|gb|EDN99239.1| SS1G_14099 [Sclerotinia sclerotiorum 1980]
  misc_feature (14)..(210): NCBI GI: 39940584 Blast Desc: MGG_04948 [Magnaporthe grisea 70-15] gi|145010817|gb|EDJ95473.1| MGG_04948 [Magnaporthe grisea 70-15]
  misc_feature (10)..(221): NCBI GI: 67538684 Blast Desc: AN5512.2 [Aspergillus nidulans FGSC A4] gi|40743482|gb|EAA62672.1| AN5512.2 [Aspergillus nidulans FGSC A4] gi|259485037|tpe|CBF81766.1| TPA: magnesium dependent FGSC
  misc_feature (5)..(219): NCBI GI: 242789641 Blast Desc: magnesium dependent phosphatase, [Talaromyces stipitatus ATCC 10500] gi|218717993|gb|EED17413.1| magnesium dependent phosphatase, [Talaromyces stipitatus ATCC 10500]
  misc_feature (5)..(219): NCBI GI: 212534260 Blast Desc: magnesium dependent phosphatase, [Penicillium marneffei ATCC 18224] gi|210069685|gb|EEA23775.1| magnesium dependent phosphatase, [Penicillium marneffei ATCC 18224]
  misc_feature (1)..(218): NCBI GI: 85107958 Blast Desc: NCU07321 [Neurospora crassa OR74A] gi|28924086|gb|EAA33243.1| [Neurospora crassa OR74A]
  misc_feature (23)..(219): NCBI GI: 240105242 Blast Desc: magnesium-dependent phosphatase-1 family protein [Coccidioides posadasii C735 delta SOWgp]
  misc_feature (29)..(215): SWISSPROT Homolog: EC 3.1.3.48 Protein-tyrosine-phosphatase
MPKKLSKQNTSTSLTTAALSTLPRILRDGLPLPRAIVFDLDYTLWPFWVDTHVYPPLRATADHSACTDKIGESFGFYRDITAILHGLSIAGVKLGVASRTQAPDLAKEMLRLLHVPPASSVLAVDGAEGAVSGKSKDKTRKAIEFFDMGLECYPSTKIRHFEVLHKRTSIPFKDMLFFDDESRNRDTESLGVTMWLVRDGVSWAEVENGIKEWRRRQGVDEMPPN

SEQ ID NO: 6278 - DNA, 6887 bp, Muscodor strobelii
  misc_feature: SGI EST ID NO. CUFF.15996.1
  misc_feature: Variant of the nucleotide sequence at SEQ ID NO 6276
ccgagatgagagaacccttgtagacgggatcctgttcaagggtagcacacattacacctctaattgaattggtttgaccgatttgcgcgttgaggagctgtagatcaggaggccgaaagctcttcttgacctgccagctcgaagatgagttacagcgatcgcttcttagtcttcaattgccgtgccgacatctcatttgccttcctctttcgtgctgtgagcttatccaatggccagtaatccataagggcaactcatgcgcgaaacactactctcaccgcgttcctcctcttgtcctcttcatcctgcttgcctcattttttgtgaagggtatctttcgatcagattgatctagacgtactagcgtcgaaagcgggtgtgtaagggattatgagtgatgccgagagtgatgacggccggcgggcgtcaaagaagcggaaggccagccgtgcctgtgaccgttgcaactcacaacaccaaccttgcgataatgcaaccccaaagtgcagtgtctgcgttcgcgccggcaccgagtgtacatacaataggcccataaggaaacgaggcccgcgcagtggatacaccggccagaacggcgagcgccttttagccatcgtgcttcaagctaggcctgagattgaagatgttattctacatgcattgcgcgcagggacatatgctgacacgggcattcccaatttggactactatcgaaataccgaaaaccaggcggatcttgtcagcaagttcaatgagagccgtctgggccgcttcctgcaaaatggagagacgcctgatctaaatcttctaccaatagatcaggaacctaccctgcttccaccactacagcacgcagcgggctcctatagagagcccatcggcaatctcggatcgtcgaatatcactaccttgcctcagcgacagaatcgtgcaatgtcttcaagctctggagcaaattccactgtgaatccacatggggcacctcagaacccgggtgatatatatctccagagcgaggacattcgaaggcggatatcgcaagagccaagctacggctatggcgcatatgggttgcggagagaagcatcacacactagtactccatacgggacaaatggttccgtgaacaactatactcatactcacgcaactggcgtaagcacgggagaagatatgggaggtctggggtcggtccctaaagatcagattccatatcaagttgataccccgggtggtgccgttccccaggaatactctggcattgatgccgcttacactacgcagtggctcgattctgttcctacagacacgttactcaatcttggatttgcactaggcgaaggtatggaggaagatttcttcgaactctgtgccaacccagatccaatcgactcgacgccgacgaatgcatctgccgaccaggatgaagacgaggaggcagtctggcgccgtcttgtcatgaaaggcagattcatctaagcacaacgacaggcggtgatatacgatctggaaagacgacgatatcatggcccgagaaagatagccctcgcatctcgaataacaatcatcgcgatcacaacaagtaacatcggtacaaaactacatttgtcgcaacctgaattggattcacgatgctaagcgtgcgtgaggttaattgcacggcacttaaaccagagagcaaacgctcaggcccataaaggataacttcgaggagaaggtgctccgaggtgtgccaatcgcaaacccatctatcgttgcagatggaatgttcttaaagaacataaacggccaaccagataaagtctgtagtggcaagaatagcaaaacggcacgtcccaccgctacgttagagcttgcaacactggattccttatattcaatggcatcattgaacaccgtaacggcattcgtactcactagtatggatgggtagaagatatactgggaagtatgagaaagatggcatcgcttcaaaagctcatgcggtgttatgtacacatttacccaatagctgggatagtgcatgtccttccagacttgacagatctggagcgcagcatctataagctagtatatagaaatataacttgtcaaatacaagttcatgatgatcatggcttccatgatactctttcgtagacgtcacatgcctcaaatagtcgaatgggaatagcatacaattgtcaaccaatgattaaaacgagatcaagatatctaaagtcactaatcttcactcttttaagttggtttgcctgaattttcccgaatttacataacgagtatacaaggatccaatctgaccacgagtagactcccaacagttaatccaagaaatcgctaggcacctcagggccttacagatgttagcgcacatcgacatatctcatatagacactactactcaccccaaacatgaagacttcccggcccagcttgcgagcgatgtgtcggctcgtcagcattgacttgatccccatcgacgtaatgctccatgataaagccgctcgggtcatacctaggcacgaatcagctcaacacaattcacccaggacattttcaacctaccagtaatcgaaaatctggctcccgaggacatgccgtccgacgccccagcaattcttatatcccttctctctgagccaatcatgaccgagcacctgggtgtcgaagtcatgcgtctcaaatgacgagtggtgcactttataggtgctgccttcggcgaagaagaaaacgtggtggtcgacttcttcggacccccggttcagccggtaaaagactgtgcggtcgattttatcggcgtcgtggattagctggtagaacttgtgagcaactttacatacgacttgtggatttgagatcaggggacttctcacatcgctcgcgaggaagttaaaattggaggtgtagaactcgtgagccttggcaaaattggtcgttcgcacgccgaagtgtcccagtttatggactggtgctggccgcttgctgaagcgctggaatttatttacgggtcgattcttctctgttggcttttatcataagacagtgttagcaggacctaacacagggccacacaatcattatggcaggagtacgtgctcacatagttcacaggtgtatgtggcaaaggtatatcgagcatctgttccttttgctggccataaacaagatgaagagggaatccatcaaccggatcatggaacgtcacgcatttgccgcctcccggggcatcgaccaagtcgtagatcttagatgcttttgggagtatctctgtggctgtttgtagatcttcctcagactcgacgacgaagccggctcctccgaattcatttttctcggccttgatggcgcagaggacccatggctctgtaccgtaaccgcggaagtagatcttgtcgtctcccacttgcttctcttcggtaaagccaaagtcaaggaggaatgtcctggccttgtcgaggtctgcgtatttgtagtagacgtgtgccacgcgcactagctggatcttgcctgtcatgttggaagcgcagacactcgagcaaataattacttaggtagggatgtttctagaagataaattgtagtctacaaaatgtcgcaaaaggcatctacatgtcaccagctacacacagacgggccgcggcgcgcctgcggcttatgtattacagcatgagctcgcgcaaggacggttaaatagtggtcggctcgggtgctagtggaggagtccgtgtggcatgctcggcctacgacctacgacctactcgtacgagatgctgtacagtaaaaagatgaaccaattaggaaacgcagtctaagacaacagctccttggagcattcaggtcttaggtgttggagctcggtgcgaagcagacgtccgcgtatgccggccccgctttctgtgtagtgagcatactcggcagttcgaaatacgctgcttttgtagcatgtattgcttagagagggctgagtttgcgttcaagccatgcacgacagctcctgctcggcttaggaagatccagcgccatgacatcgctccatagaggctctagccacatgggaggatggatatataatgctcatgtaagattgtcggcatcatttttaaccccgcagacagcagatatatgatggagggagagagtgacatggaaagttggagtagatgatggtgagggtgaggtcgaagatggggtacgcttggtattgcggggaacattttggggaaggacgagtgctgagtgcagctggcgacggcctggatttgaccgtttctgcccctccaaagtgcccctccatgacggagcacttctcagatggcggaatcaaggtcaacattgaaccatggtcaacactgaatccgggggcaaaccattgaatgaagaagatattgggtttggtagcaatcacatgtctcctcgcttcagcttttcttcctcgatcacatcctggttgtgatgagaaccagctggagcaccttcatttctcatctgtgacatacttcgggctcttggttccgttcctcacgtcactatccatacccttttcaacaattcagggcgcagtcaggcgaccaacacaacccacgatgccgaagaaactctccaaacaaaacaccagcacctccctcaccaccgccgctctctccaccctcccccgaattctccgcgacggtctgcctcttccacgcgccatcgtcttcgacctcgactacacgctttggcccttttgggtcgacacgcacgtctacccgcccctccgcgccaccgccgaccacagcgcctgcaccgataagatcggcgagtccttcggcttctaccgcgacatcacggccatcctgcacgggctgtccatcgcaggcgtcaagctcggggtcgccagtcgcacccaggctcccgatctcgccaaggagatgctgcgactgctccacgtcccgcccgcttcttctgtcttggctgttgatggcgcagagggtgctgtgagtggtaagagcaaggacaagacgaggaaggcgattgagttctttgatatgggtttggagtgctacccaagcactaagatcagacatttcgaggtcctgcataagcgcacttctattccctttaaagacatgctgttctttgatgatgagagtcggaatcgtgacacggagtcgttgggtgttactatgtggctcgttcgagatggtgtctcatgggccgaggtcgagaacggcatcaaggagtggcgacgtcgccaaggcgtcgacgagatgccacctaactagaccagaggacattcacgagatcatgaagcacggcgttggggacattctgggaaacaaaaccgagaattggagccagactccatcggttgcatacatcagatacatagagtctaattcttaggcaaaagctacagagtgcatcgcatggggtctcattccagtatgtacgttgagcagaaatatgataccctttctatgtaccaattcgcatgtgccacatcgcgttaattcaaaatgtggcactctgaaatcattgaacaccgatcatcccggcaacctctagatccaatgtgcctcatagcctggatgtgtgcctgtatctatatgcctatcctgttatctatgtcgggtatattttcaagatgctactttgttttccgaagtaggctcttgagattgggaagcgagtttctcagagagtccttcggctgaatccttgggatcggtaatcttcaaatcagctacagcctggagctttgatacatctgtcgtggcatctgccttctcgtcatccgctaccacggcttcagtcgggtttgcctctttcttcgggaaggccttggggatgctgcagacgacctcgtggcgctcctttccgcctttgctaccgaccgcaagacactcgacccgttgtccgtccgcggtaggttgccaatagcaagggcccatcgggaatgcagtgtggccattctcccattttactatctttttgatctcgtcgtcccaggccggctcgtcgaagaaggaccattcgagttcgccgccgtagcctttgggtatgtctttcatctccatgaatgtcgtcaggacggggagcacgtcgtggtcgctgaggatgaagattttggagacggtgacggggtcaaaccatcgcttgatccagccccataccgttgagaagaaatagggggcgccgatgatgaagatgcctaaacacatctgtcagtactttacccgtggagattgtcgcgtgctagcgtgggcgcggcttacgatcgagcgtctcgggataatgcgcagtagcaagctgactggcggcttgcatatggcccttcagattccagaacatgcgtagactgacgtgtgagatatcgacgatattcgtagagagcgtgatgggcgtctgcgcattttcacgatcggtgcactcggtcgacagcggctggacgaacctcgtcaaattctcgtacaatgcaaagagacgcagtagcttgggttgtgtctttccgtctgtcttggctttgctgtaggtcgtctcggttgatttctcgtagtctgcaactgctttggagtcgagatgtcggatttgatagacgtagatcggtatgcctctgctcagaagagaactggtcagtgatatgggcggtagtgtgaggaaggaatgcataccgtttgtcgcgacggccagtaaatctgggatactgtatgcgaagcggtcgtaagtaagtggtgcgaaaatagctgcgaggtgtatcggcataccaatttcctcgaagcttcgtacgagtcgatgtcgattgtgtcgtagagaacgtctatctcattggcgccgcggaatttctccgtctcgctgaactggacatatgcatcttgaggaacccatttgcgagcgcgtagatatcgact

SEQ ID NO: 6279 - DNA, 993 bp, Muscodor strobelii
  misc_feature: SGI cDNA ID NO. 561831
  misc_feature: Encodes the peptide sequence at SEQ ID NO 6280
atgacaggcaagatccagctagtgcgcgtggcacacgtctactacaaatacgcagacctcgacaaggccaggacattcctccttgactttggctttaccgaagagaagcaagtgggagacgacaagatctacttccgcggttacggtacagagccatgggtcctctgcgccatcaaggccgagaaaaatgaattcggaggagccggcttcgtcgtcgagtctgaggaagatctacaaacagccacagagatactcccaaaagcatctaagatctacgacttggtcgatgccccgggaggcggcaaatgcgtgacgttccatgatccggttgatggattccctcttcatcttgtttatggccagcaaaaggaacagatgctcgatatacctttgccacatacacctgtgaactatccaacagagaagaatcgacccgtaaataaattccagcgcttcagcaagcggccagcaccagtccataaactgggacacttcggcgtgcgaacgaccaattttgccaaggctcacgagttctacacctccaattttaacttcctcgcgagcgatgtgagaagtcccctgatctcaaatccacaagtcgtatgtaaagttgctcacaagttctaccagctaatccacgacgccgataaaatcgaccgcacagtcttttaccggctgaaccgggggtccgaagaagtcgaccaccacgttttcttcttcgccgaaggcagcacctataaagtgcaccactcgtcatttgagacgcatgacttcgacacccaggtgctcggtcatgattggctcagagagaagggatataagaattgctggggcgtcggacggcatgtcctcgggagccagattttcgattactggtatgacccgagcggctttatcatggagcattacgtcgatggggatcaagtcaatgctgacgagccgacacatcgctcgcaagctgggccgggaagtcttcatgtttggggtgagtag

SEQ ID NO: 6280 - protein, 330 aa, Muscodor strobelii
  misc_feature: SGI Peptide ID NO. 561831
  misc_feature (4)..(329): NCBI GI: 39969793 Blast Desc: MGG_10506 [Magnaporthe grisea 70-15] gi|145022811|gb|EDK06584.1| MGG_10506 [Magnaporthe grisea 70-15]
  misc_feature (4)..(329): NCBI GI: 85107962 Blast Desc: NCU07322 [Neurospora crassa OR74A] gi|28924087|gb|EAA33244.1| conserved [Neurospora crassa OR74A]
  misc_feature (4)..(329): NCBI GI: 170940296 Blast Desc: protein product [Podospora anserina]
  misc_feature (4)..(329): NCBI GI: 171691558 Blast Desc: protein product [Podospora anserina] gi|170945727|emb|CAP71840.1| protein product [Podospora anserina]
  misc_feature (4)..(329): NCBI GI: 116178776 Blast Desc: CHGG_00016 [Chaetomium globosum CBS 148.51] gi|88184313|gb|EAQ91781.1| CHGG_00016 [Chaetomium globosum CBS 148.51]
  misc_feature (4)..(328): NCBI GI: 119466971 Blast Desc: glyoxalase family protein [Neosartorya fischeri NRRL 181] gi|119405444|gb|EAW15395.1| glyoxalase family protein [Neosartorya fischeri NRRL 181]
  misc_feature (2)..(328): NCBI GI: 67539922 Blast Desc: AN6131.2 [Aspergillus nidulans FGSC A4] gi|40738727|gb|EAA57917.1| AN6131.2 [Aspergillus nidulans FGSC A4]
  misc_feature (1)..(329): NCBI GI: 255935523 Blast Desc: Pc13g03510 [Penicillium chrysogenum Wisconsin 54-1255] gi|211583408|emb|CAP91420.1| Pc13g03510 [Penicillium chrysogenum Wisconsin 54-1255]
  misc_feature (2)..(329): NCBI GI: 259479678 Blast Desc: TPA: conserved [Aspergillus nidulans FGSC A4]
  misc_feature (4)..(329): NCBI GI: 256731587 Blast Desc: NECHADRAFT_96454 [Nectria haematococca mpVI 77-13-4]
MTGKIQLVRVAHVYYKYADLDKARTFLLDFGFTEEKQVGDDKIYFRGYGTEPWVLCAIKAEKNEFGGAGFVVESEEDLQTATEILPKASKIYDLVDAPGGGKCVTFHDPVDGFPLHLVYGQQKEQMLDIPLPHTPVNYPTEKNRPVNKFQRFSKRPAPVHKLGHFGVRTTNFAKAHEFYTSNFNFLASDVRSPLISNPQVVCKVAHKFYQLIHDADKIDRTVFYRLNRGSEEVDHHVFFFAEGSTYKVHHSSFETHDFDTQVLGHDWLREKGYKNCWGVGRHVLGSQIFDYWYDPSGFIMEHYVDGDQVNADEPTHRSQAGPGSLHVWGE

SEQ ID NO: 6281 - DNA, 5756 bp, Muscodor strobelii; identical to SEQ ID NO: 6275
  misc_feature: SGI EST ID NO. CUFF.15995.0
  misc_feature: Variant of the nucleotide sequence at SEQ ID NO 6279

SEQ ID NO: 6282 - DNA, 954 bp, Muscodor strobelii
  misc_feature: SGI cDNA ID NO. 561832
  misc_feature: Encodes the peptide sequence at SEQ ID NO 6283
atgacaggcaagatccagctagtgcgcgtggcacacgtctactacaaatacgcagacctcgacaaggccaggacattcctccttgactttggctttaccgaagagaagcaagtgggagacgacaagatctacttccgcggttacggtacagagccatgggtcctctgcgccatcaaggccgagaaaaatgaattcggaggagccggcttcgtcgtcgagtctgaggaagatctacaaacagccacagagatactcccaaaagcatctaagatctacgacttggtcgatgccccgggaggcggcaaatgcgtgacgttccatgatccggttgatggattccctcttcatcttgtttatggccagcaaaaggaacagatgctcgatatacctttgccacatacacctgtgaactatccaacagagaagaatcgacccgtaaataaattccagcgcttcagcaagcggccagcaccagtccataaactgggacacttcggcgtgcgaacgaccaattttgccaaggctcacgagttctacacctccaattttaacttcctcgcgagcgatctaatccacgacgccgataaaatcgaccgcacagtcttttaccggctgaaccgggggtccgaagaagtcgaccaccacgttttcttcttcgccgaaggcagcacctataaagtgcaccactcgtcatttgagacgcatgacttcgacacccaggtgctcggtcatgattggctcagagagaagggatataagaattgctggggcgtcggacggcatgtcctcgggagccagattttcgattactggtatgacccgagcggctttatcatggagcattacgtcgatggggatcaagtcaatgctgacgagccgacacatcgctcgcaagctgggccgggaagtcttcatgtttggggccctgaggtgcctagcgatttcttggattaa

SEQ ID NO: 6283 - protein, 317 aa, Muscodor strobelii
  misc_feature: SGI Peptide ID NO. 561832
  misc_feature (4)..(316): NCBI GI: 39969793 Blast Desc: MGG_10506 [Magnaporthe grisea 70-15] gi|145022811|gb|EDK06584.1| MGG_10506 [Magnaporthe grisea 70-15]
  misc_feature (4)..(316): NCBI GI: 85107962 Blast Desc: NCU07322 [Neurospora crassa OR74A] gi|28924087|gb|EAA33244.1| conserved [Neurospora crassa OR74A]
  misc_feature (4)..(316): NCBI GI: 170940296 Blast Desc: protein product [Podospora anserina]
  misc_feature (4)..(316): NCBI GI: 171691558 Blast Desc: protein product [Podospora anserina] gi|170945727|emb|CAP71840.1| protein product [Podospora anserina]
  misc_feature (4)..(316): NCBI GI: 116178776 Blast Desc: CHGG_00016 [Chaetomium globosum CBS 148.51] gi|88184313|gb|EAQ91781.1| CHGG_00016 [Chaetomium globosum CBS 148.51]
  misc_feature (1)..(316): NCBI GI: 255935523 Blast Desc: Pc13g03510 [Penicillium chrysogenum Wisconsin 54-1255] gi|211583408|emb|CAP91420.1| Pc13g03510 [Penicillium chrysogenum Wisconsin 54-1255]
  misc_feature (4)..(307): NCBI GI: 119466971 Blast Desc: glyoxalase family protein [Neosartorya fischeri NRRL 181] gi|119405444|gb|EAW15395.1| glyoxalase family protein [Neosartorya fischeri NRRL 181]
  misc_feature (2)..(307): NCBI GI: 67539922 Blast Desc: AN6131.2 [Aspergillus nidulans FGSC A4] gi|40738727|gb|EAA57917.1| AN6131.2 [Aspergillus nidulans FGSC A4]
  misc_feature (4)..(316): NCBI GI: 256731587 Blast Desc: NECHADRAFT_96454 [Nectria haematococca mpVI 77-13-4]
  misc_feature (2)..(308): NCBI GI: 259479678 Blast Desc: TPA: conserved [Aspergillus nidulans FGSC A4]
MTGKIQLVRVAHVYYKYADLDKARTFLLDFGFTEEKQVGDDKIYFRGYGTEPWVLCAIKAEKNEFGGAGFVVESEEDLQTATEILPKASKIYDLVDAPGGGKCVTFHDPVDGFPLHLVYGQQKEQMLDIPLPHTPVNYPTEKNRPVNKFQRFSKRPAPVHKLGHFGVRTTNFAKAHEFYTSNFNFLASDLIHDADKIDRTVFYRLNRGSEEVDHHVFFFAEGSTYKVHHSSFETHDFDTQVLGHDWLREKGYKNCWGVGRHVLGSQIFDYWYDPSGFIMEHYVDGDQVNADEPTHRSQAGPGSLHVWGPEVPSDFLD

SEQ ID NO: 6284 - DNA, 5756 bp, Muscodor strobelii; identical to SEQ ID NO: 6275
  misc_feature: SGI EST ID NO. CUFF.15995.0
  misc_feature: Variant of the nucleotide sequence at SEQ ID NO 6282

SEQ ID NO: 6285 - DNA, 1089 bp, Muscodor strobelii
  misc_feature: SGI cDNA ID NO. 561833
  misc_feature: Encodes the peptide sequence at SEQ ID NO 6286
atgagtgatgccgagagtgatgacggccggcgggcgtcaaagaagcggaaggccagccgtgcctgtgaccgttgcaactcacaacaccaaccttgcgataatgcaaccccaaagtgcagtgtctgcgttcgcgccggcaccgagtgtacatacaataggcccataaggaaacgaggcccgcgcagtggatacaccggccagaacggcgagcgccttttagccatcgtgcttcaagctaggcctgagattgaagatgttattctacatgcattgcgcgcagggacatatgctgacacgggcattcccaatttggactactatcgaaataccgaaaaccaggcggatcttgtcagcaagttcaatgagagccgtctgggccgcttcctgcaaaatggagagacgcctgatctaaatcttctaccaatagatcaggaacctaccctgcttccaccactacagcacgcagcgggctcctatagagagcccatcggcaatctcggatcgtcgaatatcactaccttgcctcagcgacagaatcgtgcaatgtcttcaagctctggagcaaattccactgtgaatccacatggggcacctcagaacccgggtgatatatatctccagagcgaggacattcgaaggcggatatcgcaagagccaagctacggctatggcgcatatgggttgcggagagaagcatcacacactagtactccatacgggacaaatggttccgtgaacaactatactcatactcacgcaactggcgtaagcacgggagaagatatgggaggtctggggtcggtccctaaagatcagattccatatcaagttgataccccgggtggtgccgttccccaggaatactctggcattgatgccgcttacactacgcagtggctcgattctgttcctacagacacgttactcaatcttggatttgcactaggcgaaggtatggaggaagatttcttcgaactctgtgccaacccagatccaatcgactcgacgccgacgaatgcatctgccgaccaggatgaagacgaggaggcagtctggcgccgtcttgtcatgaaaggcagattcatctaa

SEQ ID NO: 6286 - protein, 362 aa, Muscodor strobelii
  misc_feature: SGI Peptide ID NO. 561833
  misc_feature (20)..(58): Pfam Id: PF00172 Pfam Desc: Fungal Zn(2)-Cys(6) binuclear cluster domain
  misc_feature (2)..(137): NCBI GI: 116196380 Blast Desc: CHGG_04788 [Chaetomium globosum CBS 148.51] gi|88180701|gb|EAQ88169.1| CHGG_04788 [Chaetomium globosum CBS 148.51]
  misc_feature (14)..(129): NCBI GI: 85075835 Blast Desc: NCU04359 [Neurospora crassa OR74A] gi|28916851|gb|EAA26595.1| [Neurospora crassa OR74A] gi|40882264|emb|CAF06089.1| [Neurospora crassa]
  misc_feature (14)..(127): NCBI GI: 145613353 Blast Desc: MGG_01715 [Magnaporthe grisea 70-15] gi|145020441|gb|EDK04570.1| MGG_01715 [Magnaporthe grisea 70-15]
  misc_feature (19)..(135): NCBI GI: 171688614 Blast Desc: protein product [Podospora anserina] gi|170944269|emb|CAP70379.1| protein product [Podospora anserina]
  misc_feature (14)..(142): NCBI GI: 156045816 Blast Desc: SS1G_09184 [Sclerotinia sclerotiorum 1980] gi|154693580|gb|EDN93318.1| SS1G_09184 [Sclerotinia sclerotiorum 1980]
  misc_feature (11)..(99): NCBI GI: 67903796 Blast Desc: AN8885.2 [Aspergillus nidulans FGSC A4] gi|40744943|gb|EAA64099.1| AN8885.2 [Aspergillus nidulans FGSC A4] gi|259486682|tpe|CBF84733.1| TPA: Zn(II)2Cys6 transcription
  misc_feature (11)..(137): NCBI GI: 255939484 Blast Desc: Pc16g00930 [Penicillium chrysogenum Wisconsin 54-1255] gi|211585134|emb|CAP92763.1| Pc16g00930 [Penicillium chrysogenum Wisconsin 54-1255]
  misc_feature (14)..(92): NCBI GI: 238507700 Blast Desc: conserved [Aspergillus flavus NRRL3357] gi|220688570|gb|EED44922.1| conserved [Aspergillus flavus NRRL3357]
  misc_feature (13)..(122): NCBI GI: 212530886 Blast Desc: C6 transcription factor, [Penicillium marneffei ATCC 18224] gi|210074998|gb|EEA29085.1| C6 transcription factor, [Penicillium marneffei ATCC 18224]
  misc_feature (11)..(100): NCBI GI: 169786503 Blast Desc: [Aspergillus oryzae RIB40] gi|83776460|dbj|BAE66579.1| protein product [Aspergillus oryzae]
MSDAESDDGRRASKKRKASRACDRCNSQHQPCDNATPKCSVCVRAGTECTYNRPIRKRGPRSGYTGQNGERLLAIVLQARPEIEDVILHALRAGTYADTGIPNLDYYRNTENQADLVSKFNESRLGRFLQNGETPDLNLLPIDQEPTLLPPLQHAAGSYREPIGNLGSSNITTLPQRQNRAMSSSSGANSTVNPHGAPQNPGDIYLQSEDIRRRISQEPSYGYGAYGLRREASHTSTPYGTNGSVNNYTHTHATGVSTGEDMGGLGSVPKDQIPYQVDTPGGAVPQEYSGIDAAYTTQWLDSVPTDTLLNLGFALGEGMEEDFFELCANPDPIDSTPTNASADQDEDEEAVWRRLVMKGRFI

SEQ ID NO: 6287 - DNA, 6887 bp, Muscodor strobelii; identical to SEQ ID NO: 6278
  misc_feature: SGI EST ID NO. CUFF.15996.1
  misc_feature: Variant of the nucleotide sequence at SEQ ID NO 6285

SEQ ID NO: 6288 - DNA, 2430 bp, Muscodor strobelii
  misc_feature: SGI cDNA ID NO. 561834
  misc_feature: Encodes the peptide sequence at SEQ ID NO 6289
atggacggtcaccagtatggctcgcctctgtccgagaacttgatcgccgcaacgaaaaccaacctcaggatattctcctcggatgcgtccatcatcctggtcggctgccggggagccggaaagagaactctggggttcattgcagccaaatatcttggccgtaggcttttgactgaagaccagttcttcgaacaatacacaggttgtaacagatcgacttttctccagaaatatggccgagaaacattcaacaggcagatggccattgtccttgctcagacactccagacgaacaggttgaattgcattatcgagtgcggctcggggatactgactggggagacgcaacagatcattgcaggctatgcagaaaccaatccggtcatctatattcaccgcgacaaagaagatttatacaaaatcttgaagctaccagtatcagacgcggagcgtatgcttagagctgatcaaaaacatcgagaaatctgcaacttagaatttttcaatgtgctcgacacgagcggagagggactggtggatggagagtctccgcttcgctcagcagccgttcatgctgctagactgatctacgtcaagcaggatttcatcaacttcctcgacagtctctctggtcaagctactactcggtcatggttacagaatccatttgctgttaagtccatccctattgaacaccgaccgtactcatttgtgttgaatttgcgcctctcaacactgcttcatacaaatgtagacttcactaagatggaggcgcctggtgaagcggtcgagctggttatagacacctggccggataatgttcttgatatcatagccactcaggtagctatgctcaggcgaagactcgacgtcccgataatttactatgtcgaagagaatcctcgtgaggagcgactgaggtcgcaagacgagagggatacatgtgatctcgagttgatgcttcacggtctccgccttggggtagactatctaactctctgcatggagagaagtgaagagatcatttctaaagtactatccacgcgaggccggaccaaaatcattggaaactgggtggtgaagggattcaatgcaccccaatggacagaagatgattatatgcgaaagtatttccgagctaaaagtctaggttgccacattgtgcgaatcgcccgattttgtgcagggaatagggcagatggagaaagacaaaagttcatggacaagatcaaagcactaccagatccaaagccacatctcgttgcgtatgactattcggtatttggtatagtagcccctttccaggggctgagcctgaacccgtcaggtcatgagttcttggaaaaatctagccgagagctcttcataggggctaatacagcccgcgggagcattcgtacatttttccagaggggttggttacagcggcttaacttctgtgtcgttggtgccaacgtgcagtactcagcatccccgtcgatgcagcgagctgcattcgaacattacatgatgccacatgcctatgagatacgccaatgcagcacaatggaagagctggaccgaatccgaacagatccgaattttggaggggcgtcccttactgcacccttcaaggtcatcatgatggaccacgttgattttgtcagctcccacgctacagctatcggtgctgtgaacaccatcctacctctccgaggcaagacgtcgtccattctagaacacgccaattcccgtggccatgctggcgtcaccgacaagttcttcggagataataccgactggacttcgatagctacgtgccttcgacgggctgttagccctcgaaattcggtccagccttcacggaccactggtctcgtcattggagcagggggtatggcacgtgcagctgtatacgcattgatcaagcttggatgtaggaaaatattcattcacaataggacaatcgcgagagcaaacgcggtagcagctcacttcaatgcatacgtaaaaaaggaacgacttgtcgggcgaaaagatggagatgagacagtctgtcatgtcatcagttcggcaacagacccttggccagagggttaccaacaacccacaatgatcctatcctgtatcccatcgtgcggtattgatgacaaacctacagtagatttcagaatgccttctcaatggcttcgaagttctactggatgtgtggtcattgagttggcgtatgagccattgattacacccttggttgttcagatgcgaaagatgcgggatgaaggcaatacatcttggatcatcattgacggcttggaggttgttagcgagatgtctatgggacaattcgaactctacacgggccgtaatgctccccgccgactgatgaggaaagtctgtgacgaacactggaatcggcaatctgcccccttccaaccacagcgtttgacataa

SEQ ID NO: 6289 - protein, 809 aa, Muscodor strobelii
  misc_feature: SGI Peptide ID NO. 561834
  misc_feature (601)..(744): Pfam Id: PF01488 Pfam Desc: Shikimate / quinate 5-dehydrogenase
  misc_feature (481)..(561): Pfam Id: PF08501 Pfam Desc: Shikimate dehydrogenase substrate binding domain
  misc_feature (37)..(197): Pfam Id: PF01202 Pfam Desc: Shikimate kinase
  misc_feature (617)..(666): Pfam Id: PF01488 Pfam Desc: Shikimate / quinate 5-dehydrogenase
  misc_feature (37)..(140): Pfam Id: PF01202 Pfam Desc: Shikimate kinase
  misc_feature (17)..(796): NCBI GI: 171688612 Blast Desc: protein product [Podospora anserina] gi|170944268|emb|CAP70378.1| protein product [Podospora anserina]
  misc_feature (21)..(799): NCBI GI: 85075830 Blast Desc: NCU04358 [Neurospora crassa OR74A] gi|28916850|gb|EAA26594.1| conserved [Neurospora crassa OR74A] gi|40882265|emb|CAF06090.1| related to negative-acting regulatory
  misc_feature (98)..(790): NCBI GI: 145613355 Blast Desc: MGG_01714 [Magnaporthe grisea 70-15] gi|145020442|gb|EDK04571.1| MGG_01714 [Magnaporthe grisea 70-15]
  misc_feature (14)..(801): NCBI GI: 154321804 Blast Desc: BC1G_01049 [Botryotinia fuckeliana B05.10] gi|150850296|gb|EDN25489.1| BC1G_01049 [Botryotinia fuckeliana B05.10]
  misc_feature (3)..(796): NCBI GI: 242798430 Blast Desc: repressor protein [Talaromyces stipitatus ATCC 10500] gi|218716513|gb|EED15934.1| repressor protein [Talaromyces stipitatus ATCC 10500]
  misc_feature (23)..(789): NCBI GI: 156045820 Blast Desc: SS1G_09186 [Sclerotinia sclerotiorum 1980] gi|154693582|gb|EDN93320.1| SS1G_09186 [Sclerotinia sclerotiorum 1980]
  misc_feature (9)..(788): NCBI GI: 212541512 Blast Desc: repressor protein [Penicillium marneffei ATCC 18224] gi|210068210|gb|EEA22302.1| repressor protein [Penicillium marneffei ATCC 18224]
  misc_feature (23)..(808): NCBI GI: 119484024 Blast Desc: repressor protein [Neosartorya fischeri NRRL 181] gi|119410071|gb|EAW20018.1| repressor protein [Neosartorya fischeri NRRL 181]
  misc_feature (23)..(788): NCBI GI: 169786501 Blast Desc: [Aspergillus oryzae RIB40] gi|83776459|dbj|BAE66578.1| protein product [Aspergillus oryzae]
  misc_feature (23)..(788): NCBI GI: 238507521 Blast Desc: repressor protein [Aspergillus flavus NRRL3357] gi|220689675|gb|EED46026.1| repressor protein [Aspergillus flavus NRRL3357]
  misc_feature (27)..(784): SWISSPROT Homolog: EC 4.2.1.10 3-dehydroquinate dehydratase
  misc_feature (27)..(784): SWISSPROT Homolog: EC 4.2.3.4 3-dehydroquinate synthase
  misc_feature (27)..(784): SWISSPROT Homolog: EC 2.5.1.19 3-phosphoshikimate 1-carboxyvinyltransferase
  misc_feature (27)..(784): SWISSPROT Homolog: EC 2.7.1.71 Shikimate kinase
  misc_feature (27)..(784): SWISSPROT Homolog: EC 1.1.1.25 Shikimate dehydrogenase
MDGHQYGSPLSENLIAATKTNLRIFSSDASIILVGCRGAGKRTLGFIAAKYLGRRLLTEDQFFEQYTGCNRSTFLQKYGRETFNRQMAIVLAQTLQTNRLNCIIECGSGILTGETQQIIAGYAETNPVIYIHRDKEDLYKILKLPVSDAERMLRADQKHREICNLEFFNVLDTSGEGLVDGESPLRSAAVHAARLIYVKQDFINFLDSLSGQATTRSWLQNPFAVKSIPIEHRPYSFVLNLRLSTLLHTNVDFTKMEAPGEAVELVIDTWPDNVLDIIATQVAMLRRRLDVPIIYYVEENPREERLRSQDERDTCDLELMLHGLRLGVDYLTLCMERSEEIISKVLSTRGRTKIIGNWVVKGFNAPQWTEDDYMRKYFRAKSLGCHIVRIARFCAGNRADGERQKFMDKIKALPDPKPHLVAYDYSVFGIVAPFQGLSLNPSGHEFLEKSSRELFIGANTARGSIRTFFQRGWLQRLNFCVVGANVQYSASPSMQRAAFEHYMMPHAYEIRQCSTMEELDRIRTDPNFGGASLTAPFKVIMMDHVDFVSSHATAIGAVNTILPLRGKTSSILEHANSRGHAGVTDKFFGDNTDWTSIATCLRRAVSPRNSVQPSRTTGLVIGAGGMARAAVYALIKLGCRKIFIHNRTIARANAVAAHFNAYVKKERLVGRKDGDETVCHVISSATDPWPEGYQQPTMILSCIPSCGIDDKPTVDFRMPSQWLRSSTGCVVIELAYEPLITPLVVQMRKMRDEGNTSWIIIDGLEVVSEMSMGQFELYTGRNAPRRLMRKVCDEHWNRQSAPFQPQRLT

SEQ ID NO: 6290 - DNA, 3471 bp, Muscodor strobelii
  misc_feature: SGI EST ID NO. CUFF.15767.0
  misc_feature: Variant of the nucleotide sequence at SEQ ID NO 6288
cagggctcaaccagtcggcttgtcgctcgttgcagcgccgtggctaattgatatagtgtcgtgcagaccgaaatttcccactgggcatagggccagccgatgagattgccgctcaccttgcaacatcagaccgtatcgacccaccggcacatgttgtctattgtttgctatcactcacctttgagaatatattgacatcagtcctcctactttttcttcacgagtacagagatgacactcacactgtagtcatattgggaggcgtcacttatacgacgtcaatttgcttggagacagtggctcactcgcagcaggctcccgtcggcagcgggtgcacgaactccgaacctcgtaggctgggggacatgagttcttcgtaaccattgatacctgcatcgcaatcgcaccttcatcgcatctgatcgtactttggctcttctaaggtgattgaagttgccacagactccgtttctggggtttgaagttaggatcgggaggccatcagcacgtcggagttggactatcctgtcaaacaccgagcagcctggcggccatcatggacggtcaccagtatggctcgcctctgtccgagaacttgatcgccgcaacgaaaaccaacctcaggatattctcctcggatgcgtccatcatcctggtcggctgccggggagccggaaagagaactctggggttcattgcagccaaatatcttggccgtaggcttttgactgaagaccagttcttcgaacaatacacaggttgtaacagatcgacttttctccagaaatatggccgagaaacattcaacaggcagatggccattgtccttgctcagacactccagacgaacaggttgaattgcattatcgagtgcggctcggggatactgactggggagacgcaacagatcattgcaggctatgcagaaaccaatccggtcatctatattcaccgcgacaaagaagatttatacaaaatcttgaagctaccagtatcagacgcggagcgtatgcttagagctgatcaaaaacatcgagaaatctgcaacttagaatttttcaatgtgctcgacacgagcggagagggactggtggatggagagtctccgcttcgctcagcagccgttcatgctgctagactgatctacgtcaagcaggatttcatcaacttcctcgacagtctctctggtcaagctactactcggtcatggttacagaatccatttgctgttaagtccatccctattgaacaccgaccgtactcatttgtgttgaatttgcgcctctcaacactgcttcatacaaatgtagacttcactaagatggaggcgcctggtgaagcggtcgagctggttatagacacctggccggataatgttcttgatatcatagccactcaggtagctatgctcaggcgaagactcgacgtcccgataatttactatgtcgaagagaatcctcgtgaggagcgactgaggtcgcaagacgagagggatacatgtgatctcgagttgatgcttcacggtctccgccttggggtagactatctaactctctgcatggagagaagtgaagagatcatttctaaagtactatccacgcgaggccggaccaaaatcattggaaactgggtggtgaagggattcaatgcaccccaatggacagaagatgattatatgcgaaagtatttccgagctaaaagtctaggttgccacattgtgcgaatcgcccgattttgtgcagggaatagggcagatggagaaagacaaaagttcatggacaagatcaaagcactaccagatccaaagccacatctcgttgcgtatgactattcggtatttggtatagtagcccctttccaggggctgagcctgaacccgtcaggtcatgagttcttggaaaaatctagccgagagctcttcataggggctaatacagcccgcgggagcattcgtacatttttccagaggggttggttacagcggcttaacttctgtgtcgttggtgccaacgtgcagtactcagcatccccgtcgatgcagcgagctgcattcgaacattacatgatgccacatgcctatgagatacgccaatgcagcacaatggaagagctggaccgaatccgaacagatccgaattttggaggggcgtcccttactgcacccttcaaggtcatcatgatggaccacgttgattttgtcagctcccacgctacagctatcggtgctgtgaacaccatcctacctctccgaggcaagacgtcgtccattctagaacacgccaattcccgtggccatgctggcgtcaccgacaagttcttcggagataataccgactggacttcgatagctacgtgccttcgacgggctgttagccctcgaaattcggtccagccttcacggaccactggtctcgtcattggagcagggggtatggcacgtgcagctgtatacgcattgatcaagcttggatgtaggaaaatattcattcacaataggacaatcgcgagagcaaacgcggtagcagctcacttcaatgcatacgtaaaaaaggaacgacttgtcgggcgaaaagatggagatgagacagtctgtcatgtcatcagttcggcaacagacccttggccagagggttaccaacaacccacaatgatcctatcctgtatcccatcgtgcggtattgatgacaaacctacagtagatttcagaatgccttctcaatggcttcgaagttctactggatgtgtggtcattgagttggcgtatgagccattgattacacccttggttgttcagatgcgaaagatgcgggatgaaggcaatacatcttggatcatcattgacggcttggaggttgttagcgagatgtctatgggacaattcgaactctacacgggccgtaatgctccccgccgactgatgaggaaagtctgtgacgaacactggaatcggcaatctgcccccttccaaccacagcgtttgacataatatcaatctgatgttacgtcataccacaaatttcgagttggcggcatcgaagatttatgaagcgctacaccaaacaagaggcatattgcaacggcgttctagggatcattgggtcgagatattagcattatggctatggttttatgatagaacagtatttgagcgatacggccttcatccacgcatctttacacaagagcttattcgaactccacttgttcgtctgagcactctcacgacatcgcttttgaacattacggccgatcgaatctcaagaaggaaagctttgcaaggtattttgggcgagaaggacgatctatttgatctggggaagggcctggggaagggctcgatgatttgattgtatgaatgatcaccccatactcgtgtttctacatgggagacataaagattgggcttattgtacgacagtacgatagatgcgaatgaattacgaagcaagattgacatgaagtctgcaacag

SEQ ID NO: 6291 - DNA, 639 bp, Muscodor strobelii
  misc_feature: SGI cDNA ID NO. 561835
  misc_feature: Encodes the peptide sequence at SEQ ID NO 6292
atggcgttcgatcaaagccccatcacagagtttgatcagagccgagatctccgtggcgccgcccgcgactccaagcgtgataaggactccaaagcacaatgggcacatggcaagcggaacctgtacggcgtcaagtttgattgggagggaaacactaaggccagtgaagagatgctaagcaagtatcggcctgataagtcgcctggacacttcaaaatccacgcacccaacgcgaatgtcaacaagggaggctaccaccactggcgggccgtagtccctcaaagccaccttcgaggcaagcacaacaagatggagtccaaggacccatctaacttgtctgaatctctccgtgacctgctgcctgcctctcccaggtcccgcaagcccagtgtctcggaggatttcctatacagcttcgacaagaccgagagcccgggcaagccgctttcgctcgacgcttatatcaagaccaacccgagggacatggagaaactcgtcgagcgggagtggatggttgtggacaacaacggcgaggccgtcaagggtcgcaaggcccggatgaacctccgacacggcaactcggcaccactggtagaagagcctcaactcatcgaggatgaaggtttcgagcttctgtga

SEQ ID NO: 6292 - protein, 212 aa, Muscodor strobelii
  misc_feature: SGI Peptide ID NO. 561835
  misc_feature (15)..(200): NCBI GI: 39952365 Blast Desc: MGG_01825 [Magnaporthe grisea 70-15] gi|145020315|gb|EDK04444.1| MGG_01825 [Magnaporthe grisea 70-15]
  misc_feature (15)..(212): NCBI GI: 171688622 Blast Desc: protein product [Podospora anserina] gi|170944273|emb|CAP70383.1| protein product [Podospora anserina]
  misc_feature (15)..(212): NCBI GI: 85075839 Blast Desc: NCU04360 [Neurospora crassa OR74A] gi|28916852|gb|EAA26596.1| [Neurospora crassa OR74A] gi|40882263|emb|CAF06088.1| [Neurospora crassa]
  misc_feature (6)..(212): NCBI GI: 154323656 Blast Desc: BC1G_00227 [Botryotinia fuckeliana B05.10] gi|150842456|gb|EDN17649.1| BC1G_00227 [Botryotinia fuckeliana B05.10]
  misc_feature (6)..(212): NCBI GI: 156056891 Blast Desc: SS1G_04176 [Sclerotinia sclerotiorum 1980] gi|154701962|gb|EDO01701.1| SS1G_04176 [Sclerotinia sclerotiorum 1980]
  misc_feature (14)..(174): NCBI GI: 240110394 Blast Desc: CPC735_064260 [Coccidioides posadasii C735 delta SOWgp]
  misc_feature (14)..(174): NCBI GI: 119180592 Blast Desc: [Coccidioides immitis RS]
MAFDQSPITEFDQSRDLRGAARDSKRDKDSKAQWAHGKRNLYGVKFDWEGNTKASEEMLSKYRPDKSPGHFKIHAPNANVNKGGYHHWRAVVPQSHLRGKHNKMESKDPSNLSESLRDLLPASPRSRKPSVSEDFLYSFDKTESPGKPLSLDAYIKTNPRDMEKLVEREWMVVDNNGEAVKGRKARMNLRHGNSAPLVEEPQLIEDEGFELL

SEQ ID NO: 6293 - DNA, 2598 bp, Muscodor strobelii
  misc_feature: SGI EST ID NO. CUFF.15830.0
  misc_feature: Variant of the nucleotide sequence at SEQ ID NO 6291
cagtaacccagtgttcaacggtgggggaatctacatccgaactcagcctactatatggacctgtaccgtaggtaaccataggactgtggacgcgagcacatgtgaaactacgacctatatgtagactggaacgataaggaccaagggttgctaatctaactacacttcccattactcggtggatgagactgtagtgtatcattcatgccacggcatgtgtggacaagatgccgagataggacgtgtataataagtgaagcgcgtctagttggagtaagggactcggctttgatagtgtattgttgtagagataccatgatccggatctctctcaacagcaagcaatattgttggatcgaagatgatagactctaattgctgctactaatcttgatcttccctggttttaagtatccaaggaacgtcaatgcgtttgagtgtaccaaaggataacttggaacttggaagacaaagggaattgccatcttgttccaagatccagcaaggttgcacaatcgcattccaaacgccctatgcgtcatcatctatcgatacggcgctcggaggttgttccatggagctgtaatcaatgcccgtatcgccataccaacgcgcgacaccggacattggctagtggctagcatcactggatttcctattccgtcatattacctcgaccttgcgcgcgccgccttatctgagtcacccggccgccgcagcagacacctgaacctcgcggccagtccccttttctgtcgtgatcctttggtctctaaatacccttagtgatcccctctagtttgcttcgtgaatgttctttcttcttgtattctctacgctaaaccttctgtgacctttcttggttgggactgccccgatcgatcatatctaatcctagcctcatcgcaactgagacaccacacggacaaagaataatcgtcatttggcatagtgactcccggtgtttcctgttgggtgtctttcattgaagacaaagcagcttccatccttcgcaaacagaaacaatcctaccttcgtaggcacaagcaacaaacagtgccttacctaatcgtcatctatcttccgtgtgacttggtcattccattgctttagattccgtcgacttctttgcctctccaagcttagaaagctcccgcctccgactcatcgctagattgtatatccatactactcctacttctcttcctccttgatctgtacaacctaccaccagtcacccatccatcgacgaatttgtataccaaatatcgacagactcttaatctatacaccagatagacatccatagtcggcttcacgtataaatcaacgttgccatccatacaaccctgttcgacgaacatcgtttcatcatggcgttcgatcaaagccccatcacagagtttgatcagagccgagatctccgtggcgccgcccgcgactccaagcgtgataaggactccaaagcacaatgggcacatggcaagcggaacctgtacggcgtcaagtttgattgggagggaaacactaaggccagtgaagagatgctaagcaagtatcggcctgataagtcgcctggacacttcaaaatccacgcacccaacgcgaatgtcaacaagggaggctaccaccactggcgggccgtagtccctcaaagccaccttcgaggcaagcacaacaagatggagtccaaggacccatctaacttgtctgaatctctccgtgacctgctgcctgcctctcccaggtcccgcaagcccagtgtctcggaggatttcctatacagcttcgacaagaccgagagcccgggcaagccgctttcgctcgacgcttatatcaagaccaacccgagggacatggagaaactcgtcgagcgggagtggatggttgtggacaacaacggcgaggccgtcaagggtcgcaaggcccggatgaacctccgacacggcaactcggcaccactggtagaagagcctcaactcatcgaggatgaaggtttcgagcttctgtgagcactagctcgtcgcttttttctgtctcttttcaccagcgtttgtacattttccatgttctcacgatctatggggtcggtttcgtcccgttttagcgtgttgttattatcactcggttgggcggctgcgtggatgcatgacctgatcgttgtcttttctcgcaatctgtgtgtcgttgcagagcgccgtcgaagatgtcgcataatcacggtttgttcttttatatcattgcataacctaccttggatgacggaattctggtagagaggtgttcagcctaacttcgacctcggagatggacctggtcggaggaggacggctcggcgcgtttagagatttgggcttcttttgatttacgtcgagcgatagggaggatctggttggctgattaggcgtattggatcgattatagctttcgatagctgtataatgggtagttttatcgggctgcatcacgcttttcgaatattatcattacccaagatctcttgaaacgttcgcaagtgatatgagaatgaacatgattatgatgagaggggaagaagagagaatggcggtgacaatattctaaccaaggttgtgcggg

SEQ ID NO: 6294 - DNA, 2271 bp, Muscodor strobelii
  misc_feature: SGI cDNA ID NO. 561836
  misc_feature: Reduced expression when VOC is produced
  misc_feature: Encodes the peptide sequence at SEQ ID NO 6295
atgcggtccttcgaccatggtgcgcccaccgaacgcgtcgccacacccccgatggcggcctccgccctgaagagcccgggtctgcgccagtctctcggcgacgccttcggctcccagtccctctccgacacctccctcccctaccgccgctccaatccctctaccgcctccctctacgcctcgaccttctccccgccaggctcccgctcccagtcgcccagccgccggcccttgtctgtccgcaacagtggctctgtcttcggcgcaaaccccaacaatgcttcagctctagctgccggcgctggtgatagccctggcaatcctctgaatctaattctgcgcgcctttgtaccacatgtggcactctacacctcagaggacaccgacgatctgctcagggaaaagggctttgagcaggggctatgggagctacttcgccccttcggcgagcgtgttcagggcaaggtcatcatccgtgatagcaatggcttgagccgcacattcgaagactattcgcttcattttgtacgcttcggagagcgcatcgtgcaccccgaacccaccatcaccgggctcaagaaccctcagagctccaggacaaatggagtgtcggagaagagaaacgaaacatcgaggccttctcaaggagagactactatcgccgacgtagaagcggtagtagagagacacctgacctatgcagaggaatccttcttcggcactccacacagtcccacgagccatggattagacatcgatgcgccctccccttactacgccctatatctccgcagactgctctcgggcatgtccttgaccccccatgagacctttgctcacccggtagcctgtgtcatagcgataagttctcgaaaccagtcaccgatcgagacattgagacagctttatacggagacgagcacaggcgatagacagctgccgaattgggtggatggggagttcttaagatattatgtgcttgtccacgatgatgacaaggatgatatcacgaggtcaatgtctctattcgagcagatgaaacgaaaccttggtcttcactgccacttgctccgcataagagggtcacagagtctagccacagacgacgacagcatacccttgccccggagcgaatggatgtccgccgcagaagaattagcagacttaagaaggacagaggaccacgagggcttcgaagacccaacgagatacatattcgactccgacgccaccgccatacggacgttcatccgagaaatggtcatgcaatccatcatccccacaatggagcgccacgtatcagtctggaacgaccaggtagcctcgcgacggcggggtctagcaggtcgattcgtcgggctgacaagacgctggggattcggcggcggcggtagctctcgatcgtccacagggcctagcacggggaataactacgattctcttggcttttaccgatctgatacccctgaagccatcatgcggaaactagcggactacgcgttcatgctacgagattggaagctagcgcattccacgtatgatattctgcggggggactttcaaaatgataaggcgtggcggtatcacgctgcggctaacgaaatggccgccctgagcctgctcatcatgccccagaacctgtcgagtaagacgagggccaagacagtggatactatgtttgaagcggcgtactactcctaccttgcgcggtgcagcgcgccgtacggcgctgcgagatgtctggctcttgggttagaattactcaggctaagaggcggaagcagcatagacgatgcggcgaaatggggcattagactcctcgagagcaagacgctgggtgccgtaggcgaggctctcatcaaagaaagaatggcggtttgctacgcgacgaaagatgggctggggagtcgtgggtggggtggtaggaagaggaagagtggcctttggagcgtgatgggtgctgagcattggctgggtttagagaaatttgttcaggcgcagcggtgcttgaacgaggcgaagaagacgtatggggatctgcccacggagggcgtagaggggtttgagagggcagccgagtttatgctggggattggccagaggctgaatgagaatcttgagggcagggatgatggggggagtgagcagagtgagattgtggagagtagtgaggttttcgaggggagggagaggaggaagagtaacccgcttagtgatcggatggctggtatgagtttagatgaggagggggagaggggggagtttgggtag

SEQ ID NO: 6295 - protein, 756 aa, Muscodor strobelii
  misc_feature: SGI Peptide ID NO. 561836
  misc_feature (5)..(705): NCBI GI: 46116848 Blast Desc: FG04266.1 [Gibberella zeae PH-1]
  misc_feature (13)..(732): NCBI GI: 171683587 Blast Desc: protein product [Podospora anserina] gi|170941753|emb|CAP67407.1| protein product [Podospora anserina]
  misc_feature (9)..(706): NCBI GI: 164429193 Blast Desc: NCU05213 [Neurospora crassa OR74A] gi|157072977|gb|EAA32976.2| conserved [Neurospora crassa OR74A]
  misc_feature (49)..(751): NCBI GI: 116194416 Blast Desc: CHGG_03806 [Chaetomium globosum CBS 148.51] gi|88179719|gb|EAQ87187.1| CHGG_03806 [Chaetomium globosum CBS 148.51]
  misc_feature (9)..(736): NCBI GI: 169611688 Blast Desc: SNOG_08958 [Phaeosphaeria nodorum SN15] gi|111063006|gb|EAT84126.1| SNOG_08958 [Phaeosphaeria nodorum SN15]
  misc_feature (50)..(750): NCBI GI: 121716901 Blast Desc: conserved [Aspergillus clavatus NRRL 1] gi|119404103|gb|EAW14520.1| conserved [Aspergillus clavatus NRRL 1]
  misc_feature (46)..(737): NCBI GI: 119482213 Blast Desc: NFIA_091980 [Neosartorya fischeri NRRL 181] gi|119409289|gb|EAW19238.1| conserved [Neosartorya fischeri NRRL 181]
  misc_feature (110)..(737): NCBI GI: 71002646 Blast Desc: conserved [Aspergillus fumigatus Af293] gi|66853642|gb|EAL93966.1| conserved [Aspergillus fumigatus Af293]
  misc_feature (110)..(737): NCBI GI: 159130058 Blast Desc: conserved [Aspergillus fumigatus A1163]
  misc_feature (110)..(737): NCBI GI: 145258958 Blast Desc: An04g08690 [Aspergillus niger] gi|134074842|emb|CAK38956.1| protein product [Aspergillus niger]
  misc_feature: Useful for introducing or modulating the production of volatile compounds
MRSFDHGAPTERVATPPMAASALKSPGLRQSLGDAFGSQSLSDTSLPYRRSNPSTASLYASTFSPPGSRSQSPSRRPLSVRNSGSVFGANPNNASALAAGAGDSPGNPLNLILRAFVPHVALYTSEDTDDLLREKGFEQGLWELLRPFGERVQGKVIIRDSNGLSRTFEDYSLHFVRFGERIVHPEPTITGLKNPQSSRTNGVSEKRNETSRPSQGETTIADVEAVVERHLTYAEESFFGTPHSPTSHGLDIDAPSPYYALYLRRLLSGMSLTPHETFAHPVACVIAISSRNQSPIETLRQLYTETSTGDRQLPNWVDGEFLRYYVLVHDDDKDDITRSMSLFEQMKRNLGLHCHLLRIRGSQSLATDDDSIPLPRSEWMSAAEELADLRRTEDHEGFEDPTRYIFDSDATAIRTFIREMVMQSIIPTMERHVSVWNDQVASRRRGLAGRFVGLTRRWGFGGGGSSRSSTGPSTGNNYDSLGFYRSDTPEAIMRKLADYAFMLRDWKLAHSTYDILRGDFQNDKAWRYHAAANEMAALSLLIMPQNLSSKTRAKTVDTMFEAAYYSYLARCSAPYGAARCLALGLELLRLRGGSSIDDAAKWGIRLLESKTLGAVGEALIKERMAVCYATKDGLGSRGWGGRKRKSGLWSVMGAEHWLGLEKFVQAQRCLNEAKKTYGDLPTEGVEGFERAAEFMLGIGQRLNENLEGRDDGGSEQSEIVESSEVFEGRERRKSNPLSDRMAGMSLDEEGERGEFG

SEQ ID NO: 6296 - DNA, 2740 bp, Muscodor strobelii
  misc_feature: SGI EST ID NO. CUFF.15773.0
  misc_feature: Variant of the nucleotide sequence at SEQ ID NO 6294
gcgatccgtttgccttcacgccttactagtcgacaatttccgtgaagcccaacttttgaatatttcaatattcggatctcatactcaacgattctcataagcacaagccgctcaaacgtttacagtcgcacaggccgatgactgtcaactcgttgcaattttagctcgtcgctcttcccccagagcataggtagttggcacatagctaagaactacgtcctcggctgtcgtctcaacaggtacctaaggcacctatcatcccggcgaacccgacctcacctgcgcaccgcacgacttctcgcccgcctcacgtcgcccatgctctggctgctggagagccactttccggacgacaagccagcctctgcctgtctgcctccatgcggtccttcgaccatggtgcgcccaccgaacgcgtcgccacacccccgatggcggcctccgccctgaagagcccgggtctgcgccagtctctcggcgacgccttcggctcccagtccctctccgacacctccctcccctaccgccgctccaatccctctaccgcctccctctacgcctcgaccttctccccgccaggctcccgctcccagtcgcccagccgccggcccttgtctgtccgcaacagtggctctgtcttcggcgcaaaccccaacaatgcttcagctctagctgccggcgctggtgatagccctggcaatcctctgaatctaattctgcgcgcctttgtaccacatgtggcactctacacctcagaggacaccgacgatctgctcagggaaaagggctttgagcaggggctatgggagctacttcgccccttcggcgagcgtgttcagggcaaggtcatcatccgtgatagcaatggcttgagccgcacattcgaagactattcgcttcattttgtacgcttcggagagcgcatcgtgcaccccgaacccaccatcaccgggctcaagaaccctcagagctccaggacaaatggagtgtcggagaagagaaacgaaacatcgaggccttctcaaggagagactactatcgccgacgtagaagcggtagtagagagacacctgacctatgcagaggaatccttcttcggcactccacacagtcccacgagccatggattagacatcgatgcgccctccccttactacgccctatatctccgcagactgctctcgggcatgtccttgaccccccatgagacctttgctcacccggtagcctgtgtcatagcgataagttctcgaaaccagtcaccgatcgagacattgagacagctttatacggagacgagcacaggcgatagacagctgccgaattgggtggatggggagttcttaagatattatgtgcttgtccacgatgatgacaaggatgatatcacgaggtcaatgtctctattcgagcagatgaaacgaaaccttggtcttcactgccacttgctccgcataagagggtcacagagtctagccacagacgacgacagcatacccttgccccggagcgaatggatgtccgccgcagaagaattagcagacttaagaaggacagaggaccacgagggcttcgaagacccaacgagatacatattcgactccgacgccaccgccatacggacgttcatccgagaaatggtcatgcaatccatcatccccacaatggagcgccacgtatcagtctggaacgaccaggtagcctcgcgacggcggggtctagcaggtcgattcgtcgggctgacaagacgctggggattcggcggcggcggtagctctcgatcgtccacagggcctagcacggggaataactacgattctcttggcttttaccgatctgatacccctgaagccatcatgcggaaactagcggactacgcgttcatgctacgagattggaagctagcgcattccacgtatgatattctgcggggggactttcaaaatgataaggcgtggcggtatcacgctgcggctaacgaaatggccgccctgagcctgctcatcatgccccagaacctgtcgagtaagacgagggccaagacagtggatactatgtttgaagcggcgtactactcctaccttgcgcggtgcagcgcgccgtacggcgctgcgagatgtctggctcttgggttagaattactcaggctaagaggcggaagcagcatagacgatgcggcgaaatggggcattagactcctcgagagcaagacgctgggtgccgtaggcgaggctctcatcaaagaaagaatggcggtttgctacgcgacgaaagatgggctggggagtcgtgggtggggtggtaggaagaggaagagtggcctttggagcgtgatgggtgctgagcattggctgggtttagagaaatttgttcaggcgcagcggtgcttgaacgaggcgaagaagacgtatggggatctgcccacggagggcgtagaggggtttgagagggcagccgagtttatgctggggattggccagaggctgaatgagaatcttgagggcagggatgatggggggagtgagcagagtgagattgtggagagtagtgaggttttcgaggggagggagaggaggaagagtaacccgcttagtgatcggatggctggtatgagtttagatgaggagggggagaggggggagtttgggtagatagatagggggctgtgatgttggtgagagtgggtgtgtatgtgagatagatagatagataccttgtgtaatggataatttaccgatca

SEQ ID NO: 6297 - DNA, 2367 bp, Muscodor strobelii
  misc_feature: SGI cDNA ID NO. 561837
  misc_feature: Encodes the peptide sequence at SEQ ID NO 6298
atggcagacggtggccttctgctcaatttcgatgtcagcgaccagcctgcggtcaagcgccaagtcaagtacactggtggcacgtggagggatcgagcccgagcgaagaagaatgcgagaaatggcggcctatcgaccggctccaatgccaccccgctacccacggatcgacgggatcgggagcaaccagaggctgacgacataggaacagacaggccagcaaagaggcagagaacgcaacatgattctccccatcaccggcctgatttctcctcgcgctccctatcgtacaagactggcaagcttccaccgggaagcatcagcacagggccgaggaatgcctcaaatggcacgaaccccgatggcatcacctcacggttattcactaagaacccgacgccgcacactgtcttcgaggaccctgtagaggaggccgaacctgccaagccttcgaatgcccccttgtctgacgaggcagagaatttccacgctcttgggctttcacggcgccttgctcaacatttatcggccaaattggaactgaaggccccgacatctatacagaagaatactataccacagctttcgaaagaagacagcgatgcctttctccaggcacaaactggttccggtaaaaccctagcatatctgctacccatcgtgcagcgaatcatggccatgagccaccatgaggacggcacaagcaccggtactaagatccatcgcaactccggcttgtttggcataattctagcgccgacgcgagagttgtgtaagcagattgcaacggtactggaaaaggttttacgctgtgcaccgtggatcgtgagcacttcggtcattggaggtgaaagcaaaaagtcggagaaagcccgcatacggaagggtgtcaatattctgattgccacgcctggccgacttgctgaccatctcgacaatacagaagtgcttgatgtcggaaccgtaaggtggcttgtattggacgaaggagataggctgatggaaatgggtttcgaagaggagctcaaaagtattgttgggaagatacgcaaacaaggactcaagaataccagccaagacggcgtcagactcgacagactcccacagcgtcgtgtcacgatcctgtgttcggctacgatgaagatgaatgtccagaaactaggcgagatcagtttgcaggatgcggttcatatcacaggctctccatccgaacacgagggcggcgagacagccgagatcaacgaggctgtttttgctgccccttcccagctcaagcagtcatacatcatcacccccgcaaaattacgattggtcactttagttgcgcttttgaagtcttcctttgcgcgaaaggggtctgtcatgaaagccatcatcttcatatcctgcgccgactcggtcgacttccactttgacctcctgagaagtggcagtagccggtcagcatgggccgagaacgcgacagtcagcgtcaacacggtcgctgatatggcatacgtgacctcgcccgcgaacccgaccgtgtcgctggtcaagctccatggctctcttccacaaccggttcgcacggccaccctgaaagcattccgggaggaaaagaatccttgtgttctggtcaccacagatatagcgtcgcgtggtctcgatgtccctgccgtcgacctagtcgtcgagtacgatccatcattcagtgtggatgaccacactcaccgtatcggtcgaacggctcgtgccggccggccgggaagggcggtgctcttcgtccagccgggctgcgaggaaggctacatcgggctgttgaactctgcatcttcagtggcaccgcagtcctacgagccgactctccagaaaggattcttctcgcccgtcactttaccaaaggaagacaaagacacggaggcacccgtactagtctctgagaaacaatcaccaaactcccgggccgaggcgttacagctccactttgaacagcgcttgttggcctctgacaaagaggagagcaagtccaagttgctagactcggcgcggcaagcgttcaggtcgcacatccgagcgtatgccacgcacgtgcgcgacgagcggcagttcttcgacattacgcaactgcaccttggccacacagcgaagagctacgggctacgagaagctccaggaggcattggaggtggcccatcgagaagaacatacaaggctggacagaacaaaaatggtggagatcagagtaagagtggtggtaaggacgaagacaagaagtcgaagaggtttgatgacgatgatattgcagctgtggacgatgatgcggcaaagagaatgcgtatgaagatgaagtcggtcatgaatgcatcaagcgagttcaatattggttag

SEQ ID NO: 6298 - protein, 788 aa, Muscodor strobelii
  misc_feature: SGI Peptide ID NO. 561837
  misc_feature (185)..(387): Pfam Id: PF00270 Pfam Desc: DEAD/DEAH box helicase
  misc_feature (502)..(579): Pfam Id: PF00271 Pfam Desc: Helicase conserved C-terminal domain
  misc_feature (3)..(788): NCBI GI: 85104639 Blast Desc: NCU06520 [Neurospora crassa OR74A] gi|74628808|sp|Q7S873.1|DBP7_NEUCR RecName: Full=ATP-dependent RNA helicase dbp-7 gi|28923349|gb|EAA32541.1| NCU06520 crassa
  misc_feature (1)..(788): NCBI GI: 116196702 Blast Desc: CHGG_04949 [Chaetomium globosum CBS 148.51] gi|118578047|sp|Q2GZU7.1|DBP7_CHAGB RecName: Full=ATP-dependent RNA helicase DBP7 gi|88180862|gb|EAQ88330.1| CHGG_04949 globosum
  misc_feature (1)..(788): NCBI GI: 171676912 Blast Desc: protein product [Podospora anserina] gi|170936523|emb|CAP61183.1| protein product [Podospora anserina]
  misc_feature (1)..(788): NCBI GI: 39976533 Blast Desc: MGG_05810 [Magnaporthe grisea 70-15] gi|152013491|sp|A4QX49.1|DBP7_MAGGR RecName: Full=ATP-dependent RNA helicase DBP7 gi|145011955|gb|EDJ96611.1| MGG_05810 grisea
  misc_feature (1)..(788): NCBI GI: 256726944 Blast Desc: [Nectria haematococca mpVI 77-13-4]
  misc_feature (96)..(788): NCBI GI: 156031235 Blast Desc: SS1G_14039 [Sclerotinia sclerotiorum 1980] gi|160380627|sp|A7F8V8.1|DBP7_SCLS1 RecName: Full=ATP-dependent RNA helicase dbp7 gi|154699441|gb|EDN99179.1| SS1G_14039 1980]
  misc_feature (96)..(788): NCBI GI: 154317701 Blast Desc: BC1G_03202 [Botryotinia fuckeliana B05.10] gi|160380626|sp|A6RSH5.1|DBP7_BOTFB RecName: Full=ATP-dependent RNA helicase dbp7 gi|150844376|gb|EDN19569.1| BC1G_03202 B05.10]
  misc_feature (1)..(788): NCBI GI: 46136449 Blast Desc: FG09740.1 [Gibberella zeae PH-1] gi|91206550|sp|Q4HZ68.1|DBP7_GIBZE RecName: Full=ATP-dependent RNA helicase DBP7
  misc_feature (1)..(788): NCBI GI: 238495987 Blast Desc: ATP dependent RNA helicase (Dbp7), [Aspergillus flavus NRRL3357] gi|220694109|gb|EED50453.1| ATP dependent RNA helicase (Dbp7), [Aspergillus flavus NRRL3357]
  misc_feature (1)..(788): NCBI GI: 169775367 Blast Desc: [Aspergillus oryzae RIB40] gi|91206549|sp|Q2UE66.1|DBP7_ASPOR RecName: Full=ATP-dependent RNA helicase dbp7 gi|83770014|dbj|BAE60149.1| protein product
MADGGLLLNFDVSDQPAVKRQVKYTGGTWRDRARAKKNARNGGLSTGSNATPLPTDRRDREQPEADDIGTDRPAKRQRTQHDSPHHRPDFSSRSLSYKTGKLPPGSISTGPRNASNGTNPDGITSRLFTKNPTPHTVFEDPVEEAEPAKPSNAPLSDEAENFHALGLSRRLAQHLSAKLELKAPTSIQKNTIPQLSKEDSDAFLQAQTGSGKTLAYLLPIVQRIMAMSHHEDGTSTGTKIHRNSGLFGIILAPTRELCKQIATVLEKVLRCAPWIVSTSVIGGESKKSEKARIRKGVNILIATPGRLADHLDNTEVLDVGTVRWLVLDEGDRLMEMGFEEELKSIVGKIRKQGLKNTSQDGVRLDRLPQRRVTILCSATMKMNVQKLGEISLQDAVHITGSPSEHEGGETAEINEAVFAAPSQLKQSYIITPAKLRLVTLVALLKSSFARKGSVMKAIIFISCADSVDFHFDLLRSGSSRSAWAENATVSVNTVADMAYVTSPANPTVSLVKLHGSLPQPVRTATLKAFREEKNPCVLVTTDIASRGLDVPAVDLVVEYDPSFSVDDHTHRIGRTARAGRPGRAVLFVQPGCEEGYIGLLNSASSVAPQSYEPTLQKGFFSPVTLPKEDKDTEAPVLVSEKQSPNSRAEALQLHFEQRLLASDKEESKSKLLDSARQAFRSHIRAYATHVRDERQFFDITQLHLGHTAKSYGLREAPGGIGGGPSRRTYKAGQNKNGGDQSKSGGKDEDKKSKRFDDDDIAAVDDDAAKRMRMKMKSVMNASSEFNIG

SEQ ID NO: 6299 - DNA, 2771 bp, Muscodor strobelii
  misc_feature: SGI EST ID NO. CUFF.15775.0
  misc_feature: Variant of the nucleotide sequence at SEQ ID NO 6297
caaaatttacaataattctgccagtccaggacctcccctccacaacccaatcaagatcagtgagacaaacatcgcaatcatggcagacggtggccttctgctcaatttcgatgtcagcgaccagcctgcggtcaagcgccaagtcaagtacactggtggcacgtggagggatcgagcccgagcgaagaagaatgcgagaaatggcggcctatcgaccggctccaatgccaccccgctacccacggatcgacgggatcgggagcaaccagaggctgacgacataggaacagacaggccagcaaagaggcagagaacgcaacatgattctccccatcaccggcctgatttctcctcgcgctccctatcgtacaagactggcaagcttccaccgggaagcatcagcacagggccgaggaatgcctcaaatggcacgaaccccgatggcatcacctcacggttattcactaagaacccgacgccgcacactgtcttcgaggaccctgtagaggaggccgaacctgccaagccttcgaatgcccccttgtctgacgaggcagagaatttccacgctcttgggctttcacggcgccttgctcaacatttatcggccaaattggaactgaaggccccgacatctatacagaagaatactataccacagctttcgaaagaagacagcgatgcctttctccaggcacaaactggttccggtaaaaccctagcatatctgctacccatcgtgcagcgaatcatggccatgagccaccatgaggacggcacaagcaccggtactaagatccatcgcaactccggcttgtttggcataattctagcgccgacgcgagagttgtgtaagcagattgcaacggtactggaaaaggttttacgctgtgcaccgtggatcgtgagcacttcggtcattggaggtgaaagcaaaaagtcggagaaagcccgcatacggaagggtgtcaatattctgattgccacgcctggccgacttgctgaccatctcgacaatacagaagtgcttgatgtcggaaccgtaaggtggcttgtattggacgaaggagataggctgatggaaatgggtttcgaagaggagctcaaaagtattgttgggaagatacgcaaacaaggactcaagaataccagccaagacggcgtcagactcgacagactcccacagcgtcgtgtcacgatcctgtgttcggctacgatgaagatgaatgtccagaaactaggcgagatcagtttgcaggatgcggttcatatcacaggctctccatccgaacacgagggcggcgagacagccgagatcaacgaggctgtttttgctgccccttcccagctcaagcagtcatacatcatcacccccgcaaaattacgattggtcactttagttgcgcttttgaagtcttcctttgcgcgaaaggggtctgtcatgaaagccatcatcttcatatcctgcgccgactcggtcgacttccactttgacctcctgagaagtggcagtagccggtcagcatgggccgagaacgcgacagtcagcgtcaacacggtcgctgatatggcatacgtgacctcgcccgcgaacccgaccgtgtcgctggtcaagctccatggctctcttccacaaccggttcgcacggccaccctgaaagcattccgggaggaaaagaatccttgtgttctggtcaccacagatatagcgtcgcgtggtctcgatgtccctgccgtcgacctagtcgtcgagtacgatccatcattcagtgtggatgaccacactcaccgtatcggtcgaacggctcgtgccggccggccgggaagggcggtgctcttcgtccagccgggctgcgaggaaggctacatcgggctgttgaactctgcatcttcagtggcaccgcagtcctacgagccgactctccagaaaggattcttctcgcccgtcactttaccaaaggaagacaaagacacggaggcacccgtactagtctctgagaaacaatcaccaaactcccgggccgaggcgttacagctccactttgaacagcgcttgttggcctctgacaaagaggagagcaagtccaagttgctagactcggcgcggcaagcgttcaggtcgcacatccgagcgtatgccacgcacgtgcgcgacgagcggcagttcttcgacattacgcaactgcaccttggccacacagcgaagagctacgggctacgagaagctccaggaggcattggaggtggcccatcgagaagaacatacaaggctggacagaacaaaaatggtggagatcagagtaagagtggtggtaaggacgaagacaagaagtcgaagaggtttgatgacgatgatattgcagctgtggacgatgatgcggcaaagagaatgcgtatgaagatgaagtcggtcatgaatgcatcaagcgagttcaatattggttagaatacccccttattgccgacgggcaatggacatgaagcacgatgaacttggagtattgccattcactttttacaagctaccacttccccgacgtgatttctgccagaaaactacatacatttgagtttttgttgtagtgaaaatcagatgtcgaagtactagacaagtcgtgcatcgcattcgactacgccaatcaaactgtctcaatcatcggatacagaatgtttcccgacttagagcatcaaacaagacgtgagaggacatgacgctgaatgtggtgaaggctgggttctgtagaagatacactgtccatgtgaggcacggg

SEQ ID NO: 6300 - DNA, 3528 bp, Muscodor strobelii
  misc_feature: SGI cDNA ID NO. 561838
  misc_feature: Reduced expression when VOC is produced
  misc_feature: Encodes the peptide sequence at SEQ ID NO 6301
atgcccaccatctactcctccctctaccagaacttcatccgtcaagggttcgccaaatctttcacccacggctacgcgcagtctgtcgtagctgccacccatccccatgttctaaactcacagaaccgtccttccttcgctcgacgtcacagtcagctggtcggacgcctcgctaccttccaacctcagagcgcattccacccgctcaatgcgaacgctcatcatgagcagcgccacgaccgacgtgccagccatggtaacctagacgcctacttcgaggccctcaagaagagccaagatgagggcgtggttgagccagagtggactcagttccagttcccgaagcctattgagtggaagccgaacgctgagtccatccttgagggtcccgaagctggcatccacagcgccggcgctgttgctggccaagatgcctccgctgcaccggtacccgtcgacgtcgaggccgctctggcgcatatcaacgctgctatcgagaaggaaatcgaagtgcgggaactgcgtgaagcgttggaggatagcactgccaattccctcagatcagcgtctccaggtgtcgagagtattgttcagtcgcgcgctcagtcacctgccatcgacagaagtgcaactcccgctagcatcgcccgcagcttgacaccgcctgtcaactctcagtcccagagctacgccgatcacctcactaaactgagcgaagatggccgatatgccgagatacctgcagtcttcgaggccatgctggttgccgatattcaacccattgctaccgcatacaatgccttgttggtcgccgctatccacatccctggcgagaagtcggaaattgtctccaaggccctcgatgtctatgctgatatggtccgacgtaagatcacccctgatgctgatactttcaatatcttggttggccttctttctgctcgctgcctcgaggtcaatggattgaagcaatctctggacgagaagcgggtccggttcggtggcatggatgagcctggaaaattcatgtttgcatcaaatgaattggaacatgctatcctctccgaagacgatcgacttgacctcgctctgaagttgttcgaatcatcggtcaacttgcgaaaggccaactactcatccgagacttatcaccagctcatctcagcatgtgcgcaagacgggcgtgtggcagaaatgctcgccttgtttgagcacatggagctgaccggcacgatccctttcgctgcaacatttccctccatgatcacagcctttgctactacgggtgacctagctagcgcagtggaatgttacaacgaatacaaggagctcgctgttgctcacgacagtggcaaatacacgctcaatgatcgacttgacggccaggtctatgcttcggtcattaacgcatatgtcattaacaataagctcgagggagctatgaagttctacgagaagcttgtgaagtcatacggcgtccgtgctagcgagattgaagccggtctcatcactggaggattcgtcaagggtctcactactcgtggtatctaccaggaggctttgcaatgggctcagagtgttgacagccaggaaaacgccgaagcctttgctaagatcgccaccgaggctgctgaccacggagaccgccatagtgccgttaaggcttttgctcatattcctgatggataccagcacatagcgacgcccgccatgtctttgcttgccctttgcgtgcgtcaaggagatatatcgggtgcttctcggtattggcatattctgagcagcccggaaatgtctgtcaacgcatcattcattgaaccgactgccatgtatgctgttgccatgattgggtctggtcaggttgcggatgggctcactcaatcggagctcatgttcgaacgaatccgagctgttgaccgagacaaccaggctcagcttgctgatgagattgatgaaggtgtcgactttatctcgagctacatgtcatcccgcaatattgtagatcctcgcatcgtggtcgcgcccagtttcgcgccgcctcaggagactttcgtcgcttcgccatatccttcagctccagttttaccagcattcgaagataactttgacccatacgcacaatctactgatttcaaaggctcctccatcatttcggatgagttggagggtgcacatggtcgcaagggacccaagcttcaagacgccttggcgcgatttcgcaacatgcgaagggccggtcgccacccgagatacatcacctattccaagctcatctcggcggccgcccgtgagggtaagatggaactgtgtcacgacattctctcgatggcacgcacagatgttcctcttcttcctcaatacgttgttgtacgatatggctggtcctctatccttgatgccatggttggcgcgtgcctcacgctaggtgaccgcgcttcagctgagcatttccaccgagaacttctggatatgggttccgcaccttctgcaaacacattcggtctatacatcactacattgaaagagtcgactaaaacctttgacgaagcttccgaagcggtcaagatcttccacagggctcaggctgaaggggtcgagccttcatcattcctgtataatgcactgatcggcaagttgggcaaagcgcgtcgtatcgatgactgtctattctacttcggagaaatgcgtgctcttggcatcaaaccaaccagcgtcacctacggtactatcgtcaacgctctatgccgtgtcagcgacgagaaatttgccgaggagctgtttgacgaaatggaggccatgcctaactacaaggcaagacctgctccttacaacagcatgatgcagttctttttgacgaccaagcgcgacaagtcgaaagttctctcatattatgagcgcatgaaggccaagaatattgcgcccactgctcacacgtacaagcttcttgtggacacccatgccacactggagcctgttgatatggcggctgcggagaatgttctcgacatgattcggtcttcggggcaaactcccgagccagtgcattacgcgtcgctcatccacgcacgtggttgtgtgctgcatgacatggagggcgcacagaaggtcttcgacacggtcatgagcgaccccaccatcccacccaacgcttgtctcttccaggctctttttgaggctatggttgccaatcatcgtgttgcagaaaccgaggctttcatacagcagatgcgccaacgacgagttgagctcaccccttatatcgccaacacgttgatccacggatgggccggcgagaaaatcatcgcgaaggctgcgtcgatctaccacagcgtaaggtttgaaaagcgcgagcctagcacctacgaagccatgactcgtgcttaccttgccgtggaggagcgtgaccaggccaacggcgtcgtatcggaaatgatgtcccgaggctaccctagtgctgtggtgaacaaggtgttggagcttctgagcggtggcagcggttcgcaggaagctgctcttgttcccgcctaa

SEQ ID NO: 6301 - protein, 1175 aa, Muscodor strobelii
  misc_feature: SGI Peptide ID NO. 561838
  misc_feature (870)..(904): Pfam Id: PF01535 Pfam Desc: PPR repeat
  misc_feature (905)..(933): Pfam Id: PF01535 Pfam Desc: PPR repeat
  misc_feature (381)..(415): Pfam Id: PF01535 Pfam Desc: PPR repeat
  misc_feature (1)..(1164): NCBI GI: 256727512 Blast Desc: NECHADRAFT_66428 [Nectria haematococca mpVI 77-13-4]
  misc_feature (1)..(1171): NCBI GI: 85105712 Blast Desc: NCU08674 [Neurospora crassa OR74A] gi|28923615|gb|EAA32787.1| conserved [Neurospora crassa OR74A]
  misc_feature (1)..(1157): NCBI GI: 39976531 Blast Desc: MGG_05811 [Magnaporthe grisea 70-15] gi|145011954|gb|EDJ96610.1| MGG_05811 [Magnaporthe grisea 70-15]
  misc_feature (1)..(1164): NCBI GI: 171676758 Blast Desc: protein product [Podospora anserina] gi|170936446|emb|CAP61103.1| protein product [Podospora anserina]
  misc_feature (1)..(1157): NCBI GI: 261359853 Blast Desc: pentatricopeptide repeat protein [Verticillium albo-atrum VaMs.102]
  misc_feature (11)..(1171): NCBI GI: 116196780 Blast Desc: CHGG_04988 [Chaetomium globosum CBS 148.51] gi|88180901|gb|EAQ88369.1| CHGG_04988 [Chaetomium globosum CBS 148.51]
  misc_feature (1)..(1164): NCBI GI: 154309191 Blast Desc: BC1G_07490 [Botryotinia fuckeliana B05.10] gi|150852533|gb|EDN27725.1| BC1G_07490 [Botryotinia fuckeliana B05.10]
  misc_feature (1)..(1164): NCBI GI: 156049861 Blast Desc: SS1G_08638 [Sclerotinia sclerotiorum 1980] gi|154693036|gb|EDN92774.1| SS1G_08638 [Sclerotinia sclerotiorum 1980]
  misc_feature (9)..(1160): NCBI GI: 169785993 Blast Desc: [Aspergillus oryzae RIB40] gi|83776205|dbj|BAE66324.1| protein product [Aspergillus oryzae]
  misc_feature (675)..(1164): NCBI GI: 169607585 Blast Desc: SNOG_06851 [Phaeosphaeria nodorum SN15] gi|160701443|gb|EAT85502.2| SNOG_06851 [Phaeosphaeria nodorum SN15]
  misc_feature: Useful for introducing or modulating the production of volatile compounds
MPTIYSSLYQNFIRQGFAKSFTHGYAQSVVAATHPHVLNSQNRPSFARRHSQLVGRLATFQPQSAFHPLNANAHHEQRHDRRASHGNLDAYFEALKKSQDEGVVEPEWTQFQFPKPIEWKPNAESILEGPEAGIHSAGAVAGQDASAAPVPVDVEAALAHINAAIEKEIEVRELREALEDSTANSLRSASPGVESIVQSRAQSPAIDRSATPASIARSLTPPVNSQSQSYADHLTKLSEDGRYAEIPAVFEAMLVADIQPIATAYNALLVAAIHIPGEKSEIVSKALDVYADMVRRKITPDADTFNILVGLLSARCLEVNGLKQSLDEKRVRFGGMDEPGKFMFASNELEHAILSEDDRLDLALKLFESSVNLRKANYSSETYHQLISACAQDGRVAEMLALFEHMELTGTIPFAATFPSMITAFATTGDLASAVECYNEYKELAVAHDSGKYTLNDRLDGQVYASVINAYVINNKLEGAMKFYEKLVKSYGVRASEIEAGLITGGFVKGLTTRGIYQEALQWAQSVDSQENAEAFAKIATEAADHGDRHSAVKAFAHIPDGYQHIATPAMSLLALCVRQGDISGASRYWHILSSPEMSVNASFIEPTAMYAVAMIGSGQVADGLTQSELMFERIRAVDRDNQAQLADEIDEGVDFISSYMSSRNIVDPRIVVAPSFAPPQETFVASPYPSAPVLPAFEDNFDPYAQSTDFKGSSIISDELEGAHGRKGPKLQDALARFRNMRRAGRHPRYITYSKLISAAAREGKMELCHDILSMARTDVPLLPQYVVVRYGWSSILDAMVGACLTLGDRASAEHFHRELLDMGSAPSANTFGLYITTLKESTKTFDEASEAVKIFHRAQAEGVEPSSFLYNALIGKLGKARRIDDCLFYFGEMRALGIKPTSVTYGTIVNALCRVSDEKFAEELFDEMEAMPNYKARPAPYNSMMQFFLTTKRDKSKVLSYYERMKAKNIAPTAHTYKLLVDTHATLEPVDMAAAENVLDMIRSSGQTPEPVHYASLIHARGCVLHDMEGAQKVFDTVMSDPTIPPNACLFQALFEAMVANHRVAETEAFIQQMRQRRVELTPYIANTLIHGWAGEKIIAKAASIYHSVRFEKREPSTYEAMTRAYLAVEERDQANGVVSEMMSRGYPSAVVNKVLELLSGGSGSQEAALVPA

SEQ ID NO: 6302 - DNA, 4248 bp, Muscodor strobelii
  misc_feature: SGI EST ID NO. CUFF.16993.1
  misc_feature: Variant of the nucleotide sequence at SEQ ID NO 6300
ctgcgattgccatcttcatcccatccgtgagccagcccacccacacgctcattattactgccacgattccctcttactgctttccttccttcttcctcaacagtagtattctaatccaacacagtcccatcctttctttttactttggcgcgtttgtttggcggctgcattgctgtcaaatgaacctgcaacgacctcccttaccttttctccattccccctcccctcctggtgtcatctaaatgcccaccatctactcctccctctaccagaacttcatccgtcaagggttcgccaaatctttcacccacggctacgcgcagtctgtcgtagctgccacccatccccatgttctaaactcacagaaccgtccttccttcgctcgacgtcacagtcagctggtcggacgcctcgctaccttccaacctcagagcgcattccacccgctcaatgcgaacgctcatcatgagcagcgccacgaccgacgtgccagccatggtaacctagacgcctacttcgaggccctcaagaagagccaagatgagggcgtggttgagccagagtggactcagttccagttcccgaagcctattgagtggaagccgaacgctgagtccatccttgagggtcccgaagctggcatccacagcgccggcgctgttgctggccaagatgcctccgctgcaccggtacccgtcgacgtcgaggccgctctggcgcatatcaacgctgctatcgagaaggaaatcgaagtgcgggaactgcgtgaagcgttggaggatagcactgccaattccctcagatcagcgtctccaggtgtcgagagtattgttcagtcgcgcgctcagtcacctgccatcgacagaagtgcaactcccgctagcatcgcccgcagcttgacaccgcctgtcaactctcagtcccagagctacgccgatcacctcactaaactgagcgaagatggccgatatgccgagatacctgcagtcttcgaggccatgctggttgccgatattcaacccattgctaccgcatacaatgccttgttggtcgccgctatccacatccctggcgagaagtcggaaattgtctccaaggccctcgatgtctatgctgatatggtccgacgtaagatcacccctgatgctgatactttcaatatcttggttggccttctttctgctcgctgcctcgaggtcaatggattgaagcaatctctggacgagaagcgggtccggttcggtggcatggatgagcctggaaaattcatgtttgcatcaaatgaattggaacatgctatcctctccgaagacgatcgacttgacctcgctctgaagttgttcgaatcatcggtcaacttgcgaaaggccaactactcatccgagacttatcaccagctcatctcagcatgtgcgcaagacgggcgtgtggcagaaatgctcgccttgtttgagcacatggagctgaccggcacgatccctttcgctgcaacatttccctccatgatcacagcctttgctactacgggtgacctagctagcgcagtggaatgttacaacgaatacaaggagctcgctgttgctcacgacagtggcaaatacacgctcaatgatcgacttgacggccaggtctatgcttcggtcattaacgcatatgtcattaacaataagctcgagggagctatgaagttctacgagaagcttgtgaagtcatacggcgtccgtgctagcgagattgaagccggtctcatcactggaggattcgtcaagggtctcactactcgtggtatctaccaggaggctttgcaatgggctcagagtgttgacagccaggaaaacgccgaagcctttgctaagatcgccaccgaggctgctgaccacggagaccgccatagtgccgttaaggcttttgctcatattcctgatggataccagcacatagcgacgcccgccatgtctttgcttgccctttgcgtgcgtcaaggagatatatcgggtgcttctcggtattggcatattctgagcagcccggaaatgtctgtcaacgcatcattcattgaaccgactgccatgtatgctgttgccatgattgggtctggtcaggttgcggatgggctcactcaatcggagctcatgttcgaacgaatccgagctgttgaccgagacaaccaggctcagcttgctgatgagattgatgaaggtgtcgactttatctcgagctacatgtcatcccgcaatattgtagatcctcgcatcgtggtcgcgcccagtttcgcgccgcctcaggagactttcgtcgcttcgccatatccttcagctccagttttaccagcattcgaagataactttgacccatacgcacaatctactgatttcaaaggctcctccatcatttcggatgagttggagggtgcacatggtcgcaagggacccaagcttcaagacgccttggcgcgatttcgcaacatgcgaagggccggtcgccacccgagatacatcacctattccaagctcatctcggcggccgcccgtgagggtaagatggaactgtgtcacgacattctctcgatggcacgcacagatgttcctcttcttcctcaatacgttgttgtacgatatggctggtcctctatccttgatgccatggttggcgcgtgcctcacgctaggtgaccgcgcttcagctgagcatttccaccgagaacttctggatatgggttccgcaccttctgcaaacacattcggtctatacatcactacattgaaagagtcgactaaaacctttgacgaagcttccgaagcggtcaagatcttccacagggctcaggctgaaggggtcgagccttcatcattcctgtataatgcactgatcggcaagttgggcaaagcgcgtcgtatcgatgactgtctattctacttcggagaaatgcgtgctcttggcatcaaaccaaccagcgtcacctacggtactatcgtcaacgctctatgccgtgtcagcgacgagaaatttgccgaggagctgtttgacgaaatggaggccatgcctaactacaaggcaagacctgctccttacaacagcatgatgcagttctttttgacgaccaagcgcgacaagtcgaaagttctctcatattatgagcgcatgaaggccaagaatattgcgcccactgctcacacgtacaagcttcttgtggacacccatgccacactggagcctgttgatatggcggctgcggagaatgttctcgacatgattcggtcttcggggcaaactcccgagccagtgcattacgcgtcgctcatccacgcacgtggttgtgtgctgcatgacatggagggcgcacagaaggtcttcgacacggtcatgagcgaccccaccatcccacccaacgcttgtctcttccaggctctttttgaggctatggttgccaatcatcgtgttgcagaaaccgaggctttcatacagcagatgcgccaacgacgagttgagctcaccccttatatcgccaacacgttgatccacggatgggccggcgagaaaatcatcgcgaaggctgcgtcgatctaccacagcgtaaggtttgaaaagcgcgagcctagcacctacgaagccatgactcgtgcttaccttgccgtggaggagcgtgaccaggccaacggcgtcgtatcggaaatgatgtcccgaggctaccctagtgctgtggtgaacaaggtgttggagcttctgagcggtggcagcggttcgcaggaagctgctcttgttcccgcctaagtctctgaaagcgctgatggacatccgctattctctttgtctttttcctttgtttctcagtgtttatgcgataccccgtgtgctgttgaggactaatgtgtttgggttggttgacggggttgtcgggtaaaatgcgtgtcgtttctctcagagcctcggcgggtatggctatatccgcggacgaggctggtgtttaaggtcagcgtctggtacaaaagaactgggtttgaaggttaggcatctggcatcggcgagcacgccttgagagcattcgccggcgcgcgggtatagacaaatctccactttgcatataaaagaaattacatggcatttccaggacggggacagtctggtaagccagagaggcagcaggtgtccgcctcttgggaagacaaacattacgctacctagtgtggcgagatgtcttgtctgtacaatagaaaccaaataataccagagcttgcattgagcaaccaat

SEQ ID NO: 6303 - DNA, 927 bp, Muscodor strobelii
  misc_feature: SGI cDNA ID NO. 561839
  misc_feature: Encodes the peptide sequence at SEQ ID NO 6304
atgcttgttctagtagtaggcgcaacaggcaatataggccaaaagatcgtcgacagccttctcaggcgcggacaccaggtgcgagcatgtgctcgcaaccctaacaaattctcagccgcaacactcgaccgtctggaaaagttcgtgacaagcacagcatactatgacgtgccagcgctcgatgaagcctgcgctggtgtcgatgctatcatttgcgcgtaccatggcagcaacgagctcgcagtcgaaggccaactgatgctcttgcgagcagcagaacgcgctggcgttcgaatctacgtctcggcgagttggaactcagattggcgacggcagaagcttggcgatcacgatacctacgatgcataccactgttttcaccatctggctaagctctcatcgactattcgtccgaattacatcatctcggggatccttggagaggtattgttctccaagccaggccgcatctcattttctccgcagaaccacggagtttgggatccggaggctaagagggttcagatatggggcgatccagcgcgtaaatggcattggacgagtgaggccgacggcgcggagtttgctgtggcgatcgcggaacaagagaatgcggctgagggcggattttggactgtttgttctgggtacgatacactggtagatatggcaaaaatctatgggcacactcgtggagagaatgtggtaattgagcagttgggttcagttgaggagctccgggcgaaggcgatggttgcgcgagcgcaaggacagagccatccggaccagttatgggattatatcggatatttctacgtgctctacattgtggacggaacctggacgccctgccagtttgataatgacaaactgggcgtaaagggcacgccgctgaaagaattccttgaacagaacccggatatctga

SEQ ID NO: 6304 - protein, 308 aa, Muscodor strobelii
  misc_feature: SGI Peptide ID NO. 561839
  misc_feature (3)..(214): Pfam Id: PF01370 Pfam Desc: NAD dependent epimerase/dehydratase family
  misc_feature (3)..(239): Pfam Id: PF05368 Pfam Desc: NmrA-like family
  misc_feature (3)..(71): Pfam Id: PF01370 Pfam Desc: NAD dependent epimerase/dehydratase family
  misc_feature (3)..(36): Pfam Id: PF05368 Pfam Desc: NmrA-like family
  misc_feature (3)..(71): Pfam Id: PF03435 Pfam Desc: Saccharopine dehydrogenase
  misc_feature (1)..(308): NCBI GI: 256731155 Blast Desc: NECHADRAFT_101732 [Nectria haematococca mpVI 77-13-4]
  misc_feature (1)..(306): NCBI GI: 238502027 Blast Desc: NAD dependent epimerase/dehydratase, [Aspergillus flavus NRRL3357] gi|220691057|gb|EED47405.1| NAD dependent epimerase/dehydratase, [Aspergillus flavus NRRL3357]
  misc_feature (1)..(308): NCBI GI: 256722222 Blast Desc: NECHADRAFT_52412 [Nectria haematococca mpVI 77-13-4]
  misc_feature (1)..(308): NCBI GI: 256734967 Blast Desc: NECHADRAFT_75757 [Nectria haematococca mpVI 77-13-4]
  misc_feature (1)..(290): NCBI GI: 256720334 Blast Desc: NECHADRAFT_89148 [Nectria haematococca mpVI 77-13-4]
  misc_feature (1)..(227): NCBI GI: 256724469 Blast Desc: NECHADRAFT_7231 [Nectria haematococca mpVI 77-13-4]
  misc_feature (1)..(246): NCBI GI: 256732341 Blast Desc: NECHADRAFT_7350 [Nectria haematococca mpVI 77-13-4]
  misc_feature (1)..(305): NCBI GI: 39964326 Blast Desc: MGG_09836 [Magnaporthe grisea 70-15] gi|145011141|gb|EDJ95797.1| MGG_09836 [Magnaporthe grisea 70-15]
  misc_feature (1)..(246): NCBI GI: 256733404 Blast Desc: NECHADRAFT_77455 [Nectria haematococca mpVI 77-13-4]
  misc_feature (1)..(308): NCBI GI: 46110807 Blast Desc: FG02285.1 [Gibberella zeae PH-1]
MLVLVVGATGNIGQKIVDSLLRRGHQVRACARNPNKFSAATLDRLEKFVTSTAYYDVPALDEACAGVDAIICAYHGSNELAVEGQLMLLRAAERAGVRIYVSASWNSDWRRQKLGDHDTYDAYHCFHHLAKLSSTIRPNYIISGILGEVLFSKPGRISFSPQNHGVWDPEAKRVQIWGDPARKWHWTSEADGAEFAVAIAEQENAAEGGFWTVCSGYDTLVDMAKIYGHTRGENVVIEQLGSVEELRAKAMVARAQGQSHPDQLWDYIGYFYVLYIVDGTWTPCQFDNDKLGVKGTPLKEFLEQNPDI

SEQ ID NO: 6305 - DNA, 1509 bp, Muscodor strobelii
  misc_feature: SGI EST ID NO. CUFF.15779.0
  misc_feature: Variant of the nucleotide sequence at SEQ ID NO 6303
gaaatatttaagctatgtgacacgacatctcattcattgatctggatctgttcgctctttccttacgtactacgtagcttaagggcacaaaaagtatattggtctcaaatcgtatcatacaatgcttgttctagtagtaggcgcaacaggcaatataggccaaaagatcgtcgacagccttctcaggcgcggacaccaggtgcgagcatgtgctcgcaaccctaacaaattctcagccgcaacactcgaccgtctggaaaagttcgtgacaagcacagcatactatgacgtgccagcgctcgatgaagcctgcgctggtgtcgatgctatcatttgcgcgtaccatggcagcaacgagctcgcagtcgaaggccaactgatgctcttgcgagcagcagaacgcgctggcgttcgaatctacgtctcggcgagttggaactcagattggcgacggcagaagcttggcgatcacgatacctacgatgcataccactgttttcaccatctggctaagctctcatcgactattcgtccgaattacatcatctcggggatccttggagaggtattgttctccaagccaggccgcatctcattttctccgcagaaccacggagtttgggatccggaggctaagagggttcagatatggggcgatccagcgcgtaaatggcattggacgagtgaggccgacggcgcggagtttgctgtggcgatcgcggaacaagagaatgcggctgagggcggattttggactgtttgttctgggtacgatacactggtagatatggcaaaaatctatgggcacactcgtggagagaatgtggtaattgagcagttgggttcagttgaggagctccgggcgaaggcgatggttgcgcgagcgcaaggacagagccatccggaccagttatgggattatatcggatatttctacgtgctctacattgtggacggaacctggacgccctgccagtttgataatgacaaactgggcgtaaagggcacgccgctgaaagaattccttgaacagaacccggatatctgagaggtcctgcgcttcacctaagccatttggttaggcgtgacggaggtagtgtaatgcattcgtctactacaactcgagagcataggttattctggccatgactagatgcattaccatatgatcatccgtagcgaaataccacctaagttttgcacaatgtttgccggcctattctgttaagaaatcgtcgcaaataatgtaaagagagaagcgtaggcaatgacgatgatgagtaggcctcggattactgtgcagatgaactcggtgatacgatgctacgaagctcggcggtgataacggatcagtgagcagagcccgggatcgtcaggagcagctacgcagatcttcatgggggcgtttccggtgatctcggactcggtgaaatagcatgaaccgaattctcggttgtgagttgcatcccgttgcatagccgatctgattacgattgatgtcagactgac

SEQ ID NO: 6306 - DNA, 261 bp, Muscodor strobelii
  misc_feature: SGI cDNA ID NO. 561840
  misc_feature: Reduced expression when VOC is produced
  misc_feature: Encodes the peptide sequence at SEQ ID NO 6307
atggcaaaaatctatgggcacactcgtggagagaatgtggtaattgagcagttgggttcagttgaggagctccgggcgaaggcgatggttgcgcgagcgcaaggacagagccatccggaccagttatgggattatatcggatatttctacgtgctctacattgtggacggaacctggacgccctgccagtttgataatgacaaactgggcgtaaagggcacgccgctgaaagaattccttgaacagaacccggatatctga

SEQ ID NO: 6307 - protein, 86 aa, Muscodor strobelii
  misc_feature: SGI Peptide ID NO. 561840
  misc_feature (1)..(86): NCBI GI: 256731155 Blast Desc: NECHADRAFT_101732 [Nectria haematococca mpVI 77-13-4]
  misc_feature (1)..(86): NCBI GI: 256734967 Blast Desc: NECHADRAFT_75757 [Nectria haematococca mpVI 77-13-4]
  misc_feature (1)..(86): NCBI GI: 256722222 Blast Desc: NECHADRAFT_52412 [Nectria haematococca mpVI 77-13-4]
  misc_feature (1)..(85): NCBI GI: 238502027 Blast Desc: NAD dependent epimerase/dehydratase, [Aspergillus flavus NRRL3357] gi|220691057|gb|EED47405.1| NAD dependent epimerase/dehydratase, [Aspergillus flavus NRRL3357]
  misc_feature: Useful for introducing or modulating the production of volatile compounds
MAKIYGHTRGENVVIEQLGSVEELRAKAMVARAQGQSHPDQLWDYIGYFYVLYIVDGTWTPCQFDNDKLGVKGTPLKEFLEQNPDI

SEQ ID NO: 6308 - DNA, 1509 bp, Muscodor strobelii; identical to SEQ ID NO: 6305
  misc_feature: SGI EST ID NO. CUFF.15779.0
  misc_feature: Variant of the nucleotide sequence at SEQ ID NO 6306

SEQ ID NO: 6309 - DNA, 441 bp, Muscodor strobelii
  misc_feature: SGI cDNA ID NO. 561841
  misc_feature: Reduced expression when VOC is produced
  misc_feature: Encodes the peptide sequence at SEQ ID NO 6310
atgcagttctctcagattattaccctaacctttgcggtcaccactctggccaaggtctacaacgacaacaccccgatctccgacttggtgccgagaccctccaatgccgttgtcatgcaagccgacgtcttcggaaccgcagtcgggaccgcgagcgttaagctccgtgctaggaccctggaagcccgtgctttgaacattcttgtatgcgaggacatcaactttgatggctcctgcatgacactcaacggtattcagaatggtgtctgctacaacatcaacggtatatggaacgatgtcatctcgtctacggacactcatggtgccacttgtgccgcgttcgaggaccagggctgtaacggcgaccagtcgaccgtcaatggcgcggtgaactggggatacatgaatgataagattagcgcctacaggtgctatgagtaa

SEQ ID NO: 6310 - protein, 146 aa, Muscodor strobelii
  misc_feature: SGI Peptide ID NO. 561841
  misc_feature (29)..(145): NCBI GI: 171679801 Blast Desc: protein product [Podospora anserina] gi|170939526|emb|CAP64754.1| protein product [Podospora anserina]
  misc_feature (47)..(144): NCBI GI: 171681495 Blast Desc: protein product [Podospora anserina] gi|170940706|emb|CAP65934.1| protein product [Podospora anserina]
  misc_feature (43)..(144): NCBI GI: 149210411 Blast Desc: MGCH7_ch7g682 [Magnaporthe grisea 70-15] gi|86196637|gb|EAQ71275.1| MGCH7_ch7g682 [Magnaporthe grisea 70-15]
  misc_feature: Useful for introducing or modulating the production of volatile compounds
MQFSQIITLTFAVTTLAKVYNDNTPISDLVPRPSNAVVMQADVFGTAVGTASVKLRARTLEARALNILVCEDINFDGSCMTLNGIQNGVCYNINGIWNDVISSTDTHGATCAAFEDQGCNGDQSTVNGAVNWGYMNDKISAYRCYE

SEQ ID NO: 6311 - DNA, 1477 bp, Muscodor strobelii
  misc_feature: SGI EST ID NO. CUFF.15789.0
  misc_feature: Variant of the nucleotide sequence at SEQ ID NO 6309
ttgggaagactttgattggaacgatcaagtcaacaatttgggacaagcataccagcctgctgaggacatatagtgcagagcctgccgcaacctggcaactatcgaatggatgtgggtgcagacttgaagagcctccccgtagcctgccctggccttccgtgttgaggtcattttttgccgtcccaagggtaaggatataatggtaatgaatatgtataaaaagaccatggttccctagatctcgtagtcatgctcttgatttcgcattctcatctccagctctattctcttcatcgtacaccacctccatatcttaggcatctaagccacaaacgccatgcagttctctcagattattaccctaacctttgcggtcaccactctggccaaggtctacaacgacaacaccccgatctccgacttggtgccgagaccctccaatgccgttgtcatgcaagccgacgtcttcggaaccgcagtcgggaccgcgagcgttaagctccgtgctaggaccctggaagcccgtgctttgaacattcttgtatgcgaggacatcaactttgatggctcctgcatgacactcaacggtattcagaatggtgtctgctacaacatcaacggtatatggaacgatgtcatctcgtctacggacactcatggtgccacttgtgccgcgttcgaggaccagggctgtaacggcgaccagtcgaccgtcaatggcgcggtgaactggggatacatgaatgataagattagcgcctacaggtgctatgagtaaggcgcggatcataaccttgaaatgtggcctcggttctagctgagactgagctactgcgtcgtgggatgctgttcaacacagttcaggtatctcgagcttctatcaacagtgccatacttggtccactcgtatagacaaatgtcatcaattggacactctctagagtctacctattgcatggccccagattatgaactacgagcacagtttcaagaaaataggtacataacagagcaacaatttcgttcgttcagaagccttgactatcccacgtatctcacattttacttcgaaacagcaaatctgaccgcgcgaggcgatccgcttgaaagaattagcgccggatgcatttgttcgcttagactcgtaggtttatgattaggcaccttgtggtggtcattaaagcaaacggacagtcttgtctcatggtgtgggtatcactacaccctgctaacacaactaatatatcttgcaaatagactttgaatacacctatggagctgttcgcaaaagcaaacttggaaataatatatagctcttttcaatcacgtaataatggccgaggtcggcgccaatacgtcgaatgatctcaagagacatgaggacaagcgagggtgttcttccctttgggataagacggaccagggccggttagattatcttatcagatccgaatctccgtgtatgtgccgatctcca

SEQ ID NO: 6312 - DNA, 4587 bp, Muscodor strobelii
  misc_feature: SGI cDNA ID NO. 561842
  misc_feature: Reduced expression when VOC is produced
  misc_feature: Encodes the peptide sequence at SEQ ID NO 6313
atggtggcttcaaaagaacttcaagatgtcgctgccgactactctaatgcagacgatgctgcctctgcaacttacctttctactccaccgaccgatatcgaagccgacggtctttcttccgagcagttggaacagatatggagctggaactcgcctctaccaccaaatctcgatacttgtatgcacgacctggtcaagcaccaagccgaaaaggaaccagaacgtttggcaatacaatcctgggatggcgacttcacttatcaagacgtagacttcaaatctgatttgtttgcctctaggcttgtcgcatcaggggttaaaaatggaacaattgtaccattatgcttcgagaagtcaagatggactgctatcgctgtccttgctgtaatgaaagccggaggcacatttgcgcttatggatccaagccagcccgaggggagattgcggaccatagtggaacaaaccggtgcttctgtccttgtcacttctaagcttcaagaagatgtcggtactaggattgctcctagtgagactcgaattaccttgacgcaaaaaattttagacgagacattcgcgagctcaagcctaccatcagtgccagctaacacgaatctttatatccagttcacgtctggtagcacaggtaaacctaaaggcgttgtcattacccacgaaaactatacaagtggcgcgataccgcgtggtgatgctgttggctacaaaccacattcacgcgtcttagacttcgcgtcgtacgccttcgacgtgtgtatcgattgcatgctatgcaccctgtcaacaggtggatgcctttgcatcccgtccgacgctgatcgaatcaacgacttgagcggcgcagttcgaagaatgaacatcaatatggctcacatgactccctctgttgctcgggtgctcgatgcggatattataccttcgctcgaagttctaggcttgggaggggaggctatatctgctggcgacgccttggtttggagtcagaataccaaggtcattaatgcatatgggccatcagagtgcacagtcggatgtgccgttaatagcgacgttggggcagaatcccaaaagacacaaattagcattggtagaggcgtcggggctgcaacatggatcgtccagccttcagaccacgatcagcttgtaccgatcggggcaattggtgaactcttgatcgaaggacctatagtaggtcctggatacttgaacgagcctgataagacagccgcggcttttgtgagcgatccgagatggctgattgctggaagtccaaaacaccaaggccgcacaggacgactttataagactggcgatctggtcagatacgatgatgatggaacgatcctgttcgttggccgcggcgaccagcaggtaaaactgcgaggacagcgtatcgaattagccgagatcgaacaccatatgcgagacaaacttccaccaggaactcgtgtggccgctgaagtgatcaagcctggaggcaaaacgagcgatccaactcttgtcgcattcattgcagagcgtgctggtctcgtcacagacacagagagtctcgtagggacacattctcctaagatacaggatgcactcgtcgatatgaacgagttcctttctaacgatctccctatctacatgattccggccgtctatataccccttcaggtcatgccattactcgtttccgccaaaacagatcgtaagaggctgagggaactaggctcttcattcaacaggaaagatatttccaaattcgcagtagccattgtaccgaggaaacagccctgtaccccaatagaagtcaaattgtcagaggcatggcagaaaatccttggtgctgatctagaaatcagtgctcacgacaacttcttcgctgttggaggagactcactccgcgcgatgaaattggtggccgaatctcgtgcgctgggtattgccctcacagtcgccaatatctttgccaatcctacgttgtcagatatggcaatcgcggcgagggcttacaccgaacaagatgctatcgatataccggcattttcattgcttggaaatgagtggactgagagtgatgctcgtgcacagtgcgcatctctctgcaacatcgaatccgatctcatagaggacatttacccatgcacaccgcttcaagaaggtctcatggcactatcggccaagattagtgaagcatacgttgctcaacgtgttgtggagtttgacactgagtcggaagctcagagcctcttgaaagcgttccgggatgcttcagtgggttgcactatccttcgtactagaattgtgcagatacccggccatgggctcatgcaagttgtgattaagaacgactttgattgtgaatcaagaacagaccaaagccttaagacgtacctcgaagatgacatgagcaaatctgttggtcttgggacgcctttagtccgctatggtcttgtatgtaacgctaaagagacggggaaatcacacttcgttctaactatgcaccatgcgctttacgatggctggagtatgcctctcgttgtcgatcgtgtgaatagagcacattccggccttaccactgcgcggtccgcaaatttcaaacactttattaactatctgtgtaacatggatcgaaaacaatctgaggaatattggcgagagcggttgtctggagccactagcgagcagttcccttcgttaccatggcccggctaccaacaacaagccgactctctgctggagcagtacgtcaacactgggaaaccgactaacggaatgactgtggctacgataatcagaggcgcttgggctctgttggtatcgaagtatactgcatcgaacgacgtcgtcttcggcgaaacgctcactggacgcaatgcccctattccgggcgttgaagagatcgaagggccgatgatcgcaactattccattgcgtgtgtctgtcgatcctgatgctactgtgtcggagtatctccaagaaatccacgatcaatctattaccggaattcaacatgagcacttcggcctgcaacacatccgtcgtctttctcctaatgcacgtgaagcctgtgagttgcgaacgggtctggtcatgcatccgagtaccgccctagaagacgatgtccattcgaagctcccagccgacgggtttgttccagctggcgatgcggaagctgctcaagaagcactcaaattcaatacatacgcgctgatgctagtgtgttccctagacccccaaggatttctgatcatggcaagtttcgactccaagactgtatcaagcccacagatgcagaaaatgttggcgcagttggctcgtgttacgcaacaattcatccaaaatccggatatgaaatgccgccagatggaagtgacatcagacgaagaaatcgtcgagcttgttcaactgagtcgaatcggaaaccagagtctggccgaaacatcctgtgttccctctgaggccactatttcagagacctggattgttgatcctattgccactgaatgtctgcttccaatcggggccattggtgaattgttgataagaactacgcacgatctctccttagagcacgctcaggaaccaatgaagacagacgagacccaagacggccggatctatcggaccaagaagcttgcacgatataatgaaaacgggcagatcgtacttgtcgacgagggccgccgtcaagcacatggagcagctcccaaacagaagcgggtaaatgcgacatcagcaaaacagaaagtcctacgccaaatatggagcagaatcttgtcaattgaagaaaatatcattggactgaatgatagcttcttccaattgggtggggattctattgggtctatgaagcttgtgtcggagcttagagcaaatggcatagagctgacagtgcccgagatctttaaacaccgaacactatatgaaatggcaaaggtagccaaggagaacaacacatcgacgttggtggtcgaaaagaaagacgcaaaacctctgtccttaataaacaccgatgatacattcgcgttcatcgagggacaaattagacgactattgtatagagaggatcttctgatcagagacgtgttaccgacgagaccattgcaagaggttgcggtcaaaggcactttccagctgcctcggtattctgcccgatacgaactatttcatctgacaggcactgtggacgagactcgcctgttcaactgctgccaagagttggtgaaccggaatgagatcttgcggactgtctttgtacaacttgcagaggtgttctatggtgtcgtccttcagtctctccccgtaactattgatcagtacgaaatcgaaggggacataaactcattcgtccacaaattatgcgacgttgatgttcagacgaagatgactctcggtgctcccttcgtcaaattcttcttcgtgaaaggcgaagactcgaagagctgtctggcactgcgcatatctcatgctcagtacgacgaaatatgtctagtaggacttctgcggcaattggccgctctctacgatggagtgtcattgaaggaaccggctcccgttctcatcattcgtatatcacgtggttaa

SEQ ID NO: 6313 - protein, 1528 aa, Muscodor strobelii
  misc_feature: SGI Peptide ID NO. 561842
  misc_feature (86)..(491): Pfam Id: PF00501 Pfam Desc: AMP-binding enzyme
  misc_feature (709)..(983): Pfam Id: PF00668 Pfam Desc: Condensation domain
  misc_feature (1250)..(1315): Pfam Id: PF00550 Pfam Desc: Phosphopantetheine attachment site
  misc_feature (604)..(668): Pfam Id: PF00550 Pfam Desc: Phosphopantetheine attachment site
  misc_feature (709)..(891): Pfam Id: PF00668 Pfam Desc: Condensation domain
  misc_feature (924)..(983): Pfam Id: PF00668 Pfam Desc: Condensation domain
  misc_feature (604)..(665): Pfam Id: PF00550 Pfam Desc: Phosphopantetheine attachment site
  misc_feature (34)..(1519): NCBI GI: 258575297 Blast Desc: UREG_01346 [Uncinocarpus reesii 1704] gi|237902096|gb|EEP76497.1| UREG_01346 [Uncinocarpus reesii 1704]
  misc_feature (34)..(1510): NCBI GI: 240105443 Blast Desc: nonribosomal peptide synthase SidD, [Coccidioides posadasii C735 delta SOWgp]
  misc_feature (42)..(1519): NCBI GI: 239608377 Blast Desc: peptide synthetase [Ajellomyces dermatitidis ER-3]
  misc_feature (3)..(1511): NCBI GI: 225554455 Blast Desc: nonribosomal peptide synthetase [Ajellomyces capsulatus G186AR]
  misc_feature (34)..(1519): NCBI GI: 226283651 Blast Desc: D-alanine-poly(phosphoribitol) ligase subunit 1 [Paracoccidioides brasiliensis Pb01]
  misc_feature (3)..(1511): NCBI GI: 183604875 Blast Desc: non-ribosomal peptide synthase [Ajellomyces capsulatus]
  misc_feature (34)..(1519): NCBI GI: 225683226 Blast Desc: phenyloxazoline synthase mbtB [Paracoccidioides brasiliensis Pb03]
  misc_feature (34)..(1519): NCBI GI: 226288301 Blast Desc: D-alanine-poly(phosphoribitol) ligase subunit 1 [Paracoccidioides brasiliensis Pb18]
  misc_feature (34)..(1519): NCBI GI: 255939946 Blast Desc: Pc16g03850 [Penicillium chrysogenum Wisconsin 54-1255] gi|211585365|emb|CAP93055.1| Pc16g03850 [Penicillium chrysogenum Wisconsin 54-1255]
  misc_feature (38)..(1510): NCBI GI: 115401042 Blast Desc: [Aspergillus terreus NIH2624] gi|114190050|gb|EAU31750.1| [Aspergillus terreus NIH2624]
  misc_feature (34)..(1161): SWISSPROT Homolog: EC 5.1.1.13 Aspartate racemase
  misc_feature (34)..(1161): SWISSPROT Homolog: EC 5.1.1.11 Phenylalanine racemase (ATP-hydrolyzing)
  misc_feature: Useful for introducing or modulating the production of volatile compounds
MVASKELQDVAADYSNADDAASATYLSTPPTDIEADGLSSEQLEQIWSWNSPLPPNLDTCMHDLVKHQAEKEPERLAIQSWDGDFTYQDVDFKSDLFASRLVASGVKNGTIVPLCFEKSRWTAIAVLAVMKAGGTFALMDPSQPEGRLRTIVEQTGASVLVTSKLQEDVGTRIAPSETRITLTQKILDETFASSSLPSVPANTNLYIQFTSGSTGKPKGVVITHENYTSGAIPRGDAVGYKPHSRVLDFASYAFDVCIDCMLCTLSTGGCLCIPSDADRINDLSGAVRRMNINMAHMTPSVARVLDADIIPSLEVLGLGGEAISAGDALVWSQNTKVINAYGPSECTVGCAVNSDVGAESQKTQISIGRGVGAATWIVQPSDHDQLVPIGAIGELLIEGPIVGPGYLNEPDKTAAAFVSDPRWLIAGSPKHQGRTGRLYKTGDLVRYDDDGTILFVGRGDQQVKLRGQRIELAEIEHHMRDKLPPGTRVAAEVIKPGGKTSDPTLVAFIAERAGLVTDTESLVGTHSPKIQDALVDMNEFLSNDLPIYMIPAVYIPLQVMPLLVSAKTDRKRLRELGSSFNRKDISKFAVAIVPRKQPCTPIEVKLSEAWQKILGADLEISAHDNFFAVGGDSLRAMKLVAESRALGIALTVANIFANPTLSDMAIAARAYTEQDAIDIPAFSLLGNEWTESDARAQCASLCNIESDLIEDIYPCTPLQEGLMALSAKISEAYVAQRVVEFDTESEAQSLLKAFRDASVGCTILRTRIVQIPGHGLMQVVIKNDFDCESRTDQSLKTYLEDDMSKSVGLGTPLVRYGLVCNAKETGKSHFVLTMHHALYDGWSMPLVVDRVNRAHSGLTTARSANFKHFINYLCNMDRKQSEEYWRERLSGATSEQFPSLPWPGYQQQADSLLEQYVNTGKPTNGMTVATIIRGAWALLVSKYTASNDVVFGETLTGRNAPIPGVEEIEGPMIATIPLRVSVDPDATVSEYLQEIHDQSITGIQHEHFGLQHIRRLSPNAREACELRTGLVMHPSTALEDDVHSKLPADGFVPAGDAEAAQEALKFNTYALMLVCSLDPQGFLIMASFDSKTVSSPQMQKMLAQLARVTQQFIQNPDMKCRQMEVTSDEEIVELVQLSRIGNQSLAETSCVPSEATISETWIVDPIATECLLPIGAIGELLIRTTHDLSLEHAQEPMKTDETQDGRIYRTKKLARYNENGQIVLVDEGRRQAHGAAPKQKRVNATSAKQKVLRQIWSRILSIEENIIGLNDSFFQLGGDSIGSMKLVSELRANGIELTVPEIFKHRTLYEMAKVAKENNTSTLVVEKKDAKPLSLINTDDTFAFIEGQIRRLLYREDLLIRDVLPTRPLQEVAVKGTFQLPRYSARYELFHLTGTVDETRLFNCCQELVNRNEILRTVFVQLAEVFYGVVLQSLPVTIDQYEIEGDINSFVHKLCDVDVQTKMTLGAPFVKFFFVKGEDSKSCLALRISHAQYDEICLVGLLRQLAALYDGVSLKEPAPVLIIRISRG

SEQ ID NO: 6314 - DNA, 2314 bp, Muscodor strobelii
  misc_feature: SGI EST ID NO. CUFF.15786.0
  misc_feature: Variant of the nucleotide sequence at SEQ ID NO 6312
aagaaacctcccacacgatcgtacgaccccacctagcatacattaggttccctctggaccctccatccttcttgctttgctccttgcatatgttaagttcacatgacgtttggccagagtccatctcgtcagaaaaaatttcgcatcactgatgtaattcgagtctgcataatagtagacactgcgatgcgtcatttaaacagtgaagagtcttcagctgcgttctgaatgttctctgccaagtgtagcggaattggtattccgtcgaagacaggattggaacccgattttcttgatgcaaatttgagctatagcatatcttctggtgacaaattatctggcaatcgcatgagagccagctaatttctgagggtatcacaacattgaaaagactaccattagcacagtgggaaatggtgggttaatcgtcataaccaccaccgtggtggttgccactactgaatatggtcgccaagggccgatcaatgcaactggaaatccccagtcttgcctctaacagttatcagatccgtcccaaaagttatcagatccgactagagcggagcctgaccagccggcttcggttcaacgtctcactcgcctaccctgacctgcccgacttgatccgctaatgcaaggaatcatagctgcttcaagaaggctaccaacgataccttcacaagctaagctagatagatcattcccttggatagctctgttgttggtacaatttcgatcggaattggcccataatgcctttcctatatcatgtcatccttgcgcccttttcgtgcgaatgtatttgcagctcgttcagcttattggaattgtgccctgtccatcatcatcaagtcgatcattacctttggttcttctacccaatgtttgcgcatgataccattgcagcaataccattttgacctgcacagaagacggtattggtcgtaagaagatgcgtgcctgcggtgttggaagagaacgacgtgaatagcatcgcgaacctgttcgttattagtgttgtctcgaatatacctttggtgtgatagtcaaaacataatatagactttgcccccgtcagagatcgagcagtatcataggctatccgatggaaatggtggcttcaaaagaacttcaagatgtcgctgccgactactctaatgcagacgatgctgcctctgcaacttacctttctactccaccgaccgatatcgaagccgacggtctttcttccgagcagttggaacagatatggagctggaactcgcctctaccaccaaatctcgatacttgtatgcacgacctggtcaagcaccaagccgaaaaggaaccagaacgtttggcaatacaatcctgggatggcgacttcacttatcaagacgtagacttcaaatctgatttgtttgcctctaggcttgtcgcatcaggggttaaaaatggaacaattgtaccattatgcttcgagaagtcaagatggactgctatcgctgtccttgctgtaatgaaagccggaggcacatttgcgcttatggatccaagccagcccgaggggagattgcggaccatagtggaacaaaccggtgcttctgtccttgtcacttctaagcttcaagaagatgtcggtactaggattgctcctagtgagactcgaattaccttgacgcaaaaaattttagacgagacattcgcgagctcaagcctaccatcagtgccagctaacacgaatctttatatccagttcacgtctggtagcacaggtaaacctaaaggcgttgtcattacccacgaaaactatacaagtggcgcgataccgcgtggtgatgctgttggctacaaaccacattcacgcgtcttagacttcgcgtcgtacgccttcgacgtgtgtatcgattgcatgctatgcaccctgtcaacaggtggatgcctttgcatcccgtccgacgctgatcgaatcaacgacttgagcggcgcagttcgaagaatgaacatcaatatggctcacatgactccctctgttgctcgggtgctcgatgcggatattataccttcgctcgaagttctaggcttgggaggggaggctatatctgctggcgacgccttggtttggagtcagaataccaaggtcattaatgcatatgggccatcagagtgcacagtcggatgtgccgttaatagcgacgttggggcagaatcccaaaagacacaaattagcattggtagaggcgtcggggctgcaacatggatcgtccagccttcagaccacgatcagcttgtaccgatcggggcaattggtgaactcttgatcgaaggacctata

SEQ ID NO: 6315 - DNA, 615 bp, Muscodor strobelii
  misc_feature: SGI cDNA ID NO. 561843
  misc_feature: Reduced expression when VOC is produced
  misc_feature: Encodes the peptide sequence at SEQ ID NO 6316
atgattgcagacataacacgcaccgtgagcattgcggcccgctcgaaagatatcacaatcgcaactctgcctaccgcagcctgggccttgtgccttgcgcgacgtctcggcttgcgggatgtcctatttggcgaagtcgtaagtggccgcaatatcgatctacctaatgcggattccgtcatggggccaacgtggcagtacatcccagtcagagtgaagtttgaagacaactggactgctgccgacctcctcgaatacatccaataccagcacattgccagcgctcaacacgaatgcatgggtctgacagagattgttaaagattgtacggactggccggaaagcgttaattggttcgattcggttgttcatcaggacgtttaccatgttgaagaattgaaatttggatcaactgaatgccgacttgaaactgtgtatcctcattgggagccattgagagaatggaaatgtcaagcttttgtcaaagatgataccttgagcttggagatagttactttcgaggattggttaccagttgcttcggagctcctggatgacttggagacgatcatgaagacctttgtagagaagccgaacgaaattcttttccgatga

SEQ ID NO: 6316 - protein, 204 aa, Muscodor strobelii
  misc_feature: SGI Peptide ID NO. 561843
  misc_feature (3)..(203): NCBI GI: 240105443 Blast Desc: nonribosomal peptide synthase SidD, [Coccidioides posadasii C735 delta SOWgp]
  misc_feature (3)..(203): NCBI GI: 119194109 Blast Desc: CIMG_01429 [Coccidioides immitis RS]
  misc_feature (3)..(203): NCBI GI: 258575297 Blast Desc: UREG_01346 [Uncinocarpus reesii 1704] gi|237902096|gb|EEP76497.1| UREG_01346 [Uncinocarpus reesii 1704]
  misc_feature (5)..(203): NCBI GI: 226283651 Blast Desc: D-alanine-poly(phosphoribitol) ligase subunit 1 [Paracoccidioides brasiliensis Pb01]
  misc_feature (5)..(203): NCBI GI: 261203177 Blast Desc: nonribosomal peptide synthetase [Ajellomyces dermatitidis SLH14081] gi|239586587|gb|EEQ69230.1| nonribosomal peptide synthetase [Ajellomyces dermatitidis SLH14081]
  misc_feature (5)..(203): NCBI GI: 239608377 Blast Desc: peptide synthetase [Ajellomyces dermatitidis ER-3]
  misc_feature (5)..(204): NCBI GI: 225554455 Blast Desc: nonribosomal peptide synthetase [Ajellomyces capsulatus G186AR]
  misc_feature (5)..(203): NCBI GI: 225683226 Blast Desc: phenyloxazoline synthase mbtB [Paracoccidioides brasiliensis Pb03]
  misc_feature (5)..(203): NCBI GI: 226288301 Blast Desc: D-alanine-poly(phosphoribitol) ligase subunit 1 [Paracoccidioides brasiliensis Pb18]
  misc_feature (5)..(204): NCBI GI: 183604875 Blast Desc: non-ribosomal peptide synthase [Ajellomyces capsulatus]
  misc_feature (4)..(175): SWISSPROT Homolog: EC 5.1.1.3 Glutamate racemase
  misc_feature: Useful for introducing or modulating the production of volatile compounds
MIADITRTVSIAARSKDITIATLPTAAWALCLARRLGLRDVLFGEVVSGRNIDLPNADSVMGPTWQYIPVRVKFEDNWTAADLLEYIQYQHIASAQHECMGLTEIVKDCTDWPESVNWFDSVVHQDVYHVEELKFGSTECRLETVYPHWEPLREWKCQAFVKDDTLSLEIVTFEDWLPVASELLDDLETIMKTFVEKPNEILFR

SEQ ID NO: 6317 - DNA, 963 bp, Muscodor strobelii
  misc_feature: SGI cDNA ID NO. 561844
  misc_feature: Encodes the peptide sequence at SEQ ID NO 6318
atgatttgggcaaaagcagctgtcgcatcgctccttgcgactcaagtctatggagccccaggcggcggcgcggtgaaattgttgagtgtgggtagagaaacattggaaagcagaatggaaggaatggcttatggtgctttggaaagacgtcaaacatcacaaacatcgaataacactctggatccagtgcagtgggataccgataccatggccgcttgcatgcaatcattgtcgacactctcggcagccagcaatccgtctggcatggcggtttgctacaatatagtacagctcaacactaaagacggtacatttgtagcagatttacgaatgttccaggtatcaacgccctcgggagcatggcagggaatcacgccacaagccatgcaaggcagtgttattttcaatggtgcaactgcatcctcgataaatggccaaaatttgacgcaaaataaggctactcgcgatgtcgaaatcgaaagaatcaataagcgccagtctattactcccaccctccttcgaaattacactgttgtcggccaaatcaacaaggacaagatgaccgcacccatgacattagtagtaattgagcctttgctgatgccggtcgtcactcttacggccaataataccgccggccaaacactctctaccaatatttcatcaaatgaagctgtatttgtaaacggcatcttttcgaaagaagtcgtattatcctccgtcagccaagcccagctctttgtcgatgagtctcttgcagcattaaagaacggcacggtcgcttttgtcctaccaggggtcaatatccttattttccctatcggcggagtcattactggcttctgggcgttcgttggcatcactatgtatgcttattgcacatgggaacgatacagctaccgcgagtcctatcgccgcagaaaagctatgactagcaacaagtcctacatgtcaaggatataa

SEQ ID NO: 6318 - protein, 320 aa, Muscodor strobelii
  misc_feature: SGI Peptide ID NO. 561844
  misc_feature (1)..(320): NCBI GI: 116196988 Blast Desc: CHGG_05092 [Chaetomium globosum CBS 148.51] gi|88181005|gb|EAQ88473.1| CHGG_05092 [Chaetomium globosum CBS 148.51]
  misc_feature (33)..(313): NCBI GI: 261359989 Blast Desc: conserved [Verticillium albo-atrum VaMs.102]
  misc_feature (1)..(320): NCBI GI: 171676784 Blast Desc: protein product [Podospora anserina] gi|170936459|emb|CAP61116.1| protein product [Podospora anserina]
  misc_feature (34)..(311): NCBI GI: 256725978 Blast Desc: NECHADRAFT_42903 [Nectria haematococca mpVI 77-13-4]
  misc_feature (57)..(311): NCBI GI: 46116784 Blast Desc: FG04234.1 [Gibberella zeae PH-1]
  misc_feature (55)..(320): NCBI GI: 85091902 Blast Desc: NCU04872 [Neurospora crassa OR74A] gi|28920529|gb|EAA29893.1| conserved [Neurospora crassa OR74A]
  misc_feature (65)..(320): NCBI GI: 145606599 Blast Desc: MGG_09337 [Magnaporthe grisea 70-15] gi|145014285|gb|EDJ98853.1| MGG_09337 [Magnaporthe grisea 70-15]
  misc_feature (64)..(320): NCBI GI: 156049057 Blast Desc: SS1G_08235 [Sclerotinia sclerotiorum 1980] gi|154692634|gb|EDN92372.1| SS1G_08235 [Sclerotinia sclerotiorum 1980]
  misc_feature (1)..(320): NCBI GI: 154317108 Blast Desc: BC1G_03456 [Botryotinia fuckeliana B05.10] gi|150844873|gb|EDN20066.1| BC1G_03456 [Botryotinia fuckeliana B05.10]
  misc_feature (1)..(307): NCBI GI: 189198179 Blast Desc: conserved [Pyrenophora tritici-repentis Pt-1C-BFP] gi|187981375|gb|EDU48001.1| conserved [Pyrenophora tritici-repentis Pt-1C-BFP]
MIWAKAAVASLLATQVYGAPGGGAVKLLSVGRETLESRMEGMAYGALERRQTSQTSNNTLDPVQWDTDTMAACMQSLSTLSAASNPSGMAVCYNIVQLNTKDGTFVADLRMFQVSTPSGAWQGITPQAMQGSVIFNGATASSINGQNLTQNKATRDVEIERINKRQSITPTLLRNYTVVGQINKDKMTAPMTLVVIEPLLMPVVTLTANNTAGQTLSTNISSNEAVFVNGIFSKEVVLSSVSQAQLFVDESLAALKNGTVAFVLPGVNILIFPIGGVITGFWAFVGITMYAYCTWERYSYRESYRRRKAMTSNKSYMSRI

SEQ ID NO: 6319 - DNA, 6505 bp, Muscodor strobelii
  misc_feature: SGI EST ID NO. CUFF.15796.0
  misc_feature: Variant of the nucleotide sequence at SEQ ID NO 6317
gggcgatatgtgcaaggtcctgttcgcctgtaaaatttcctccgcgggcattgtcgcaaagcgatgcagtttctgtgtacctactgtactgtagaaatgctgcaaaaaattgcttggtgagagacatgtctgacgttgaggcctggtcgatgactctgtcacaagagaccccaagaacccctagccaagctttctagttctgcatcgaagcaattggtgattggctgaaactcccttttgccggcagtgtgctgggcatgcgctgctctcatacgctgtccgggcccctcgaaaccaatttcatctcaggttgtctccacttctccgacctcccatgttacatcatccgtcgatctcacagcattaagacttcgctacccattcagaccccagccagaaacgggtgattatgtacaattccaggcaccgccgctaacttacaggcttgaggctcaagcatgcgtggcgctctcggctacgacccttgtactgtctacggcttggcatgtctcgcttgacgcgatctatagcttggatacgcggcactatcaccatcgtgagtgtcacagctatcgtgatcggttttgatactgctcttgaagcggaaacgctcccattttagcccctactagaaacatgcggccaatgacttgacgtacgatcatgccaggttgctctgaccctcgctacaattcgacatgacgtggactgatgcaacagatggtgatgacggttcccctggcagtacccattaagtgaggggctaattttcaagtgactgcacatatactactgaccttggagctttgtttctttcgtctagttctgttgtattcttgtttctttctttccgcatcatctccgtaatgatcttctcttctcgtgactagactcacattcgttgcttgaagcagccaagctttttcttcaattctctattttctgccggcagacgtgtttttttattcgcttgacgatttattgctagctattgctgcatatttacatatttactttcattctcggagagcagaatcaagcctagcgctcttaatctttcagttcgacattaccagttcgcagtaaaaagaacagtgcggcagacaacgaataaacgaagaaatcagtactcaagatgatttgggcaaaagcagctgtcgcatcgctccttgcgactcaagtctatggagccccaggcggcggcgcggtgaaattgttgagtgtgggtagagaaacattggaaagcagaatggaaggaatggcttatggtgctttggaaagacgtcaaacatcacaaacatcgaataacactctggatccagtgcagtgggataccgataccatggccgcttgcatgcaatcattgtcgacactctcggcagccagcaatccgtctggcatggcggtttgctacaatatagtacagctcaacactaaagacggtacatttgtagcagatttacgaatgttccaggtatcaacgccctcgggagcatggcagggaatcacgccacaagccatgcaaggcagtgttattttcaatggtgcaactgcatcctcgataaatggccaaaatttgacgcaaaataaggctactcgcgatgtcgaaatcgaaagaatcaataagcgccagtctattactcccaccctccttcgaaattacactgttgtcggccaaatcaacaaggacaagatgaccgcacccatgacattagtagtaattgagcctttgctgatgccggtcgtcactcttacggccaataataccgccggccaaacactctctaccaatatttcatcaaatgaagctgtatttgtaaacggcatcttttcgaaagaagtcgtattatcctccgtcagccaagcccagctctttgtcgatgagtctcttgcagcattaaagaacggcacggtcgcttttgtcctaccaggggtcaatatccttattttccctatcggcggagtcattactggcttctgggcgttcgttggcatcactatgtatgcttattgcacatgggaacgatacagctaccgcgagtcctatcgccgcagaaaagctatgactagcaacaagtcctacatgtcaaggatataaagcttccattcctttctaaatttgattaccagcgatagcgattttgccttacatttggcgttgtgtccaaaaacgaatcgatttgggcattttcttgtagatagtatcgaaatcgttcagatttcgttttttgtgcaatgagatcccacgatctcagctgcctaataccctttaaaattcacaaatatagaccataaaaatggtagaaactgaaccaattcagacttacgattgttgcattttaaatatgtacatcaaaatatgtacgataaactagataaacataacaaaaacaaggcaaaaataagtacaagtataagaaacctttgcgagcaaacattgtctcttgactagcggtcttgaaatgcgtatcatcggaaaagaatttcgttcggcttctctacaaaggtcttcatgatcgtctccaagtcatccaggagctccgaagcaactggtaaccaatcctcgaaagtaactatctccaagctcaaggtatcatctttgacaaaagcttgacatttccattctctcaatggctcccaatgaggatacacagtttcaagtcggcattcagttgatccaaatttcaattcttcaacatggtaaacgtcctgatgaacaaccgaatcgaaccaattaacgctttccggccagtccgtacaatctttaacaatctctgtcagacccatgcattcgtgttgagcgctggcaatgtgctggtattggatgtattcgaggaggtcggcagcagtccagttgtcttcaaacttcactctgactgggatgtactgccacgttggccccatgacggaatccgcattaggtagatcgatattgcggccacttacgacttcgccaaataggacatcccgcaagccgagacgtcgcgcaaggcacaaggcccaggctgcggtaggcagagttgcgattgtgatatctttcgagcgggccgcaatgctcacggtgcgtgttatgtctgcaatcatcttcgatttgagaggtaaatctggacgcaggaccgtcattgaactgccgcgcagtagctcacgccagtatggcttgctttgtgggatactgttgttaaccacgtgatatacgaatgatgagaacgggagccggttccttcaatgacactccatcgtagagagcggccaattgccgcagaagtcctactagacatatttcgtcgtactgagcatgagatatgcgcagtgccagacagctcttcgagtcttcgcctttcacgaagaagaatttgacgaagggagcaccgagagtcatcttcgtctgaacatcaacgtcgcataatttgtggacgaatgagtttatgtccccttcgatttcgtactgatcaatagttacggggagagactgaaggacgacaccatagaacacctctgcaagttgtacaaagacagtccgcaagatctcattccggttcaccaactcttggcagcagttgaacaggcgagtctcgtccacagtgcctgtcagatgaaatagttcgtatcgggcagaataccgaggcagctggaaagtgcctttgaccgcaacctcttgcaatggtctcgtcggtaacacgtctctgatcagaagatcctctctatacaatagtcgtctaatttgtccctcgatgaacgcgaatgtatcatcggtgtttattaaggacagaggttttgcgtctttcttttcgaccaccaacgtcgatgtgttgttctccttggctacctttgccatttcatatagtgttcggtgtttaaagatctcgggcactgtcagctctatgccatttgctctaagctccgacacaagcttcatagacccaatagaatccccacccaattggaagaagctatcattcagtccaatgatattttcttcaattgacaagattctgctccatatttggcgtaggactttctgttttgctgatgtcgcatttacccgcttctgtttgggagctgctccatgtgcttgacggcggccctcgtcgacaagtacgatctgcccgttttcattatatcgtgcaagcttcttggtccgatagatccggccgtcttgggtctcgtctgtcttcattggttcctgagcgtgctctaaggagagatcgtgcgtagttcttatcaacaattcaccaatggccccgattggaagcagacattcagtggcaataggatcaacaatccaggtctctgaaatagtggcctcagagggaacacaggatgtttcggccagactctggtttccgattcgactcagttgaacaagctcgacgatttcttcgtctgatgtcacttccatctggcggcatttcatatccggattttggatgaattgttgcgtaacacgagccaactgcgccaacattttctgcatctgtgggcttgatacagtcttggagtcgaaacttgccatgatcagaaatccttgggggtctagggaacacactagcatcagcgcgtatgtattgaatttgagtgcttcttgagcagcttccgcatcgccagctggaacaaacccgtcggctgggagcttcgaatggacatcgtcttctagggcggtactcggatgcatgaccagacccgttcgcaactcacaggcttcacgtgcattaggagaaagacgacggatgtgttgcaggccgaagtgctcatgttgaattccggtaatagattgatcgtggatttcttggagatactccgacacagtagcatcaggatcgacagacacacgcaatggaatagttgcgatcatcggcccttcgatctcttcaacgcccggaataggggcattgcgtccagtgagcgtttcgccgaagacgacgtcgttcgatgcagtatacttcgataccaacagagcccaagcgcctctgattatcgtagccacagtcattccgttagtcggtttcccagtgttgacgtactgctccagcagagagtcggcttgttgttggtagccgggccatggtaacgaagggaactgctcgctagtggctccagacaaccgctctcgccaatattcctcagattgttttcgatccatgttacacagatagttaataaagtgtttgaaatttgcggaccgcgcagtggtaaggccggaatgtgctctattcacacgatcgacaacgagaggcatactccagccatcgtaaagcgcatggtgcatagttagaacgaagtgtgatttccccgtctctttagcgttacatacaagaccatagcggactaaaggcgtcccaagaccaacagatttgctcatgtcatcttcgaggtacgtcttaaggctttggtctgttcttgattcacaatcaaagtcgttcttaatcacaacttgcatgagcccatggccgggtatctgcacaattctagtacgaaggatagtgcaacccactgaagcatcccggaacgctttcaagaggctctgagcttccgactcagtgtcaaactccacaacacgttgagcaacgtatgcttcactaatcttggccgatagtgccatgagaccttcttgaagcggtgtgcatgggtaaatgtcctctatgagatcggattcgatgttgcagagagatgcgcactgtgcacgagcatcactctcagtccactcatttccaagcaatgaaaatgccggtatatcgatagcatcttgttcggtgtaagccctcgccgcgattgccatatctgacaacgtaggattggcaaagatattggcgactgtgagggcaatacccagcgcacgagattcggccaccaatttcatcgcgcggagtgagtctcctccaacagcgaagaagttgtcgtgagcactgatttctagatcagcaccaaggattttctgccatgcctctgacaatttgacttctattggggtacagggctgtttcctcggtacaatggctactgcgaatttggaaatatctttcctgttgaatgaagagcctagttccctcagcctcttacgatctgttttggcggaaacgagtaatggcatgacctgaaggggtatatagacggccggaatcatgtagatagggagatcgttagaaaggaactcgttcatatcgacgagtgcatcctgtatcttaggagaatgtgtccctacgagactctctgtgtctgtgacgagaccagcacgctctgcaatgaatgcgacaagagttggatcgctcgttttgcctccaggcttgatcacttcagcggccacacgagttcctggtggaagtttgtctcgcatatggtgttcgatctcggctaattcgatacgctgtcctcgcagttttacctgctggtcgccgcggccaacgaacaggatcgttccatcatcatcgtatctgaccagatcgccagtcttataaagtcgtcctgtgcggccttggtgttttggacttccagcaatcagccatctcgg

SEQ ID NO: 6320 - DNA, 1500 bp, Muscodor strobelii
  misc_feature: SGI cDNA ID NO. 561845
  misc_feature: Elevated expression when VOC is produced
  misc_feature: Encodes the peptide sequence at SEQ ID NO 6321
atggaccgtcaaaggcatgaccctgccattttcccctctgaccttcaaggtcgaaggattttgctctgtactgaatcgttcggtcccgtcaacggtgtctcacgtacgacattgatgcttgtgaaccatctgcggtcaaacggtgcacatgtcgccgttgtggcccctcataatcacaccaagataaacacatttatacccataacaactggagaagacaaccagtctgcatactgctctgagattcggctaaagggataccctctcccattcaatccagaactttcaattgtatacccagtccgactgtctgaattgtacgaaagaacatttggaggaagaccagatctcatctatctagcaagtccggcatcattaggctttcaggtcttgttacagttgcggcagcaaaccgaggatcaacaaatccccgtgatatgcaactttcagaccgatctggcgggttattgcgagatactattcccatctcctctgggccaatttgcaagtttcgtgtttgccaaggtccagggttatttgtttcgtcactcttcagtcaaaacactattttatcccagctcattcgtccggaggtatctagagaatgttgctgaggtacagcaagacaagttaagtatattgcaaagaggggtcaatactgatggctttcatcccgggaagaggaatcgttcgctgcgtaaagcctgggcaccaaacggggagcttgttcttttcacttgctctagactagcagaggaaaaaggatacgagttccttgctcaagtagcttcggagctagccaaaacagacttcaacttcaaattggtcatcgttggaggtaatcgaaacattattgtcgagcaggggattaaggcgagattcaaacagcttacagagaacggaaaagttatctttacgggcatgataattggcgaggctttgatggagcactacgcttcggcagacatttttctgcattgttcaatcaccgagacatttgggctcgtggttctcgaagctatggctagcggtgtatctgttatcgcacgagacgaaggcggacctagtgatatcatcagtcatggaaggaatggatacctcatagcgccaaacgatgttgctggttttgtgcaaaacaccatcaccttaggccgcgacgttgtgttgagacgagaattcagcgaggcaagtcgtgctcatgcactcgaagcgacctgggagaagatcggaaataaggtagcttggaagatgacggataccattcgcgaagaccagttcaggagagaacaaattgcacccgatacgacccgggcacccatacaaatctttgcctgggtctttctaagcagtgcactgagacaggccatagcctcacgaatggtcagtgtgaagttgacactaggattagcaacgattgttggcttctggggtggcgttggactatatttggcattcactgaaacgacacattggatcaaaacacgtttctcaaaaagatag

SEQ ID NO: 6321 - protein, 499 aa, Muscodor strobelii
  misc_feature: SGI Peptide ID NO. 561845
  misc_feature (229)..(400): Pfam Id: PF00534 Pfam Desc: Glycosyl transferases group 1
  misc_feature (6)..(496): NCBI GI: 256725581 Blast Desc: glycosyltransferase family 4 [Nectria haematococca mpVI 77-13-4]
  misc_feature (6)..(496): NCBI GI: 46116782 Blast Desc: FG04233.1 [Gibberella zeae PH-1]
  misc_feature (9)..(493): NCBI GI: 116197278 Blast Desc: CHGG_05237 [Chaetomium globosum CBS 148.51] gi|88181150|gb|EAQ88618.1| CHGG_05237 [Chaetomium globosum CBS 148.51]
  misc_feature (6)..(499): NCBI GI: 261359995 Blast Desc: glycosyl transferase [Verticillium albo-atrum VaMs.102]
  misc_feature (11)..(431): NCBI GI: 242793525 Blast Desc: glycosyl transferase, [Talaromyces stipitatus ATCC 10500] gi|218718769|gb|EED18189.1| glycosyl transferase, [Talaromyces stipitatus ATCC 10500]
  misc_feature (11)..(446): NCBI GI: 212535600 Blast Desc: glycosyl transferase, [Penicillium marneffei ATCC 18224] gi|210070355|gb|EEA24445.1| glycosyl transferase, [Penicillium marneffei ATCC 18224]
  misc_feature (8)..(423): NCBI GI: 169766994 Blast Desc: [Aspergillus oryzae RIB40] gi|83765823|dbj|BAE55966.1| protein product [Aspergillus oryzae]
  misc_feature (11)..(421): NCBI GI: 115397355 Blast Desc: D-lactate dehydrogenase [Aspergillus terreus NIH2624] gi|114192460|gb|EAU34160.1| D-lactate dehydrogenase [Aspergillus terreus NIH2624]
  misc_feature (8)..(423): NCBI GI: 238483805 Blast Desc: glycosyl transferase, [Aspergillus flavus NRRL3357] gi|220701191|gb|EED57529.1| glycosyl transferase, [Aspergillus flavus NRRL3357]
  misc_feature (1)..(431): NCBI GI: 119494317 Blast Desc: glycosyl transferase, group 1 family protein [Neosartorya fischeri NRRL 181] gi|119412216|gb|EAW22157.1| glycosyl transferase, group 1 family protein [Neosartorya NRRL
  misc_feature (82)..(419): SWISSPROT Homolog: EC 2.4.1.56 Lipopolysaccharide N-acetylglucosaminyltransferase
  misc_feature: Useful for introducing or modulating the production of volatile compounds
MDRQRHDPAIFPSDLQGRRILLCTESFGPVNGVSRTTLMLVNHLRSNGAHVAVVAPHNHTKINTFIPITTGEDNQSAYCSEIRLKGYPLPFNPELSIVYPVRLSELYERTFGGRPDLIYLASPASLGFQVLLQLRQQTEDQQIPVICNFQTDLAGYCEILFPSPLGQFASFVFAKVQGYLFRHSSVKTLFYPSSFVRRYLENVAEVQQDKLSILQRGVNTDGFHPGKRNRSLRKAWAPNGELVLFTCSRLAEEKGYEFLAQVASELAKTDFNFKLVIVGGNRNIIVEQGIKARFKQLTENGKVIFTGMIIGEALMEHYASADIFLHCSITETFGLVVLEAMASGVSVIARDEGGPSDIISHGRNGYLIAPNDVAGFVQNTITLGRDVVLRREFSEASRAHALEATWEKIGNKVAWKMTDTIREDQFRREQIAPDTTRAPIQIFAWVFLSSALRQAIASRMVSVKLTLGLATIVGFWGGVGLYLAFTETTHWIKTRFSKR

SEQ ID NO: 6322 - DNA, 2778 bp, Muscodor strobelii
  misc_feature: SGI EST ID NO. CUFF.15792.0
  misc_feature: Variant of the nucleotide sequence at SEQ ID NO 6320
tcaagatgccctgtagttatgtcggagctaattttcgttgcattaggtagagcgcacgcctctactgatcattgagcttgacttttacttcttttgcgtacagggtaccaagcataagcaattgcatgttttgggaacagagtcactgtctttagtgacctggactggtaagtgttcaggttgcaggtcgtcactggatcgccccaatgtgcgcagaacatgcaatttgattggctgcggctgttgctacctttagacgtgtcgatttgggcttcagggagacctgtacatgcttagctctgcacccactctacattccgtcaccgggcttattagtgataagaggcatggcatggcctaatggagagcattttgtccagatgaccgtcgaagaatgcatcctcaataccgtcgtgatactgtggcatgtcgcacgtgttcatggcagtcggattcaaccagtatctggggtgtggatcactccagagatgttatcctgcactggtctcacacctgtctccttgccatcgaatttcctataaccacaagacttgactgagaacgtcttagaactctaaactgtggatgatctgccattacctaccgaacaattgtgtatctaagataggaagcagaactatttcgaatggatttccatggtcggtaccatatcgacgcttactcactttcagctactcgatcgtttcttaaacgaagaactacacagctgagagctcatgctcctcgggcttcacacaatggaccgtcaaaggcatgaccctgccattttcccctctgaccttcaaggtcgaaggattttgctctgtactgaatcgttcggtcccgtcaacggtgtctcacgtacgacattgatgcttgtgaaccatctgcggtcaaacggtgcacatgtcgccgttgtggcccctcataatcacaccaagataaacacatttatacccataacaactggagaagacaaccagtctgcatactgctctgagattcggctaaagggataccctctcccattcaatccagaactttcaattgtatacccagtccgactgtctgaattgtacgaaagaacatttggaggaagaccagatctcatctatctagcaagtccggcatcattaggctttcaggtcttgttacagttgcggcagcaaaccgaggatcaacaaatccccgtgatatgcaactttcagaccgatctggcgggttattgcgagatactattcccatctcctctgggccaatttgcaagtttcgtgtttgccaaggtccagggttatttgtttcgtcactcttcagtcaaaacactattttatcccagctcattcgtccggaggtatctagagaatgttgctgaggtacagcaagacaagttaagtatattgcaaagaggggtcaatactgatggctttcatcccgggaagaggaatcgttcgctgcgtaaagcctgggcaccaaacggggagcttgttcttttcacttgctctagactagcagaggaaaaaggatacgagttccttgctcaagtagcttcggagctagccaaaacagacttcaacttcaaattggtcatcgttggaggtaatcgaaacattattgtcgagcaggggattaaggcgagattcaaacagcttacagagaacggaaaagttatctttacgggcatgataattggcgaggctttgatggagcactacgcttcggcagacatttttctgcattgttcaatcaccgagacatttgggctcgtggttctcgaagctatggctagcggtgtatctgttatcgcacgagacgaaggcggacctagtgatatcatcagtcatggaaggaatggatacctcatagcgccaaacgatgttgctggttttgtgcaaaacaccatcaccttaggccgcgacgttgtgttgagacgagaattcagcgaggcaagtcgtgctcatgcactcgaagcgacctgggagaagatcggaaataaggtagcttggaagatgacggataccattcgcgaagaccagttcaggagagaacaaattgcacccgatacgacccgggcacccatacaaatctttgcctgggtctttctaagcagtgcactgagacaggccatagcctcacgaatggtcagtgtgaagttgacactaggattagcaacgattgttggcttctggggtggcgttggactatatttggcattcactgaaacgacacattggatcaaaacacgtttctcaaaaagatagaaatcataatcgaatgttcaagaattggacaggtcataaggcagaagcattcatgatatgagcgaagccccatgaagcaaggtgcgaagtatccagtagagaacattacagtaggttgaatgatcaacgccaagcattcagtctcgtgtttgatgtccagacctcgaacgagaccagggacatcccaagaagaggaacgataatttcgtgctgtgaagtagcctgaatctgatgttatggttgcatgtacttcattcaccgcttggtgcaatatcagcattgtctgacatttcgcccctgatctcgtcaactttggtatggccctggcagccgctacgcccgaccagggccatacccatgagtttgacggcataatgctgaagaagacttgcctcctgcatccggtaaactacatgcaagcaaagggaatgctaacaaaaatcagaattccaatctttgccagaggcacaccgttgatgtgtccgaattcttcgattcagcttcgcataccgacagcgat

SEQ ID NO: 6323 - DNA, 2052 bp, Muscodor strobelii
  misc_feature: SGI cDNA ID NO. 561846
  misc_feature: Elevated expression when VOC is produced
  misc_feature: Encodes the peptide sequence at SEQ ID NO 6324
atgggatttggcccagtgccgcccggcgattctgagaagggtttgttccaagatcgagcttcgacagctcctacaacacctgagggcagcttaacatttagtcctgtacttcgtgctagtatcgaacgacatcttgatacattggatcttgatgctaatagcctacacacaccacacggaggcgctcatcacggtgtcacttcatcgccctcgtcatcagagacttgtcgccttgtgcgaaacatttgctgcgtcggtgcaggttatgttgggggcccgacagcagcggtaatcgcttttgagaacccagatattcgcgtcactatcgtagacaaagacgagagaaaaatccgaagatggaactcgaaacacttgcctatatatgaactcggtctcagagatattgtgcgaatcgctcgtgacggttcgcgggaattctctttctcgggcgaggctagcaggcaagattctgatttatcagatgcgtccacttcatcatcagaatgtggctcagaatgttctctacataatctaggtgtggtcaccgtaccagctagacgacctaatctcttcttctctacagacgtttcgaaatgcattagcgaggcagatgttgtgttaattgcggtaaacacccccaccaagtcaaaaggtgcaggtgcaggaagggctacagacatgacgactttcgaagccgtcacaggcgaggttgcgcaacatgctcgaccggggaccatcattgttgaaaaatcgactgtgccttgtcgtacggcgcaactcgttgaagaaacgatggcaattcatcgtcctggtgtacatttcgagattctttcgaatccagaatttttagcagcgggtacggcaatgaaagacctgatgcggcccgatcgtgtgctcatcggatcttcgccaactccttctggtcggcgcgctgctcgagctctcgcagacgtgtacgccgcctgggttcctcgtgatcgtatcatcactacaaatgtgtggtcatcggagctttccaagttagtggcaaactcaatgctagcccagcgcattagtagtatcaactcgatagctgcgatctgtgagaagactggcgctcagatagatgaagtggcttcctcgatcggctgcgatccaaggatcggagacaaattcctcaaagcgggaatcggctttggaggtagctgctttaagaaagacattctgagtctcgtctacctggcggaatctctcgggttagatgaagtgggcgagtactggcgccaagtcataaaaatgaacgagtaccaacgcaaccgatttgctcgacgagtaatcaagtgcctaaacaacactctagtaggcaagaagattaccctacttggctatgcattcaaggccaatacttcggacaccagagagtcacctgcattggaaattgtcaagacattactggaggaaaatcctcgagagatagccatctttgatccgtgttgcaaccctacggtggtcaagaatgagatcagaacgctcttacaggagccagatgtactggaagaggacggaggccccattgcggtctacgcgagcgcttatgaagcctgcgctgccagcaacgcaatcctcatcaccaccgaatgtgacgagttcaggaatacaaggccagaagctctgtcgagcgccagccaggctctgaaatcactcacagagcgtgacccacggccattcgctggacttgagccgacagaaagcgagatcctcgctttgcacaaatttctactacaatcatctcccatggcggcttacaagagcggcgatcctctccaacgttatacggatgagcctttgtgtgcggacgattgccctgactgttatctggatgaaaaacatggatattctacggatggtaatgcaagcgagtacagatcgaaacactatgtggactggaataagatttcgtaccacatgaagcagcccaaatggttgttcgatgggaagggaatcatcgacccgaatgaaatgggcaagctgggcattagagttgaaagtgttggtcggcaagggcgagtttga

SEQ ID NO: 6324 - protein, 683 aa, Muscodor strobelii
  misc_feature: SGI Peptide ID NO. 561846
  misc_feature (333)..(430): Pfam Id: PF00984 Pfam Desc: UDP-glucose/GDP-mannose dehydrogenase family, central domain
  misc_feature (452)..(564): Pfam Id: PF03720 Pfam Desc: UDP-glucose/GDP-mannose dehydrogenase family, UDP binding domain
  misc_feature (80)..(324): Pfam Id: PF03721 Pfam Desc: UDP-glucose/GDP-mannose dehydrogenase family, NAD binding domain
  misc_feature (452)..(545): Pfam Id: PF03720 Pfam Desc: UDP-glucose/GDP-mannose dehydrogenase family, UDP binding domain
  misc_feature (189)..(324): Pfam Id: PF03721 Pfam Desc: UDP-glucose/GDP-mannose dehydrogenase family, NAD binding domain
  misc_feature (80)..(159): Pfam Id: PF03721 Pfam Desc: UDP-glucose/GDP-mannose dehydrogenase family, NAD binding domain
  misc_feature (21)..(683): NCBI GI: 85092417 Blast Desc: UDP-glucose 6-dehydrogenase [Neurospora crassa OR74A] gi|28920789|gb|EAA30148.1| UDP-glucose 6-dehydrogenase [Neurospora crassa OR74A]
  misc_feature (78)..(682): NCBI GI: 256725977 Blast Desc: [Nectria haematococca mpVI 77-13-4]
  misc_feature (68)..(680): NCBI GI: 46116780 Blast Desc: FG04232.1 [Gibberella zeae PH-1]
  misc_feature (21)..(679): NCBI GI: 116197276 Blast Desc: CHGG_05236 [Chaetomium globosum CBS 148.51] gi|88181149|gb|EAQ88617.1| CHGG_05236 [Chaetomium globosum CBS 148.51]
  misc_feature (21)..(680): NCBI GI: 212535598 Blast Desc: UDP-glucose dehydrogenase [Penicillium marneffei ATCC 18224] gi|210070354|gb|EEA24444.1| UDP-glucose dehydrogenase [Penicillium marneffei ATCC 18224]
  misc_feature (21)..(682): NCBI GI: 242793520 Blast Desc: UDP-glucose dehydrogenase [Talaromyces stipitatus ATCC 10500] gi|218718768|gb|EED18188.1| UDP-glucose dehydrogenase [Talaromyces stipitatus ATCC 10500]
  misc_feature (7)..(680): NCBI GI: 70996630 Blast Desc: UDP-glucose dehydrogenase [Aspergillus fumigatus Af293] gi|66850705|gb|EAL91032.1| UDP-glucose dehydrogenase [Aspergillus fumigatus Af293] gi|159131806|gb|EDP56919.1| A1163]
  misc_feature (7)..(680): NCBI GI: 119494319 Blast Desc: udp-glucose 6-dehydrogenase [Neosartorya fischeri NRRL 181] gi|119412217|gb|EAW22158.1| udp-glucose 6-dehydrogenase [Neosartorya fischeri NRRL 181]
  misc_feature (7)..(680): NCBI GI: 169766996 Blast Desc: [Aspergillus oryzae RIB40] gi|83765824|dbj|BAE55967.1| protein product [Aspergillus oryzae]
  misc_feature (79)..(679): NCBI GI: 261354683 Blast Desc: UDP-glucose 6-dehydrogenase [Verticillium albo-atrum VaMs.102]
  misc_feature (79)..(514): SWISSPROT Homolog: EC 1.1.1.22 UDP-glucose 6-dehydrogenase
  misc_feature: Useful for introducing or modulating the production of volatile compounds
MGFGPVPPGDSEKGLFQDRASTAPTTPEGSLTFSPVLRASIERHLDTLDLDANSLHTPHGGAHHGVTSSPSSSETCRLVRNICCVGAGYVGGPTAAVIAFENPDIRVTIVDKDERKIRRWNSKHLPIYELGLRDIVRIARDGSREFSFSGEASRQDSDLSDASTSSSECGSECSLHNLGVVTVPARRPNLFFSTDVSKCISEADVVLIAVNTPTKSKGAGAGRATDMTTFEAVTGEVAQHARPGTIIVEKSTVPCRTAQLVEETMAIHRPGVHFEILSNPEFLAAGTAMKDLMRPDRVLIGSSPTPSGRRAARALADVYAAWVPRDRIITTNVWSSELSKLVANSMLAQRISSINSIAAICEKTGAQIDEVASSIGCDPRIGDKFLKAGIGFGGSCFKKDILSLVYLAESLGLDEVGEYWRQVIKMNEYQRNRFARRVIKCLNNTLVGKKITLLGYAFKANTSDTRESPALEIVKTLLEENPREIAIFDPCCNPTVVKNEIRTLLQEPDVLEEDGGPIAVYASAYEACAASNAILITTECDEFRNTRPEALSSASQALKSLTERDPRPFAGLEPTESEILALHKFLLQSSPMAAYKSGDPLQRYTDEPLCADDCPDCYLDEKHGYSTDGNASEYRSKHYVDWNKISYHMKQPKWLFDGKGIIDPNEMGKLGIRVESVGRQGRV

SEQ ID NO: 6325 - DNA, 3298 bp, Muscodor strobelii
  misc_feature: SGI EST ID NO. CUFF.15859.0
  misc_feature: Variant of the nucleotide sequence at SEQ ID NO 6323
gtttgatgtttgttctcagtgctgattgatacatttgttttctttctgtcgaaagccccatccgaactctgaatactacgaacaatgcttgaagagattctggcagtgaggtccaagtgtgcatggtctaatggtggacgctctattgaccactccaacgcgaatgcgcgcttctcaacagaaagatttcactcaatccaatcacttaagcagttcaagcctgatagctttaccactgcaactgtaccgagatttcaaagtcgatatcttgagatggatctaacagtcagggatgaataggtaataggcccgtcggttgctcacgtgtaggtaaccataccccccatctctagtgcatcctctcgtgcttatcagccattttctgtctaactcttccagtcacttcaactccattgaccacatgtcttcgagaacccttcttgcattggcttgtggtatctacagatagccgctgttagataagctctttgccactactgctagggagagatgatccttccaggtcgctcgagtatctccaacgtgactacctgccggtagacacatgggacctctccacggcaacatttgcccctcagactagagcaaagtaggaacaatttaacacaatctcatacttcttccagcgtgcccagcactgtaaatattgagtcattttgggtaaggagggtctccttacggcggggatcattgtgtccttcctcgccttcaaaccatcttcacgtgcctcccacttcttcactttataccttctgtctaggcctcattacttgaacagtactactccaaaatattgcgtcgtgttgtagtctattgctccctctgatactgctgttcgttggagtgtttggacgaaaacactatcgattcaagttatcaactcttcacatcactcttcacatcacacgatcaggcacgagatctctctatcaaattagtacatacaacatgggatttggcccagtgccgcccggcgattctgagaagggtttgttccaagatcgagcttcgacagctcctacaacacctgagggcagcttaacatttagtcctgtacttcgtgctagtatcgaacgacatcttgatacattggatcttgatgctaatagcctacacacaccacacggaggcgctcatcacggtgtcacttcatcgccctcgtcatcagagacttgtcgccttgtgcgaaacatttgctgcgtcggtgcaggttatgttgggggcccgacagcagcggtaatcgcttttgagaacccagatattcgcgtcactatcgtagacaaagacgagagaaaaatccgaagatggaactcgaaacacttgcctatatatgaactcggtctcagagatattgtgcgaatcgctcgtgacggttcgcgggaattctctttctcgggcgaggctagcaggcaagattctgatttatcagatgcgtccacttcatcatcagaatgtggctcagaatgttctctacataatctaggtgtggtcaccgtaccagctagacgacctaatctcttcttctctacagacgtttcgaaatgcattagcgaggcagatgttgtgttaattgcggtaaacacccccaccaagtcaaaaggtgcaggtgcaggaagggctacagacatgacgactttcgaagccgtcacaggcgaggttgcgcaacatgctcgaccggggaccatcattgttgaaaaatcgactgtgccttgtcgtacggcgcaactcgttgaagaaacgatggcaattcatcgtcctggtgtacatttcgagattctttcgaatccagaatttttagcagcgggtacggcaatgaaagacctgatgcggcccgatcgtgtgctcatcggatcttcgccaactccttctggtcggcgcgctgctcgagctctcgcagacgtgtacgccgcctgggttcctcgtgatcgtatcatcactacaaatgtgtggtcatcggagctttccaagttagtggcaaactcaatgctagcccagcgcattagtagtatcaactcgatagctgcgatctgtgagaagactggcgctcagatagatgaagtggcttcctcgatcggctgcgatccaaggatcggagacaaattcctcaaagcgggaatcggctttggaggtagctgctttaagaaagacattctgagtctcgtctacctggcggaatctctcgggttagatgaagtgggcgagtactggcgccaagtcataaaaatgaacgagtaccaacgcaaccgatttgctcgacgagtaatcaagtgcctaaacaacactctagtaggcaagaagattaccctacttggctatgcattcaaggccaatacttcggacaccagagagtcacctgcattggaaattgtcaagacattactggaggaaaatcctcgagagatagccatctttgatccgtgttgcaaccctacggtggtcaagaatgagatcagaacgctcttacaggagccagatgtactggaagaggacggaggccccattgcggtctacgcgagcgcttatgaagcctgcgctgccagcaacgcaatcctcatcaccaccgaatgtgacgagttcaggaatacaaggccagaagctctgtcgagcgccagccaggctctgaaatcactcacagagcgtgacccacggccattcgctggacttgagccgacagaaagcgagatcctcgctttgcacaaatttctactacaatcatctcccatggcggcttacaagagcggcgatcctctccaacgttatacggatgagcctttgtgtgcggacgattgccctgactgttatctggatgaaaaacatggatattctacggatggtaatgcaagcgagtacagatcgaaacactatgtggactggaataagatttcgtaccacatgaagcagcccaaatggttgttcgatgggaagggaatcatcgacccgaatgaaatgggcaagctgggcattagagttgaaagtgttggtcggcaagggcgagtttgagacctttttgatcttaccaacacgctcttctaatttgtcctttcgcattatttatacatatttggacggtgttgcatagagacttgggtattggcgtattatcattttagcaagactgggcaacttatctgagcaccgcgcatcccatacggaatatagatatcccgatctaacatacttacacatttgccgctctctactatacatgagaaaatactcacctggttgttattcaatgctggcaggcttaaggagttctgtatggtgaggtttgaaa

SEQ ID NO: 6326 - DNA, 1575 bp, Muscodor strobelii
  misc_feature: SGI cDNA ID NO. 561847
  misc_feature: Reduced expression when VOC is produced
  misc_feature: Encodes the peptide sequence at SEQ ID NO 6327
atggcgcgaccgcatagtgcatttctgcctttcgcgtcattccgactgtctgtcagtttggttgcgcctcgcacacgataccaggtcaaaccggcgcctttcctactgcgttgttattcagtcgatagacctgcgaacaagaaacgaagctccaaggttttcgcttcagcagaggaagcagttgccgatgtgaaagatggcgatgttgttttgagcgcgggttttggattgtgtggagttgctgaaacattgattcaagcgattcataagaaaggattgaaagatttaacagcagtctcgaacaatgccggttcgggaacaaaaggcctcgcgttattgactgagcatggacgcctaagtcgcatcattctctcgtaccttggttcgaacaaggcgcttgagaagcaatacctcactggcaagatcgctgttgagttatgcccgcagggcactttagccgagcgtttgcgcgctgctggggcggggattcccgcgttttataccgcaacgggtggtaagacatttatagaaacaggcgagatacctacgaggtttacacccgaggctgtgcttgagaaaggtagaccgcatgaaacaaggatatttaatgggaaatcgtatatcatggagacggctttaccgggtgacgtggcaatattgagagcatggaaggtggatgaagcaggaaactgtgttttcaaatatacaacaaagacatacgccggactcatggccaaggcagcacgcctagccattgtcgaggcggaggaaatcgtgcccatcggctcgatccaccctgatagtgttgatctcccaggcatctttatcgatcgcattgttccggcaacagcggagaagagcgcagaagtggtcaaattagctgagcctaagagcccaggtaaaacaaaccaacccagtgcacggaatcgtatcgcgaagagggctgctcaagagcttaaggacggcttctacgtgaatcttggcgtcggaatccctacgcttgcagcttcttacgtaccagaagacaggaaagtctggctgcaatccgaaaatggtattttgggtatgggtccttatccagagacggaagatgacgtggatgtcgatctcatcaatgctggcaaagagacgacgacattactgcctggcgcatcgacgtttgactcagctgagtctttcggtatgattcggggaggacatgtcgatgtttcgatccttggtgccttccaagtatccgcgtcaggcgatcttgcgaactacataattcctggcaaagtcttcaagggtatgggcggagctatggatctcgtgtctaatcctgatcagaccaagatcgtagtagccactgagcatgttgataagaacggccgcagcaagattgtccaggactgcaagctaccactgacgggcaagggagttgtcagcaccatcatcactgatctcgctgtcttccaagtcgaccgtgcgaagggaggactgactctgactgatatcgccgagggtgtggatgttgaagaagtgcaagagaagacggacgctacatttacagtcgcgaagaacttgaagacgttctaa

SEQ ID NO: 6327 - protein, 524 aa, Muscodor strobelii
  misc_feature: SGI Peptide ID NO. 561847
  misc_feature (54)..(282): Pfam Id: PF01144 Pfam Desc: Coenzyme A transferase
  misc_feature (308)..(510): Pfam Id: PF01144 Pfam Desc: Coenzyme A transferase
  misc_feature (25)..(522): NCBI GI: 238499035 Blast Desc: coenzyme A transferase, [Aspergillus flavus NRRL3357] gi|220692505|gb|EED48851.1| coenzyme A transferase, [Aspergillus flavus NRRL3357]
  misc_feature (44)..(522): NCBI GI: 119474579 Blast Desc: succinyl-CoA:3-ketoacid-coenzyme A transferase [Neosartorya fischeri NRRL 181] gi|119407318|gb|EAW17268.1| succinyl-CoA:3-ketoacid-coenzyme A transferase [Neosartorya NRRL
  misc_feature (37)..(521): NCBI GI: 171679962 Blast Desc: protein product [Podospora anserina] gi|170939607|emb|CAP64834.1| protein product [Podospora anserina]
  misc_feature (26)..(524): NCBI GI: 242822103 Blast Desc: coenzyme A transferase, [Talaromyces stipitatus ATCC 10500] gi|218712736|gb|EED12161.1| coenzyme A transferase, [Talaromyces stipitatus ATCC 10500]
  misc_feature (44)..(524): NCBI GI: 212546919 Blast Desc: coenzyme A transferase, [Penicillium marneffei ATCC 18224] gi|210065133|gb|EEA19228.1| coenzyme A transferase, [Penicillium marneffei ATCC 18224]
  misc_feature (10)..(522): NCBI GI: 255938566 Blast Desc: Pc14g00590 [Penicillium chrysogenum Wisconsin 54-1255] gi|211584674|emb|CAP74200.1| Pc14g00590 [Penicillium chrysogenum Wisconsin 54-1255]
  misc_feature (24)..(524): NCBI GI: 46110529 Blast Desc: FG02146.1 [Gibberella zeae PH-1]
  misc_feature (44)..(522): NCBI GI: 169598942 Blast Desc: SNOG_02282 [Phaeosphaeria nodorum SN15] gi|160704501|gb|EAT90494.2| SNOG_02282 [Phaeosphaeria nodorum SN15]
  misc_feature (50)..(524): NCBI GI: 156052118 Blast Desc: SS1G_07467 [Sclerotinia sclerotiorum 1980] gi|154705244|gb|EDO04983.1| SS1G_07467 [Sclerotinia sclerotiorum 1980]
  misc_feature (80)..(524): NCBI GI: 145228325 Blast Desc: An01g00200 [Aspergillus niger] gi|134054557|emb|CAK36870.1| protein product [Aspergillus niger]
  misc_feature (49)..(522): SWISSPROT Homolog: EC 2.8.3.5 3-oxoacid CoA-transferase
  misc_feature: Useful for introducing or modulating the production of volatile compounds
MARPHSAFLPFASFRLSVSLVAPRTRYQVKPAPFLLRCYSVDRPANKKRSSKVFASAEEAVADVKDGDVVLSAGFGLCGVAETLIQAIHKKGLKDLTAVSNNAGSGTKGLALLTEHGRLSRIILSYLGSNKALEKQYLTGKIAVELCPQGTLAERLRAAGAGIPAFYTATGGKTFIETGEIPTRFTPEAVLEKGRPHETRIFNGKSYIMETALPGDVAILRAWKVDEAGNCVFKYTTKTYAGLMAKAARLAIVEAEEIVPIGSIHPDSVDLPGIFIDRIVPATAEKSAEVVKLAEPKSPGKTNQPSARNRIAKRAAQELKDGFYVNLGVGIPTLAASYVPEDRKVWLQSENGILGMGPYPETEDDVDVDLINAGKETTTLLPGASTFDSAESFGMIRGGHVDVSILGAFQVSASGDLANYIIPGKVFKGMGGAMDLVSNPDQTKIVVATEHVDKNGRSKIVQDCKLPLTGKGVVSTIITDLAVFQVDRAKGGLTLTDIAEGVDVEEVQEKTDATFTVAKNLKTF

SEQ ID NO: 6328 - DNA, 3030 bp, Muscodor strobelii
  misc_feature: SGI EST ID NO. CUFF.16017.0
  misc_feature: Variant of the nucleotide sequence at SEQ ID NO 6326
ttggagatacaagccgagacagcgtgttcacattgtaaatgatttccttttcgtacaattcgctcaagtagcatcatcatggcgcgaccgcatagtgcatttctgcctttcgcgtcattccgactgtctgtcagtttggttgcgcctcgcacacgataccaggtcaaaccggcgcctttcctactgcgttgttattcagtcgatagacctgcgaacaagaaacgaagctccaaggttttcgcttcagcagaggaagcagttgccgatgtgaaagatggcgatgttgttttgagcgcgggttttggattgtgtggagttgctgaaacattgattcaagcgattcataagaaaggattgaaagatttaacagcagtctcgaacaatgccggttcgggaacaaaaggcctcgcgttattgactgagcatggacgcctaagtcgcatcattctctcgtaccttggttcgaacaaggcgcttgagaagcaatacctcactggcaagatcgctgttgagttatgcccgcagggcactttagccgagcgtttgcgcgctgctggggcggggattcccgcgttttataccgcaacgggtggtaagacatttatagaaacaggcgagatacctacgaggtttacacccgaggctgtgcttgagaaaggtagaccgcatgaaacaaggatatttaatgggaaatcgtatatcatggagacggctttaccgggtgacgtggcaatattgagagcatggaaggtggatgaagcaggaaactgtgttttcaaatatacaacaaagacatacgccggactcatggccaaggcagcacgcctagccattgtcgaggcggaggaaatcgtgcccatcggctcgatccaccctgatagtgttgatctcccaggcatctttatcgatcgcattgttccggcaacagcggagaagagcgcagaagtggtcaaattagctgagcctaagagcccaggtaaaacaaaccaacccagtgcacggaatcgtatcgcgaagagggctgctcaagagcttaaggacggcttctacgtgaatcttggcgtcggaatccctacgcttgcagcttcttacgtaccagaagacaggaaagtctggctgcaatccgaaaatggtattttgggtatgggtccttatccagagacggaagatgacgtggatgtcgatctcatcaatgctggcaaagagacgacgacattactgcctggcgcatcgacgtttgactcagctgagtctttcggtatgattcggggaggacatgtcgatgtttcgatccttggtgccttccaagtatccgcgtcaggcgatcttgcgaactacataattcctggcaaagtcttcaagggtatgggcggagctatggatctcgtgtctaatcctgatcagaccaagatcgtagtagccactgagcatgttgataagaacggccgcagcaagattgtccaggactgcaagctaccactgacgggcaagggagttgtcagcaccatcatcactgatctcgctgtcttccaagtcgaccgtgcgaagggaggactgactctgactgatatcgccgagggtgtggatgttgaagaagtgcaagagaagacggacgctacatttacagtcgcgaagaacttgaagacgttctaagatggagatggttgtaagacgtttgcatgatcgagatgtacataaatgatgatgttcatttgaggttagagttactacgatatggcgtagagaataaagtagatacccatgaatgctataggcaaaagctcttctcgttagtgtgttcattacgctaccaagttgaacgatggacgtaggtcatgcttgtaacacattaaatgtgtattgcttgatcatgaagctaaggactacctgtgtatcgctccattatgtacaatatcatgtcatcatatcctgcatgcttcaccgcgtctagttttatatcttagctcgcataccaggagcaaatgttgttccctcagcaccaccaatagcgcgcaccagctcatctatacggtctaacaaccacaagttgccatcctcaccagcaagccattcaccaccctctacgggcacttctcccttagcgttagcgtctccgtgctcataggccttccgcaggccgaaaatatgcgaaacgacctgcggtccaacaccagtctgcgcacgcaggcaggatatagcaactagtgacgtcaaaactctgccgacaggctcctgcttttggacatcccgcgggttcgcaagaagattcgagtagtgtccgttgataatatgcacaggcagatcaggatgcgactgtgcgagtttgttcagcaacttgcgctcgaagcctatatacacactatcccagagcgcaagcccgtctttcttccggagctcgagattctcgggcgtcagctcgcgactcggcgtcgtggacatggacgaggtgacttctgaggggaggctgttccaaaaggcgcctaacgtgttgatcgtgcgtggtatgccgttgaaggagatgcatttgaggccgacttcgcgaatgagctccgcgttttgggagggactacgtgagctggtgtcgttcgatttgttggcgaggtggaagacttgtgtcatggcttcgggacagttcatcgttgccgagacggctgtctatacgtagctccttgtgagtacctatccgtcaccattccgtagattgaccttggactcgacataccgataccgtgacccaggctggcaagccaactcgcttgttttgcgcatcgcttgcaagtcgctgtaaggcaggctgcacttcggcccgcgcccgtgtatagccgggcttcgcatgggcgctgttgatgagggccttgacggcctctgatagcttcgacatgtcgcgaattgaagctgggcttggctcggattcggaatcagacttacggtcgggcaattgactctgcgaccggcaccgagtcgagtctttgtccttcatcaacagtgatgcggcctacggcaattacccgaggggatcgcgtgataaat

SEQ ID NO: 6329 - DNA, 861 bp, Muscodor strobelii
  misc_feature: SGI cDNA ID NO. 561848
  misc_feature: Reduced expression when VOC is produced
  misc_feature: Encodes the peptide sequence at SEQ ID NO 6330
atgtcgaagctatcagaggccgtcaaggccctcatcaacagcgcccatgcgaagcccggctatacacgggcgcgggccgaagtgcagcctgccttacagcgacttgcaagcgatgcgcaaaacaagcgagttggcttgccagcctgggtcacggtatcgacagccgtctcggcaacgatgaactgtcccgaagccatgacacaagtcttccacctcgccaacaaatcgaacgacaccagctcacgtagtccctcccaaaacgcggagctcattcgcgaagtcggcctcaaatgcatctccttcaacggcataccacgcacgatcaacacgttaggcgccttttggaacagcctcccctcagaagtcacctcgtccatgtccacgacgccgagtcgcgagctgacgcccgagaatctcgagctccggaagaaagacgggcttgcgctctgggatagtgtgtatataggcttcgagcgcaagttgctgaacaaactcgcacagtcgcatcctgatctgcctgtgcatattatcaacggacactactcgaatcttcttgcgaacccgcgggatgtccaaaagcaggagcctgtcggcagagttttgacgtcactagttgctatatcctgcctgcgtgcgcagactggtgttggaccgcaggtcgtttcgcatattttcggcctgcggaaggcctatgagcacggagacgctaacgctaagggagaagtgcccgtagagggtggtgaatggcttgctggtgaggatggcaacttgtggttgttagaccgtatagatgagctggtgcgcgctattggtggtgctgagggaacaacatttgctcctggtatgcgagctaagatataa

SEQ ID NO: 6330 - protein, 286 aa, Muscodor strobelii
  misc_feature: SGI Peptide ID NO. 561848
  misc_feature (1)..(286): NCBI GI: 212545348 Blast Desc: conserved mitochondrial protein [Penicillium marneffei ATCC 18224] gi|210065797|gb|EEA19891.1| conserved mitochondrial protein [Penicillium marneffei ATCC 18224]
  misc_feature (1)..(286): NCBI GI: 242815384 Blast Desc: conserved mitochondrial protein [Talaromyces stipitatus ATCC 10500] gi|218714896|gb|EED14319.1| conserved mitochondrial protein [Talaromyces stipitatus ATCC 10500]
  misc_feature (1)..(286): NCBI GI: 255938560 Blast Desc: Pc14g00560 [Penicillium chrysogenum Wisconsin 54-1255] gi|211584671|emb|CAP74197.1| Pc14g00560 [Penicillium chrysogenum Wisconsin 54-1255]
  misc_feature (1)..(286): NCBI GI: 256728633 Blast Desc: [Nectria haematococca mpVI 77-13-4]
  misc_feature (1)..(286): NCBI GI: 169778572 Blast Desc: [Aspergillus oryzae RIB40] gi|83772489|dbj|BAE62618.1| protein product [Aspergillus oryzae]
  misc_feature (1)..(286): NCBI GI: 46110533 Blast Desc: FG02148.1 [Gibberella zeae PH-1]
  misc_feature (1)..(280): NCBI GI: 119474577 Blast Desc: NFIA_006310 [Neosartorya fischeri NRRL 181] gi|119407317|gb|EAW17267.1| conserved [Neosartorya fischeri NRRL 181]
  misc_feature (1)..(286): NCBI GI: 70986456 Blast Desc: conserved mitochondrial protein [Aspergillus fumigatus Af293] gi|66846351|gb|EAL86684.1| conserved mitochondrial protein [Aspergillus fumigatus Af293] gi|159128107|gb|EDP53222.1| A1163]
  misc_feature (1)..(286): NCBI GI: 189206173 Blast Desc: conserved [Pyrenophora tritici-repentis Pt-1C-BFP] gi|187975514|gb|EDU42140.1| conserved [Pyrenophora tritici-repentis Pt-1C-BFP]
  misc_feature (1)..(276): NCBI GI: 169626434 Blast Desc: SNOG_16505 [Phaeosphaeria nodorum SN15] gi|206557940|sp|Q0TVF9.2|ALG3_PHANO RecName: Full=Dolichyl-P-Man:Man(5)GlcNAc(2)-PP-dolichyl AltName: AltName:
  misc_feature (1)..(276): SWISSPROT Homolog: EC 2.4.1.130 Dolichyl-phosphate-mannose--glycolipid alpha-mannosyltransferase
  misc_feature: Useful for introducing or modulating the production of volatile compounds
MSKLSEAVKALINSAHAKPGYTRARAEVQPALQRLASDAQNKRVGLPAWVTVSTAVSATMNCPEAMTQVFHLANKSNDTSSRSPSQNAELIREVGLKCISFNGIPRTINTLGAFWNSLPSEVTSSMSTTPSRELTPENLELRKKDGLALWDSVYIGFERKLLNKLAQSHPDLPVHIINGHYSNLLANPRDVQKQEPVGRVLTSLVAISCLRAQTGVGPQVVSHIFGLRKAYEHGDANAKGEVPVEGGEWLAGEDGNLWLLDRIDELVRAIGGAEGTTFAPGMRAKI

SEQ ID NO: 6331 - DNA, 2178 bp, Muscodor strobelii
  misc_feature: SGI EST ID NO. CUFF.16018.2
  misc_feature: Variant of the nucleotide sequence at SEQ ID NO 6329
gcgatcccctcgggtaattgccgtaggccgcatcactgttgatgaaggacaaagactcgactcggtgccggtcgcagagtcaattgcccgaccgtaagtctgattccgaatccgagccaagcccagcttcaattcgcgacatgtcgaagctatcagaggccgtcaaggccctcatcaacagcgcccatgcgaagcccggctatacacgggcgcgggccgaagtgcagcctgccttacagcgacttgcaagcgatgcgcaaaacaagcgagttggcttgccagcctgggtcacggtatcgacagccgtctcggcaacgatgaactgtcccgaagccatgacacaagtcttccacctcgccaacaaatcgaacgacaccagctcacgtagtccctcccaaaacgcggagctcattcgcgaagtcggcctcaaatgcatctccttcaacggcataccacgcacgatcaacacgttaggcgccttttggaacagcctcccctcagaagtcacctcgtccatgtccacgacgccgagtcgcgagctgacgcccgagaatctcgagctccggaagaaagacgggcttgcgctctgggatagtgtgtatataggcttcgagcgcaagttgctgaacaaactcgcacagtcgcatcctgatctgcctgtgcatattatcaacggacactactcgaatcttcttgcgaacccgcgggatgtccaaaagcaggagcctgtcggcagagttttgacgtcactagttgctatatcctgcctgcgtgcgcagactggtgttggaccgcaggtcgtttcgcatattttcggcctgcggaaggcctatgagcacggagacgctaacgctaagggagaagtgcccgtagagggtggtgaatggcttgctggtgaggatggcaacttgtggttgttagaccgtatagatgagctggtgcgcgctattggtggtgctgagggaacaacatttgctcctggtatgcgagctaagatataaaactagacgcggtgaagcatgcaggatatgatgacatgatattgtacataatggagcgatacacaggtagtccttagcttcatgatcaagcaatacacatttaatgtgttacaagcatgacctacgtccatcgttcaacttggtagcgtaatgaacacactaacgagaagagcttttgcctatagcattcatgggtatctactttattctctacgccatatcgtagtaactctaacctcaaatgaacatcatcatttatgtacatctcgatcatgcaaacgtcttacaaccatctccatcttagaacgtcttcaagttcttcgcgactgtaaatgtagcgtccgtcttctcttgcacttcttcaacatccacaccctcggcgatatcagtcagagtcagtcctcccttcgcacggtcgacttggaagacagcgagatcagtgatgatggtgctgacaactcccttgcccgtcagtggtagcttgcagtcctggacaatcttgctgcggccgttcttatcaacatgctcagtggctactacgatcttggtctgatcaggattagacacgagatccatagctccgcccatacccttgaagactttgccaggaattatgtagttcgcaagatcgcctgacgcggatacttggaaggcaccaaggatcgaaacatcgacatgtcctccccgaatcataccgaaagactcagctgagtcaaacgtcgatgcgccaggcagtaatgtcgtcgtctctttgccagcattgatgagatcgacatccacgtcatcttccgtctctggataaggacccatacccaaaataccattttcggattgcagccagactttcctgtcttctggtacgtaagaagctgcaagcgtagggattccgacgccaagattcacgtagaagccgtccttaagctcttgagcagccctcttcgcgatacgattccgtgcactgggttggtttgttttacctgggctcttaggctcagctaatttgaccacttctgcgctcttctccgctgttgccggaacaatgcgatcgataaagatgcctgggagatcaacactatcagggtggatcgagccgatgggcacgatttcctccgcctcgacaatggctaggcgtgctgccttggccatgagtccggcgtatgtctttgttgtatatctg

SEQ ID NO: 6332 - DNA, 1449 bp, Muscodor strobelii
  misc_feature: SGI cDNA ID NO. 561849
  misc_feature: Elevated expression when VOC is produced
  misc_feature: Encodes the peptide sequence at SEQ ID NO 6333
atgtcggaacacgaaacggagaaggaacccgtcgagaaaggccatgtctcttcagaaacagagaacggcggaatcttggaggatggcatcgacaaaagcatggagcgcaagatcctcttaaaattggacacacgaattctcccattgcttgcgcttctgttcttatgctcgttcttcgaccgaacaaatgtcggcaacgctcgattgtacggattacaggacgaaattggaattgacgaccttcaatacgaaactggcctgtctgtcttttacgcgacttacatcttctcggaaatccccagcaatttgatcctgaaaaaggtaacgccaagcgtgtggctaccatgtctcgcgttcttctggggcatcgtcgctatgagtaccggtttcattcattctttcgggcagttcgtggcgattcgcgctcttcttggtatctgcgagggaggtctgttacctggcatcatcctgtatctatccagtatctacacgcgaaaagagctagccattcgaatcggtctattctatacctccgcctcactttccggcgcattctcgggtcttcttgcgcgtgctatatctgagttagggggtcgcggcggcttgagtaaatggagatggatcttcattatcttcggcctatttagcaccaccgtaggcttcgtttgtttttggctgcttcccaatggtgtcagctccgctcgtttcttgacgcccgaacaacaagagtacgcatcccgtcgtttacgtgcccaacatggcagtggcgaagccgaacgattctcgtgggccgaagtcagacgtggtattttcagcttacagacttggtttaccgctctcgcgtatttcggaatcctcagcggactatacagcttcggtctctttctgccaacaatcatcagagggcttggatatacggcgaatgaagcccaattgtggtccgttataccatacgcagtcgcagctgtcttcacggttataacggcttggctctcagatcacttcaaagtacgaggcatgatcatgctctgcaccttacccattggaatcattggatatgcagtgattgccaacgtcgaaagtacccgtgtcaagtacggaatgacgtttttgatggcgacgggcctgtactcaagtgttccaccggtactgggctggctttcgaataactctgccggtcattacaagcgagctaccacaagtgcccttcagcttgcgatcgcgaacgctggcggtttcgttgccgtctttatctatccttcgatcgaaggaccgcgatattacaagggccacacgattgtgcttagtctgttgagtgctggttgggttctggtcctctgtaacgtgctgtactgccgaaagatcaacaaggacaaggcgaatggcaaatacgacaagtacatggactacaaggatgatcgcaatccttcattcaagcttgtactctag

SEQ ID NO: 6333 - protein, 482 aa, Muscodor strobelii
  misc_feature: SGI Peptide ID NO. 561849
  misc_feature (50)..(416): Pfam Id: PF07690 Pfam Desc: Major Facilitator Superfamily
  misc_feature (36)..(482): NCBI GI: 242822113 Blast Desc: MFS transporter, [Talaromyces stipitatus ATCC 10500] gi|218712738|gb|EED12163.1| MFS transporter, [Talaromyces stipitatus ATCC 10500]
  misc_feature (2)..(482): NCBI GI: 212546917 Blast Desc: MFS transporter, [Penicillium marneffei ATCC 18224] gi|210065132|gb|EEA19227.1| MFS transporter, [Penicillium marneffei ATCC 18224]
  misc_feature (1)..(482): NCBI GI: 169598944 Blast Desc: SNOG_02283 [Phaeosphaeria nodorum SN15] gi|111069375|gb|EAT90495.1| SNOG_02283 [Phaeosphaeria nodorum SN15]
  misc_feature (4)..(482): NCBI GI: 255938562 Blast Desc: Pc14g00570 [Penicillium chrysogenum Wisconsin 54-1255] gi|211584672|emb|CAP74198.1| Pc14g00570 [Penicillium chrysogenum Wisconsin 54-1255]
  misc_feature (31)..(482): NCBI GI: 171679960 Blast Desc: protein product [Podospora anserina] gi|170939606|emb|CAP64833.1| protein product [Podospora anserina]
  misc_feature (4)..(482): NCBI GI: 189208446 Blast Desc: PTRG_10224 [Pyrenophora tritici-repentis Pt-1C-BFP] gi|187976649|gb|EDU43275.1| PTRG_10224 [Pyrenophora tritici-repentis Pt-1C-BFP]
  misc_feature (5)..(482): NCBI GI: 169778570 Blast Desc: [Aspergillus oryzae RIB40] gi|83772488|dbj|BAE62617.1| protein product [Aspergillus oryzae]
  misc_feature (17)..(482): NCBI GI: 164425698 Blast Desc: NCU06159 [Neurospora crassa OR74A] gi|157071026|gb|EAA30785.2| conserved [Neurospora crassa OR74A]
  misc_feature (1)..(417): NCBI GI: 115389058 Blast Desc: conserved [Aspergillus terreus NIH2624] gi|114194430|gb|EAU36130.1| conserved [Aspergillus terreus NIH2624]
  misc_feature (121)..(482): NCBI GI: 119474575 Blast Desc: NFIA_006300 [Neosartorya fischeri NRRL 181] gi|119407316|gb|EAW17266.1| conserved [Neosartorya fischeri NRRL 181]
  misc_feature: Useful for introducing or modulating the production of volatile compounds
MSEHETEKEPVEKGHVSSETENGGILEDGIDKSMERKILLKLDTRILPLLALLFLCSFFDRTNVGNARLYGLQDEIGIDDLQYETGLSVFYATYIFSEIPSNLILKKVTPSVWLPCLAFFWGIVAMSTGFIHSFGQFVAIRALLGICEGGLLPGIILYLSSIYTRKELAIRIGLFYTSASLSGAFSGLLARAISELGGRGGLSKWRWIFIIFGLFSTTVGFVCFWLLPNGVSSARFLTPEQQEYASRRLRAQHGSGEAERFSWAEVRRGIFSLQTWFTALAYFGILSGLYSFGLFLPTIIRGLGYTANEAQLWSVIPYAVAAVFTVITAWLSDHFKVRGMIMLCTLPIGIIGYAVIANVESTRVKYGMTFLMATGLYSSVPPVLGWLSNNSAGHYKRATTSALQLAIANAGGFVAVFIYPSIEGPRYYKGHTIVLSLLSAGWVLVLCNVLYCRKINKDKANGKYDKYMDYKDDRNPSFKLVL

SEQ ID NO: 6334 - DNA, 2258 bp, Muscodor strobelii
  misc_feature: SGI EST ID NO. CUFF.15803.0
  misc_feature: Variant of the nucleotide sequence at SEQ ID NO 6332
attacattagaaggtctcgtcctagtcccgccgtgctacagcttcctgcaagctgcaagttttctcctctccttggtccttctcgtcggggcttgtgtcgcattgctaagaaatcgtccctcccgatcatctggttcgtgtttccatcatgtcggaacacgaaacggagaaggaacccgtcgagaaaggccatgtctcttcagaaacagagaacggcggaatcttggaggatggcatcgacaaaagcatggagcgcaagatcctcttaaaattggacacacgaattctcccattgcttgcgcttctgttcttatgctcgttcttcgaccgaacaaatgtcggcaacgctcgattgtacggattacaggacgaaattggaattgacgaccttcaatacgaaactggcctgtctgtcttttacgcgacttacatcttctcggaaatccccagcaatttgatcctgaaaaaggtaacgccaagcgtgtggctaccatgtctcgcgttcttctggggcatcgtcgctatgagtaccggtttcattcattctttcgggcagttcgtggcgattcgcgctcttcttggtatctgcgagggaggtctgttacctggcatcatcctgtatctatccagtatctacacgcgaaaagagctagccattcgaatcggtctattctatacctccgcctcactttccggcgcattctcgggtcttcttgcgcgtgctatatctgagttagggggtcgcggcggcttgagtaaatggagatggatcttcattatcttcggcctatttagcaccaccgtaggcttcgtttgtttttggctgcttcccaatggtgtcagctccgctcgtttcttgacgcccgaacaacaagagtacgcatcccgtcgtttacgtgcccaacatggcagtggcgaagccgaacgattctcgtgggccgaagtcagacgtggtattttcagcttacagacttggtttaccgctctcgcgtatttcggaatcctcagcggactatacagcttcggtctctttctgccaacaatcatcagagggcttggatatacggcgaatgaagcccaattgtggtccgttataccatacgcagtcgcagctgtcttcacggttataacggcttggctctcagatcacttcaaagtacgaggcatgatcatgctctgcaccttacccattggaatcattggatatgcagtgattgccaacgtcgaaagtacccgtgtcaagtacggaatgacgtttttgatggcgacgggcctgtactcaagtgttccaccggtactgggctggctttcgaataactctgccggtcattacaagcgagctaccacaagtgcccttcagcttgcgatcgcgaacgctggcggtttcgttgccgtctttatctatccttcgatcgaaggaccgcgatattacaagggccacacgattgtgcttagtctgttgagtgctggttgggttctggtcctctgtaacgtgctgtactgccgaaagatcaacaaggacaaggcgaatggcaaatacgacaagtacatggactacaaggatgatcgcaatccttcattcaagcttgtactctagtgcgtagatatgaaacccagagctcagctcgggtcgattttgatctgaatataagtgagatcttgacttgggaattccgccgtccagcgtaccgtttgaagattatgaagcgatgattgatatggccaccaagtctcgtaaaatatttacacccgtgatgctccgttcgcttcaattctcacgtacataacactttaaagttatatgatagtaatggtttcgccgacttatcatcaggatcggagagattattctcgtctaggatggacatgatgggctcgatcagacattccttacgtgatatgtttccagcagatggtgcccatctctttaccacgacgtaggagcggtgcgcctttggctacgccttctagcggtaactagcaattcgcccgtaatgttggcgaaagaatgactcgaccaagtatgtcgcgggtgttataaacgcccactacttggcatcgagcccattaagcttcactccctagattctcaatggcaaggctaacggctttataaaagtcccggctgccctgtggtctcagcttaaatatgccgtccaacaaatgggttcggaatggtatcttaaaatacgagtagtcagtagcaatacgatctgcgatacttgaaagacatgatggtatctcataggttgatcgcg

SEQ ID NO: 6335 - DNA, 1509 bp, Muscodor strobelii
  misc_feature: SGI cDNA ID NO. 561850
  misc_feature: Encodes the peptide sequence at SEQ ID NO 6336
atgtcggaacacgaaacggagaaggaacccgtcgagaaaggccatgtctcttcagaaacagagaacggcggaatcttggaggatggcatcgacaaaagcatggagcgcaagatcctcttaaaattggacacacggcatgtacaaacccatgggatactggtgtttggtcgctcaaaactaacaaatcggatcagaattctcccattgcttgcgcttctgttcttatgctcgttcttcgaccgaacaaatgtcggcaacgctcgattgtacggattacaggacgaaattggaattgacgaccttcaatacgaaactggcctgtctgtcttttacgcgacttacatcttctcggaaatccccagcaatttgatcctgaaaaaggtaacgccaagcgtgtggctaccatgtctcgcgttcttctggggcatcgtcgctatgagtaccggtttcattcattctttcgggcagttcgtggcgattcgcgctcttcttggtatctgcgagggaggtctgttacctggcatcatcctgtatctatccagtatctacacgcgaaaagagctagccattcgaatcggtctattctatacctccgcctcactttccggcgcattctcgggtcttcttgcgcgtgctatatctgagttagggggtcgcggcggcttgagtaaatggagatggatcttcattatcttcggcctatttagcaccaccgtaggcttcgtttgtttttggctgcttcccaatggtgtcagctccgctcgtttcttgacgcccgaacaacaagagtacgcatcccgtcgtttacgtgcccaacatggcagtggcgaagccgaacgattctcgtgggccgaagtcagacgtggtattttcagcttacagacttggtttaccgctctcgcgtatttcggaatcctcagcggactatacagcttcggtctctttctgccaacaatcatcagagggcttggatatacggcgaatgaagcccaattgtggtccgttataccatacgcagtcgcagctgtcttcacggttataacggcttggctctcagatcacttcaaagtacgaggcatgatcatgctctgcaccttacccattggaatcattggatatgcagtgattgccaacgtcgaaagtacccgtgtcaagtacggaatgacgtttttgatggcgacgggcctgtactcaagtgttccaccggtactgggctggctttcgaataactctgccggtcattacaagcgagctaccacaagtgcccttcagcttgcgatcgcgaacgctggcggtttcgttgccgtctttatctatccttcgatcgaaggaccgcgatattacaagggccacacgattgtgcttagtctgttgagtgctggttgggttctggtcctctgtaacgtgctgtactgccgaaagatcaacaaggacaaggcgaatggcaaatacgacaagtacatggactacaaggatgatcgcaatccttcattcaagcttgtactctag

SEQ ID NO: 6336 - protein, 502 aa, Muscodor strobelii
  misc_feature: SGI Peptide ID NO. 561850
  misc_feature (70)..(436): Pfam Id: PF07690 Pfam Desc: Major Facilitator Superfamily
  misc_feature (64)..(502): NCBI GI: 242822113 Blast Desc: MFS transporter, [Talaromyces stipitatus ATCC 10500] gi|218712738|gb|EED12163.1| MFS transporter, [Talaromyces stipitatus ATCC 10500]
  misc_feature (2)..(502): NCBI GI: 212546917 Blast Desc: MFS transporter, [Penicillium marneffei ATCC 18224] gi|210065132|gb|EEA19227.1| MFS transporter, [Penicillium marneffei ATCC 18224]
  misc_feature (1)..(502): NCBI GI: 169598944 Blast Desc: SNOG_02283 [Phaeosphaeria nodorum SN15] gi|111069375|gb|EAT90495.1| SNOG_02283 [Phaeosphaeria nodorum SN15]
  misc_feature (4)..(502): NCBI GI: 255938562 Blast Desc: Pc14g00570 [Penicillium chrysogenum Wisconsin 54-1255] gi|211584672|emb|CAP74198.1| Pc14g00570 [Penicillium chrysogenum Wisconsin 54-1255]
  misc_feature (39)..(502): NCBI GI: 171679960 Blast Desc: protein product [Podospora anserina] gi|170939606|emb|CAP64833.1| protein product [Podospora anserina]
  misc_feature (4)..(502): NCBI GI: 189208446 Blast Desc: PTRG_10224 [Pyrenophora tritici-repentis Pt-1C-BFP] gi|187976649|gb|EDU43275.1| PTRG_10224 [Pyrenophora tritici-repentis Pt-1C-BFP]
  misc_feature (5)..(502): NCBI GI: 169778570 Blast Desc: [Aspergillus oryzae RIB40] gi|83772488|dbj|BAE62617.1| protein product [Aspergillus oryzae]
  misc_feature (65)..(502): NCBI GI: 164425698 Blast Desc: NCU06159 [Neurospora crassa OR74A] gi|157071026|gb|EAA30785.2| conserved [Neurospora crassa OR74A]
  misc_feature (1)..(437): NCBI GI: 115389058 Blast Desc: conserved [Aspergillus terreus NIH2624] gi|114194430|gb|EAU36130.1| conserved [Aspergillus terreus NIH2624]
  misc_feature (141)..(502): NCBI GI: 119474575 Blast Desc: NFIA_006300 [Neosartorya fischeri NRRL 181] gi|119407316|gb|EAW17266.1| conserved [Neosartorya fischeri NRRL 181]
MSEHETEKEPVEKGHVSSETENGGILEDGIDKSMERKILLKLDTRHVQTHGILVFGRSKLTNRIRILPLLALLFLCSFFDRTNVGNARLYGLQDEIGIDDLQYETGLSVFYATYIFSEIPSNLILKKVTPSVWLPCLAFFWGIVAMSTGFIHSFGQFVAIRALLGICEGGLLPGIILYLSSIYTRKELAIRIGLFYTSASLSGAFSGLLARAISELGGRGGLSKWRWIFIIFGLFSTTVGFVCFWLLPNGVSSARFLTPEQQEYASRRLRAQHGSGEAERFSWAEVRRGIFSLQTWFTALAYFGILSGLYSFGLFLPTIIRGLGYTANEAQLWSVIPYAVAAVFTVITAWLSDHFKVRGMIMLCTLPIGIIGYAVIANVESTRVKYGMTFLMATGLYSSVPPVLGWLSNNSAGHYKRATTSALQLAIANAGGFVAVFIYPSIEGPRYYKGHTIVLSLLSAGWVLVLCNVLYCRKINKDKANGKYDKYMDYKDDRNPSFKLVL

SEQ ID NO: 6337 - DNA, 2258 bp, Muscodor strobelii; identical to SEQ ID NO: 6334
  misc_feature: SGI EST ID NO. CUFF.15803.0
  misc_feature: Variant of the nucleotide sequence at SEQ ID NO 6335

SEQ ID NO: 6338 - DNA, 2205 bp, Muscodor strobelii
  misc_feature: SGI cDNA ID NO. 561851
  misc_feature: Elevated expression when VOC is produced
  misc_feature: Encodes the peptide sequence at SEQ ID NO 6339
atggccgaagtgtctcctcctgtatctcatgatgaggctaaagagcgcaacctcgagtgcagtgcgccccaattccacgttgggcgccataagggtgtaaagaacaaacactctggtctagagaaagctgtttttcaaatcgagcaagctttaaggaggacgcgcacaaactcaggatcagagcaaataaataataccgagcagacaaccgaactccgatacttgttagaaagaagtcgtgacctcctcagcgccgagcgtggccagaggcgtattagtttgggcgcaaagcgtcgtcgcgatgagacagtgacttcgccccataactcctctgtttctcacagtacacctcagtcgcaatcggtagaatcccatactgctgagtcaggatcttcgaaaatagaggatgaccaactaaacctggacgacgccgagaatccattacagctacttgcgcggacgtccgaatttttatccgcgatcgatcatcctttagattcgggtacgcgccgtgcacataacaagtcgctaccgaatagaaggacagtgacgaatgttgacgacgacgacgatctacagcgcttctttggtcggattcagccacgtctcgacgtaggagaagaacttgaccccattgagctcgggttgatcacaatgagcgaggcagaatccatgtttgcatatttttatgacaatctcgcccatacaagatgggggattgacccggttttacatacagttgagtttgttcgaaaacgttcggcgtttctctttacatctatcgtcgctgcatcagctcttttctcgccttcagcagaggctttacataaacggctatcaaaacaccgccaaaaactcgctgatcttgttatgacccaacgctacaaatcagttgaaattgttctcgctttcatggtgaacattccatggatatcagctggcgagcattgggccgacgatgaaactacaacgtacatctccgtggcgtcaagcattgcactggatctgtacttgaacaaaatcatactcccttcagccccgggctcgttgttttccaaggataacattgcattgtctgagcagatttcatcgaaacgcgctctcaatgttgatggctttgcccatgttgaaccaactagcgagatgggtcgaaggttgctacgaagaagagaacgagcatggctatctcttttcgttttggagagaggtgtctgtctcgcaaggggacgcagttatatgttgcctaactcacttcttgtggagcactgcgatcattggcacttgtgcgacctagcagatagatgggatggttcaattgtttccgtggcagtgctgaggcgagacttggcgaaactgattgaaaatctgcgagtaatatgtgacagctttgctaatggtgcaagtgaggcatcggttgtcgagagattgaaagctgaaattactatattcttcgatcgatggtatcagacttggcctttacagattggagatcgcgaacaattcacgcttcctccatacgtcgagattctcgcttcgcacacgcgcttatcgatgtactcgagtgtcattaatcacagctccgcacccttgggggcgcgtcattatttccgagctgccggtttatcatctgctcttaacgtgcttcgtgtggcggtccagggagaaggccaattaagatccatgccgaacaatactgctataatgatatcctttgcagcatgttttgctctgcgtgtaagcacggtggctgatggacgaggttcaaaaatagcgccaagcatacgagctctaataggtgaaactattgatgttctcgatcggataggttcaacacctgttcaaaggaaagggctttcttgtctattcgctgggcagcttaagcaaatcctcaaacttgcccttcgctcctcagaaaatgctcgattcccaccagaaacaatcagagccgccccagaacttacgccaccgtcgtatctcaattctgccgccccccgtatggcaactaatccgacgactttgcagcttcaagtgccttcagcaagcatgccttctgactacatgtcattttcaacgatgtctaacgatcaactaaacgaagccatcaataatacagatgcagggctcgatgctctgtgggatgatttccaattccaacaggtttcggaattggattggatggattggagtacattcgctcacaattaa

SEQ ID NO: 6339 - protein, 734 aa, Muscodor strobelii
  misc_feature: SGI Peptide ID NO. 561851
  misc_feature (11)..(727): NCBI GI: 115389066 Blast Desc: conserved [Aspergillus terreus NIH2624] gi|114194434|gb|EAU36134.1| conserved [Aspergillus terreus NIH2624]
  misc_feature (9)..(729): NCBI GI: 255938568 Blast Desc: Pc14g00600 [Penicillium chrysogenum Wisconsin 54-1255] gi|211584675|emb|CAP74201.1| Pc14g00600 [Penicillium chrysogenum Wisconsin 54-1255]
  misc_feature (17)..(728): NCBI GI: 261361098 Blast Desc: conserved [Verticillium albo-atrum VaMs.102]
  misc_feature (8)..(727): NCBI GI: 67904816 Blast Desc: AN9395.2 [Aspergillus nidulans FGSC A4] gi|40747306|gb|EAA66462.1| AN9395.2 [Aspergillus nidulans FGSC A4] gi|259488237|tpe|CBF87531.1| TPA: Zn(II)2Cys6 transcription
  misc_feature (9)..(727): NCBI GI: 145228323 Blast Desc: An01g00190 [Aspergillus niger] gi|134054556|emb|CAK36869.1| protein product [Aspergillus niger]
  misc_feature (33)..(728): NCBI GI: 256728632 Blast Desc: [Nectria haematococca mpVI 77-13-4]
  misc_feature (36)..(728): NCBI GI: 46110537 Blast Desc: FG02150.1 [Gibberella zeae PH-1]
  misc_feature (19)..(728): NCBI GI: 169598928 Blast Desc: SNOG_02274 [Phaeosphaeria nodorum SN15] gi|111069366|gb|EAT90486.1| SNOG_02274 [Phaeosphaeria nodorum SN15]
  misc_feature (133)..(731): NCBI GI: 154292494 Blast Desc: BC1G_14886 [Botryotinia fuckeliana B05.10] gi|150846083|gb|EDN21276.1| BC1G_14886 [Botryotinia fuckeliana B05.10]
  misc_feature (19)..(732): NCBI GI: 212546921 Blast Desc: conserved [Penicillium marneffei ATCC 18224] gi|210065134|gb|EEA19229.1| conserved [Penicillium marneffei ATCC 18224]
  misc_feature: Useful for introducing or modulating the production of volatile compounds
MAEVSPPVSHDEAKERNLECSAPQFHVGRHKGVKNKHSGLEKAVFQIEQALRRTRTNSGSEQINNTEQTTELRYLLERSRDLLSAERGQRRISLGAKRRRDETVTSPHNSSVSHSTPQSQSVESHTAESGSSKIEDDQLNLDDAENPLQLLARTSEFLSAIDHPLDSGTRRAHNKSLPNRRTVTNVDDDDDLQRFFGRIQPRLDVGEELDPIELGLITMSEAESMFAYFYDNLAHTRWGIDPVLHTVEFVRKRSAFLFTSIVAASALFSPSAEALHKRLSKHRQKLADLVMTQRYKSVEIVLAFMVNIPWISAGEHWADDETTTYISVASSIALDLYLNKIILPSAPGSLFSKDNIALSEQISSKRALNVDGFAHVEPTSEMGRRLLRRRERAWLSLFVLERGVCLARGRSYMLPNSLLVEHCDHWHLCDLADRWDGSIVSVAVLRRDLAKLIENLRVICDSFANGASEASVVERLKAEITIFFDRWYQTWPLQIGDREQFTLPPYVEILASHTRLSMYSSVINHSSAPLGARHYFRAAGLSSALNVLRVAVQGEGQLRSMPNNTAIMISFAACFALRVSTVADGRGSKIAPSIRALIGETIDVLDRIGSTPVQRKGLSCLFAGQLKQILKLALRSSENARFPPETIRAAPELTPPSYLNSAAPRMATNPTTLQLQVPSASMPSDYMSFSTMSNDQLNEAINNTDAGLDALWDDFQFQQVSELDWMDWSTFAHN

SEQ ID NO: 6340 - DNA, 2660 bp, Muscodor strobelii
  misc_feature: SGI EST ID NO. CUFF.15806.0
  misc_feature: Variant of the nucleotide sequence at SEQ ID NO 6338
cgattaggctcttgtttcaattgcaaaaagtctaaagtcaagtgtgtgcggacggatggggctgttgtttgcacacgttgttctcagcgcaacctcgagtgcagtgcgccccaattccacgttgggcgccataagggtgtaaagaacaaacactctggtctagagaaagctgtttttcaaatcgagcaagctttaaggaggacgcgcacaaactcaggatcagagcaaataaataataccgagcagacaaccgaactccgatacttgttagaaagaagtcgtgacctcctcagcgccgagcgtggccagaggcgtattagtttgggcgcaaagcgtcgtcgcgatgagacagtgacttcgccccataactcctctgtttctcacagtacacctcagtcgcaatcggtagaatcccatactgctgagtcaggatcttcgaaaatagaggatgaccaactaaacctggacgacgccgagaatccattacagctacttgcgcggacgtccgaatttttatccgcgatcgatcatcctttagattcgggtacgcgccgtgcacataacaagtcgctaccgaatagaaggacagtgacgaatgttgacgacgacgacgatctacagcgcttctttggtcggattcagccacgtctcgacgtaggagaagaacttgaccccattgagctcgggttgatcacaatgagcgaggcagaatccatgtttgcatatttttatgacaatctcgcccatacaagatgggggattgacccggttttacatacagttgagtttgttcgaaaacgttcggcgtttctctttacatctatcgtcgctgcatcagctcttttctcgccttcagcagaggctttacataaacggctatcaaaacaccgccaaaaactcgctgatcttgttatgacccaacgctacaaatcagttgaaattgttctcgctttcatggtgaacattccatggatatcagctggcgagcattgggccgacgatgaaactacaacgtacatctccgtggcgtcaagcattgcactggatctgtacttgaacaaaatcatactcccttcagccccgggctcgttgttttccaaggataacattgcattgtctgagcagatttcatcgaaacgcgctctcaatgttgatggctttgcccatgttgaaccaactagcgagatgggtcgaaggttgctacgaagaagagaacgagcatggctatctcttttcgttttggagagaggtgtctgtctcgcaaggggacgcagttatatgttgcctaactcacttcttgtggagcactgcgatcattggcacttgtgcgacctagcagatagatgggatggttcaattgtttccgtggcagtgctgaggcgagacttggcgaaactgattgaaaatctgcgagtaatatgtgacagctttgctaatggtgcaagtgaggcatcggttgtcgagagattgaaagctgaaattactatattcttcgatcgatggtatcagacttggcctttacagattggagatcgcgaacaattcacgcttcctccatacgtcgagattctcgcttcgcacacgcgcttatcgatgtactcgagtgtcattaatcacagctccgcacccttgggggcgcgtcattatttccgagctgccggtttatcatctgctcttaacgtgcttcgtgtggcggtccagggagaaggccaattaagatccatgccgaacaatactgctataatgatatcctttgcagcatgttttgctctgcgtgtaagcacggtggctgatggacgaggttcaaaaatagcgccaagcatacgagctctaataggtgaaactattgatgttctcgatcggataggttcaacacctgttcaaaggaaagggctttcttgtctattcgctgggcagcttaagcaaatcctcaaacttgcccttcgctcctcagaaaatgctcgattcccaccagaaacaatcagagccgccccagaacttacgccaccgtcgtatctcaattctgccgccccccgtatggcaactaatccgacgactttgcagcttcaagtgccttcagcaagcatgccttctgactacatgtcattttcaacgatgtctaacgatcaactaaacgaagccatcaataatacagatgcagggctcgatgctctgtgggatgatttccaattccaacaggtttcggaattggattggatggattggagtacattcgctcacaattaagtgttcatgcttcaacagtgctcttatgctttttggagaacgtggttaggataacgataatcgtcaagtgtatatagagcgaaggctcgggtttccatatgataagaatgctttcagtgcgaatgatacttgttgggaaaatcaacaaaaagttgatatacagtgagctttgctccactccctcggttgctgtagatctcggagcttatcacgcttatgtcgactgctgcatcgcgtgggagcatgcccaagccgagacttgaacacgaggtgacgcagtgtatgcatgcaatcctaccaaacaatatattgcgagtagaccatcattctcgcctcgcctgccgagctgcctcacctggcaaggcaagcgaattcagtggcttgaccagcgtacggcgtactgaaggcccttc

SEQ ID NO: 6341 - DNA, 2304 bp, Muscodor strobelii
  misc_feature: SGI cDNA ID NO. 561852
  misc_feature: Encodes the peptide sequence at SEQ ID NO 6342
atggccgaagtgtctcctcctgtatctcatgatgaggctaaagagcctcttcgcaaacgattaggctcttgtttcaattgcaaaaagtctaaagtcaagtgtgtgcggacggatggggctgttgtttgcacacgttgttctcagcgcaacctcgagtgcagtgcgccccaattccacgttgggcgccataagggtgtaaagaacaaacactctggtctagagaaagctgtttttcaaatcgagcaagctttaaggaggacgcgcacaaactcaggatcagagcaaataaataataccgagcagacaaccgaactccgatacttgttagaaagaagtcgtgacctcctcagcgccgagcgtggccagaggcgtattagtttgggcgcaaagcgtcgtcgcgatgagacagtgacttcgccccataactcctctgtttctcacagtacacctcagtcgcaatcggtagaatcccatactgctgagtcaggatcttcgaaaatagaggatgaccaactaaacctggacgacgccgagaatccattacagctacttgcgcggacgtccgaatttttatccgcgatcgatcatcctttagattcgggtacgcgccgtgcacataacaagtcgctaccgaatagaaggacagtgacgaatgttgacgacgacgacgatctacagcgcttctttggtcggattcagccacgtctcgacgtaggagaagaacttgaccccattgagctcgggttgatcacaatgagcgaggcagaatccatgtttgcatatttttatgacaatctcgcccatacaagatgggggattgacccggttttacatacagttgagtttgttcgaaaacgttcggcgtttctctttacatctatcgtcgctgcatcagctcttttctcgccttcagcagaggctttacataaacggctatcaaaacaccgccaaaaactcgctgatcttgttatgacccaacgctacaaatcagttgaaattgttctcgctttcatggtgaacattccatggatatcagctggcgagcattgggccgacgatgaaactacaacgtacatctccgtggcgtcaagcattgcactggatctgtacttgaacaaaatcatactcccttcagccccgggctcgttgttttccaaggataacattgcattgtctgagcagatttcatcgaaacgcgctctcaatgttgatggctttgcccatgttgaaccaactagcgagatgggtcgaaggttgctacgaagaagagaacgagcatggctatctcttttcgttttggagagaggtgtctgtctcgcaaggggacgcagttatatgttgcctaactcacttcttgtggagcactgcgatcattggcacttgtgcgacctagcagatagatgggatggttcaattgtttccgtggcagtgctgaggcgagacttggcgaaactgattgaaaatctgcgagtaatatgtgacagctttgctaatggtgcaagtgaggcatcggttgtcgagagattgaaagctgaaattactatattcttcgatcgatggtatcagacttggcctttacagattggagatcgcgaacaattcacgcttcctccatacgtcgagattctcgcttcgcacacgcgcttatcgatgtactcgagtgtcattaatcacagctccgcacccttgggggcgcgtcattatttccgagctgccggtttatcatctgctcttaacgtgcttcgtgtggcggtccagggagaaggccaattaagatccatgccgaacaatactgctataatgatatcctttgcagcatgttttgctctgcgtgtaagcacggtggctgatggacgaggttcaaaaatagcgccaagcatacgagctctaataggtgaaactattgatgttctcgatcggataggttcaacacctgttcaaaggaaagggctttcttgtctattcgctgggcagcttaagcaaatcctcaaacttgcccttcgctcctcagaaaatgctcgattcccaccagaaacaatcagagccgccccagaacttacgccaccgtcgtatctcaattctgccgccccccgtatggcaactaatccgacgactttgcagcttcaagtgccttcagcaagcatgccttctgactacatgtcattttcaacgatgtctaacgatcaactaaacgaagccatcaataatacagatgcagggctcgatgctctgtgggatgatttccaattccaacaggtttcggaattggattggatggattggagtacattcgctcacaattaa

SEQ ID NO: 6342 - protein, 767 aa, Muscodor strobelii
  misc_feature: SGI Peptide ID NO. 561852
  misc_feature (12)..(760): NCBI GI: 115389066 Blast Desc: conserved [Aspergillus terreus NIH2624] gi|114194434|gb|EAU36134.1| conserved [Aspergillus terreus NIH2624]
  misc_feature (22)..(762): NCBI GI: 255938568 Blast Desc: Pc14g00600 [Penicillium chrysogenum Wisconsin 54-1255] gi|211584675|emb|CAP74201.1| Pc14g00600 [Penicillium chrysogenum Wisconsin 54-1255]
  misc_feature (20)..(760): NCBI GI: 67904816 Blast Desc: AN9395.2 [Aspergillus nidulans FGSC A4] gi|40747306|gb|EAA66462.1| AN9395.2 [Aspergillus nidulans FGSC A4] gi|259488237|tpe|CBF87531.1| TPA: Zn(II)2Cys6 transcription
  misc_feature (20)..(760): NCBI GI: 145228323 Blast Desc: An01g00190 [Aspergillus niger] gi|134054556|emb|CAK36869.1| protein product [Aspergillus niger]
  misc_feature (22)..(761): NCBI GI: 169598928 Blast Desc: SNOG_02274 [Phaeosphaeria nodorum SN15] gi|111069366|gb|EAT90486.1| SNOG_02274 [Phaeosphaeria nodorum SN15]
  misc_feature (50)..(761): NCBI GI: 261361098 Blast Desc: conserved [Verticillium albo-atrum VaMs.102]
  misc_feature (66)..(761): NCBI GI: 256728632 Blast Desc: [Nectria haematococca mpVI 77-13-4]
  misc_feature (5)..(765): NCBI GI: 212546921 Blast Desc: conserved [Penicillium marneffei ATCC 18224] gi|210065134|gb|EEA19229.1| conserved [Penicillium marneffei ATCC 18224]
  misc_feature (57)..(761): NCBI GI: 46110537 Blast Desc: FG02150.1 [Gibberella zeae PH-1]
  misc_feature (166)..(764): NCBI GI: 154292494 Blast Desc: BC1G_14886 [Botryotinia fuckeliana B05.10] gi|150846083|gb|EDN21276.1| BC1G_14886 [Botryotinia fuckeliana B05.10]
MAEVSPPVSHDEAKEPLRKRLGSCFNCKKSKVKCVRTDGAVVCTRCSQRNLECSAPQFHVGRHKGVKNKHSGLEKAVFQIEQALRRTRTNSGSEQINNTEQTTELRYLLERSRDLLSAERGQRRISLGAKRRRDETVTSPHNSSVSHSTPQSQSVESHTAESGSSKIEDDQLNLDDAENPLQLLARTSEFLSAIDHPLDSGTRRAHNKSLPNRRTVTNVDDDDDLQRFFGRIQPRLDVGEELDPIELGLITMSEAESMFAYFYDNLAHTRWGIDPVLHTVEFVRKRSAFLFTSIVAASALFSPSAEALHKRLSKHRQKLADLVMTQRYKSVEIVLAFMVNIPWISAGEHWADDETTTYISVASSIALDLYLNKIILPSAPGSLFSKDNIALSEQISSKRALNVDGFAHVEPTSEMGRRLLRRRERAWLSLFVLERGVCLARGRSYMLPNSLLVEHCDHWHLCDLADRWDGSIVSVAVLRRDLAKLIENLRVICDSFANGASEASVVERLKAEITIFFDRWYQTWPLQIGDREQFTLPPYVEILASHTRLSMYSSVINHSSAPLGARHYFRAAGLSSALNVLRVAVQGEGQLRSMPNNTAIMISFAACFALRVSTVADGRGSKIAPSIRALIGETIDVLDRIGSTPVQRKGLSCLFAGQLKQILKLALRSSENARFPPETIRAAPELTPPSYLNSAAPRMATNPTTLQLQVPSASMPSDYMSFSTMSNDQLNEAINNTDAGLDALWDDFQFQQVSELDWMDWSTFAHN

SEQ ID NO: 6343 - DNA, 2660 bp, Muscodor strobelii; identical to SEQ ID NO: 6340
  misc_feature: SGI EST ID NO. CUFF.15806.0
  misc_feature: Variant of the nucleotide sequence at SEQ ID NO 6341

SEQ ID NO: 6344 - DNA, 351 bp, Muscodor strobelii
  misc_feature: SGI cDNA ID NO. 561853
  misc_feature: Encodes the peptide sequence at SEQ ID NO 6345
atgcgaagctacgcggagagccttgtccgtgcaggtcgcacggtggtagccatcttacactcttacggtggtcaggttggaaccaatgccttgtatgggcttgggacagaagctcgcaccaagcagggcctttccggtggcatttcacacctcctttacatgtctggatacgaagtccccgaaggcaatgccatgatggataaagtcatggagttcggccatatggatctcgtaccccttgctctcgactttgcagaagataatacctgcctcttccgcaagcccaaagaagacatgattcgttcggtggaatggaaggccatgtatcaagccaatgagcatgctgcctga

SEQ ID NO: 6345 - protein, 116 aa, Muscodor strobelii
  misc_feature: SGI Peptide ID NO. 561853
  misc_feature (1)..(116): NCBI GI: 212535352 Blast Desc: conserved [Penicillium marneffei ATCC 18224] gi|210070231|gb|EEA24321.1| conserved [Penicillium marneffei ATCC 18224]
  misc_feature (1)..(116): NCBI GI: 156066009 Blast Desc: SS1G_01015 [Sclerotinia sclerotiorum 1980] gi|154691874|gb|EDN91612.1| SS1G_01015 [Sclerotinia sclerotiorum 1980]
  misc_feature (1)..(116): NCBI GI: 238482035 Blast Desc: conserved [Aspergillus flavus NRRL3357] gi|220700306|gb|EED56644.1| conserved [Aspergillus flavus NRRL3357]
  misc_feature (1)..(116): NCBI GI: 169765482 Blast Desc: [Aspergillus oryzae RIB40] gi|83765067|dbj|BAE55210.1| protein product [Aspergillus oryzae]
  misc_feature (1)..(110): NCBI GI: 145247560 Blast Desc: An12g09780 [Aspergillus niger] gi|134080768|emb|CAL00882.1| protein product [Aspergillus niger]
  misc_feature (1)..(100): NCBI GI: 171684613 Blast Desc: protein product [Podospora anserina] gi|170942267|emb|CAP67919.1| protein product [Podospora anserina]
  misc_feature (1)..(100): NCBI GI: 189206207 Blast Desc: conserved [Pyrenophora tritici-repentis Pt-1C-BFP] gi|187975531|gb|EDU42157.1| conserved [Pyrenophora tritici-repentis Pt-1C-BFP]
  misc_feature (1)..(99): NCBI GI: 238485370 Blast Desc: conserved [Aspergillus flavus NRRL3357] gi|220698802|gb|EED55141.1| conserved [Aspergillus flavus NRRL3357]
  misc_feature (1)..(99): NCBI GI: 169772025 Blast Desc: [Aspergillus oryzae RIB40] gi|83768341|dbj|BAE58480.1| protein product [Aspergillus oryzae]
  misc_feature (1)..(114): NCBI GI: 145240765 Blast Desc: An08g09180 [Aspergillus niger] gi|134077553|emb|CAK96697.1| protein product [Aspergillus niger]
MRSYAESLVRAGRTVVAILHSYGGQVGTNALYGLGTEARTKQGLSGGISHLLYMSGYEVPEGNAMMDKVMEFGHMDLVPLALDFAEDNTCLFRKPKEDMIRSVEWKAMYQANEHAA

SEQ ID NO: 6346 - DNA, 762 bp, Muscodor strobelii
  misc_feature: SGI cDNA ID NO. 561854
  misc_feature: Encodes the peptide sequence at SEQ ID NO 6347
atgcatttaatccttacgggtgcaacgggcttggtgggatctggggtcctcgacgcaatgatcaagatgaaagacgttaccaaaatctccatactcagccgaaggccggttcaaatggcagaagatatcaaggaccctcgcgtcaacgtaattattcacaaagacttcgctacttacgaaccctcggtcttatctcagttgaaaggtgccaagggcgtagtctgggcgctaggtataagtcagacacaggtcggtaaagaagagtatataaagatcacgaaagactatgccattgcagcatctcaagctttccagggcctagcggccgagcatgaacccttcaactttgtctatgtctcaggacatggtgccaccatcgagcctggtcgtttttctgctatttacgcccgagtaaaaggcgaaacagagcttgcgctggcggaactacgcaaactgaatcctatgatgcgcctaatgtctgctcgtccatgtgccgttgatggcagcgagcatcctgctatcaaaccattcgttccaactcctccactacccataaaagtcctttcatatttcgcactagcacctatcaagtatcttatgcccggtcttcattccccgacagaggaattgggacgagttctgaccgaattggccatggggaaacatccgattacagcacccaccaaggatatttcgatggtcggcgagtttcccatactggagaatacagctctcagaagacttgccacgagtaattcttag

SEQ ID NO: 6347 - protein, 253 aa, Muscodor strobelii
  misc_feature: SGI Peptide ID NO. 561854
  misc_feature (1)..(249): NCBI GI: 70981720 Blast Desc: nucleoside-diphosphate-sugar epimerases [Aspergillus fumigatus Af293] gi|66844011|gb|EAL84351.1| nucleoside-diphosphate-sugar epimerases, [Aspergillus fumigatus
  misc_feature (1)..(249): NCBI GI: 119501643 Blast Desc: nucleoside-diphosphate-sugar epimerases, [Neosartorya fischeri NRRL 181] gi|119415744|gb|EAW25681.1| nucleoside-diphosphate-sugar epimerases, [Neosartorya fischeri
  misc_feature (1)..(248): NCBI GI: 121704503 Blast Desc: nucleoside-diphosphate-sugar epimerases, [Aspergillus clavatus NRRL 1] gi|119398660|gb|EAW09089.1| nucleoside-diphosphate-sugar epimerases, [Aspergillus clavatus 1]
  misc_feature (1)..(248): NCBI GI: 261359978 Blast Desc: conserved [Verticillium albo-atrum VaMs.102]
  misc_feature (1)..(248): NCBI GI: 256725975 Blast Desc: NECHADRAFT_43817 [Nectria haematococca mpVI 77-13-4]
  misc_feature (1)..(247): NCBI GI: 171676818 Blast Desc: protein product [Podospora anserina] gi|170936476|emb|CAP61133.1| protein product [Podospora anserina]
  misc_feature (1)..(249): NCBI GI: 256731939 Blast Desc: NECHADRAFT_40789 [Nectria haematococca mpVI 77-13-4]
  misc_feature (1)..(248): NCBI GI: 46128175 Blast Desc: FG08465.1 [Gibberella zeae PH-1]
  misc_feature (1)..(248): NCBI GI: 255938522 Blast Desc: Pc14g00360 [Penicillium chrysogenum Wisconsin 54-1255] gi|211584652|emb|CAP74177.1| Pc14g00360 [Penicillium chrysogenum Wisconsin 54-1255]
  misc_feature (1)..(249): NCBI GI: 261352580 Blast Desc: conserved [Verticillium albo-atrum VaMs.102]
MHLILTGATGLVGSGVLDAMIKMKDVTKISILSRRPVQMAEDIKDPRVNVIIHKDFATYEPSVLSQLKGAKGVVWALGISQTQVGKEEYIKITKDYAIAASQAFQGLAAEHEPFNFVYVSGHGATIEPGRFSAIYARVKGETELALAELRKLNPMMRLMSARPCAVDGSEHPAIKPFVPTPPLPIKVLSYFALAPIKYLMPGLHSPTEELGRVLTELAMGKHPITAPTKDISMVGEFPILENTALRRLATSNS

SEQ ID NO: 6348 - DNA, 1248 bp, Muscodor strobelii
  misc_feature: SGI EST ID NO. CUFF.15853.2
  misc_feature: Variant of the nucleotide sequence at SEQ ID NO 6346
caaggagcttcgaagagcctgttcaaatacatttatcatcatcttcctgttgctaatcagtcctggaagctcgtctctcttccatctttatagaattaaccactgcatcgtacatccgagcaaaattcaaggagtgtatcagcattcaagttcaatatgcatttaatccttacgggtgcaacgggcttggtgggatctggggtcctcgacgcaatgatcaagatgaaagacgttaccaaaatctccatactcagccgaaggccggttcaaatggcagaagatatcaaggaccctcgcgtcaacgtaattattcacaaagacttcgctacttacgaaccctcggtcttatctcagttgaaaggtgccaagggcgtagtctgggcgctaggtataagtcagacacaggtcggtaaagaagagtatataaagatcacgaaagactatgccattgcagcatctcaagctttccagggcctagcggccgagcatgaacccttcaactttgtctatgtctcaggacatggtgccaccatcgagcctggtcgtttttctgctatttacgcccgagtaaaaggcgaaacagagcttgcgctggcggaactacgcaaactgaatcctatgatgcgcctaatgtctgctcgtccatgtgccgttgatggcagcgagcatcctgctatcaaaccattcgttccaactcctccactacccataaaagtcctttcatatttcgcactagcacctatcaagtatcttatgcccggtcttcattccccgacagaggaattgggacgagttctgaccgaattggccatggggaaacatccgattacagcacccaccaaggatatttcgatggtcggcgagtttcccatactggagaatacagctctcagaagacttgccacgagtaattcttagtagaggtagctacgtatcggcttgtcccatgactagtgaggtcatagtacaccacagcaatcaacatgagacatgagattgtctccatgagtcgtgattagtggctcgaggatgtgtagatagaatatcatatcaatagtgtcatttcttttgtatgtatttatatctgttgagcgatcaaatactttcagcagaagcgccgcgccagataatgtattagtattagactcaagaactccctatataattcgtctgttcgacctgggctttgctgttgttaatactcgtatcgccaccgaggatctccatctccttcccagtccaagatct

SEQ ID NO: 6349 - DNA, 696 bp, Muscodor strobelii
  misc_feature: SGI cDNA ID NO. 561855
  misc_feature: Encodes the peptide sequence at SEQ ID NO 6350
atgaaagacgttaccaaaatctccatactcagccgaaggccggttcaaatggcagaagatatcaaggaccctcgcgtcaacgtaattattcacaaagacttcgctacttacgaaccctcggtcttatctcagttgaaaggtgccaagggcgtagtctgggcgctaggtataagtcagacacaggtcggtaaagaagagtatataaagatcacgaaagactatgccattgcagcatctcaagctttccagggcctagcggccgagcatgaacccttcaactttgtctatgtctcaggacatggtgccaccatcgagcctggtcgtttttctgctatttacgcccgagtaaaaggcgaaacagagcttgcgctggcggaactacgcaaactgaatcctatgatgcgcctaatgtctgctcgtccatgtgccgttgatggcagcgagcatcctgctatcaaaccattcgttccaactcctccactacccataaaagtcctttcatatttcgcactagcacctatcaagtatcttatgcccggtcttcattccccgacagaggaattgggacgagttctgaccgaattggccatggggaaacatccgattacagcacccaccaaggatatttcgatggtcggcgagtttcccatactggagaatacagctctcagaagacttgccacgagtaattcttag

SEQ ID NO: 6350 - protein, 231 aa, Muscodor strobelii
  misc_feature: SGI Peptide ID NO. 561855
  misc_feature (1)..(227): NCBI GI: 70981720 Blast Desc: nucleoside-diphosphate-sugar epimerases [Aspergillus fumigatus Af293] gi|66844011|gb|EAL84351.1| nucleoside-diphosphate-sugar epimerases, [Aspergillus fumigatus
  misc_feature (1)..(227): NCBI GI: 119501643 Blast Desc: nucleoside-diphosphate-sugar epimerases, [Neosartorya fischeri NRRL 181] gi|119415744|gb|EAW25681.1| nucleoside-diphosphate-sugar epimerases, [Neosartorya fischeri
  misc_feature (1)..(226): NCBI GI: 121704503 Blast Desc: nucleoside-diphosphate-sugar epimerases, [Aspergillus clavatus NRRL 1] gi|119398660|gb|EAW09089.1| nucleoside-diphosphate-sugar epimerases, [Aspergillus clavatus 1]
  misc_feature (1)..(226): NCBI GI: 261359978 Blast Desc: conserved [Verticillium albo-atrum VaMs.102]
  misc_feature (3)..(225): NCBI GI: 171676818 Blast Desc: protein product [Podospora anserina] gi|170936476|emb|CAP61133.1| protein product [Podospora anserina]
  misc_feature (2)..(226): NCBI GI: 256725975 Blast Desc: NECHADRAFT_43817 [Nectria haematococca mpVI 77-13-4]
  misc_feature (2)..(226): NCBI GI: 46128175 Blast Desc: FG08465.1 [Gibberella zeae PH-1]
  misc_feature (1)..(227): NCBI GI: 256731939 Blast Desc: NECHADRAFT_40789 [Nectria haematococca mpVI 77-13-4]
  misc_feature (4)..(226): NCBI GI: 255938522 Blast Desc: Pc14g00360 [Penicillium chrysogenum Wisconsin 54-1255] gi|211584652|emb|CAP74177.1| Pc14g00360 [Penicillium chrysogenum Wisconsin 54-1255]
  misc_feature (4)..(227): NCBI GI: 261352580 Blast Desc: conserved [Verticillium albo-atrum VaMs.102]
MKDVTKISILSRRPVQMAEDIKDPRVNVIIHKDFATYEPSVLSQLKGAKGVVWALGISQTQVGKEEYIKITKDYAIAASQAFQGLAAEHEPFNFVYVSGHGATIEPGRFSAIYARVKGETELALAELRKLNPMMRLMSARPCAVDGSEHPAIKPFVPTPPLPIKVLSYFALAPIKYLMPGLHSPTEELGRVLTELAMGKHPITAPTKDISMVGEFPILENTALRRLATSNS

SEQ ID NO: 6351 - DNA, 1248 bp, Muscodor strobelii; identical to SEQ ID NO: 6348
  misc_feature: SGI EST ID NO. CUFF.15853.2
  misc_feature: Variant of the nucleotide sequence at SEQ ID NO 6349

SEQ ID NO: 6352 - DNA, 1473 bp, Muscodor strobelii
  misc_feature: SGI cDNA ID NO. 561856
  misc_feature: Encodes the peptide sequence at SEQ ID NO 6353
atggcaattgaggagaaggagcctggcggtgtccttgaaccgactcgcgatggctccagttccgattctgagattgcagcatctgtcgatgaaaaggcgttattgaggaagattgatagacatttgttaccagcagttggaccgcagcaatggcaagttgaaccatctcaaaagcccttcgggagatacatggggactaattatgatgcagttggtaacgcgaaaatcgacggtctcctgactgatattaacatgactggggaccaatacctggacggcctaagtctctatttcgttggttatgtgttgttcgaagtaccttgcaatattattcttaaacgtaccagcccgagagtctggctaccgactttgactatcgcctgggtagtacagaatgcatctggattcctggccgcccgtttcttcctcggtgtcacggagtctggcttgtttcctggtgtttgtttctacttttctatgtggtacaagagaaaggaacgtcaatatcgcgttgctttattcttcagcgctgcatcgttggctggtgcattcggcggtgctctggcatatggaattgggaagctaggtggtgtcgtctggaaaaatggctggcattggatattcattctggagggcattgtgactgttgtcgtagctaccgcggcttacgcatttgtttataattacccagacacggcaaagttcctgaactccgatgagcgaaaattgattcaccaacgcttggcggccgatagcgatgcgacgcatgatgagaagttcagttggagcgctgtacgagacgctttgaaggatccgaaatgttggctttatggtctaggattccataccttgagcctacctctatataccttatcacttttcttgccaactatcattaccaacttgggattcgcagcagcaaccgctcagctattgactgtgccaccatacgcgttcgcgttcgggactacagtaggaatcgccgtcctatcggagcgaactggcaaacgtgccctcttcataggaggctcggccttgttcgcggctattggatatataatattacttagcaataccgaccctgttgcacgaccaggcgtcagttatgccggtgtgttcttcgcggcgggtggtatatatccagcagttgcattggttctctcgtggccgactatcaatgtctcaggtcagaccaagcgagcaactgccaatgcaatgcagattagtatcggaaatattggcgctgttattgggacgcaattgtaccgaagcaacgatggaccacgattcatccttggacattcatttgccttgggatatctcgttgcaaatgctattgtcgtggcgatattaggaatcgtgttgaagaaagagaataagcgacgagaacaaatagctgaagaggttaaagacgttggagagatcttggactgggaaggagatggagatcctcggtggcgatacgagtattaa

SEQ ID NO: 6353 - protein, 490 aa, Muscodor strobelii
  misc_feature: SGI Peptide ID NO. 561856
  misc_feature (62)..(419): Pfam Id: PF07690 Pfam Desc: Major Facilitator Superfamily
  misc_feature (64)..(419): Pfam Id: PF07690 Pfam Desc: Major Facilitator Superfamily
  misc_feature (13)..(490): NCBI GI: 171676438 Blast Desc: protein product [Podospora anserina] gi|170936285|emb|CAP60944.1| protein product [Podospora anserina]
  misc_feature (12)..(490): NCBI GI: 85074603 Blast Desc: NCU09678 [Neurospora crassa OR74A] gi|28922290|gb|EAA31532.1| conserved [Neurospora crassa OR74A] gi|28949974|emb|CAD70735.1| related to TARTRATE TRANSPORTER
  misc_feature (19)..(489): NCBI GI: 149211113 Blast Desc: MGCH7_ch7g1019 [Magnaporthe grisea 70-15] gi|86196974|gb|EAQ71612.1| MGCH7_ch7g1019 [Magnaporthe grisea 70-15]
  misc_feature (106)..(490): NCBI GI: 116200422 Blast Desc: CHGG_10756 [Chaetomium globosum CBS 148.51] gi|88175470|gb|EAQ82938.1| CHGG_10756 [Chaetomium globosum CBS 148.51]
  misc_feature (16)..(489): NCBI GI: 255956827 Blast Desc: Pc21g21950 [Penicillium chrysogenum Wisconsin 54-1255] gi|211590877|emb|CAP97092.1| Pc21g21950 [Penicillium chrysogenum Wisconsin 54-1255]
  misc_feature (3)..(489): NCBI GI: 115397251 Blast Desc: conserved [Aspergillus terreus NIH2624] gi|114192408|gb|EAU34108.1| conserved [Aspergillus terreus NIH2624]
  misc_feature (17)..(489): NCBI GI: 67517553 Blast Desc: AN0993.2 [Aspergillus nidulans FGSC A4] gi|40746405|gb|EAA65561.1| AN0993.2 [Aspergillus nidulans FGSC A4] gi|259488714|tpe|CBF88378.1| TPA: MFS transporter, nidulans
  misc_feature (14)..(489): NCBI GI: 189192815 Blast Desc: MFS transporter [Pyrenophora tritici-repentis Pt-1C-BFP] gi|187978310|gb|EDU44936.1| MFS transporter [Pyrenophora tritici-repentis Pt-1C-BFP]
  misc_feature (3)..(489): NCBI GI: 70992335 Blast Desc: MFS transporter [Aspergillus fumigatus Af293] gi|66848649|gb|EAL88978.1| MFS transporter, [Aspergillus fumigatus Af293] gi|159124586|gb|EDP49704.1| MFS transporter,
  misc_feature (7)..(489): NCBI GI: 169773113 Blast Desc: [Aspergillus oryzae RIB40] gi|83768886|dbj|BAE59023.1| protein product [Aspergillus oryzae]
MAIEEKEPGGVLEPTRDGSSSDSEIAASVDEKALLRKIDRHLLPAVGPQQWQVEPSQKPFGRYMGTNYDAVGNAKIDGLLTDINMTGDQYLDGLSLYFVGYVLFEVPCNIILKRTSPRVWLPTLTIAWVVQNASGFLAARFFLGVTESGLFPGVCFYFSMWYKRKERQYRVALFFSAASLAGAFGGALAYGIGKLGGVVWKNGWHWIFILEGIVTVVVATAAYAFVYNYPDTAKFLNSDERKLIHQRLAADSDATHDEKFSWSAVRDALKDPKCWLYGLGFHTLSLPLYTLSLFLPTIITNLGFAAATAQLLTVPPYAFAFGTTVGIAVLSERTGKRALFIGGSALFAAIGYIILLSNTDPVARPGVSYAGVFFAAGGIYPAVALVLSWPTINVSGQTKRATANAMQISIGNIGAVIGTQLYRSNDGPRFILGHSFALGYLVANAIVVAILGIVLKKENKRREQIAEEVKDVGEILDWEGDGDPRWRYEY

SEQ ID NO: 6354 - DNA, 502 bp, Muscodor strobelii
  misc_feature: SGI EST ID NO. CUFF.15842.0
  misc_feature: Variant of the nucleotide sequence at SEQ ID NO 6352
ttacgcatttgtttataattacccagacacggcaaagttcctgaactccgatgagcgaaaattgattcaccaacgcttggcggccgatagcgatgcgacgcatgatgagaagttcagttggagcgctgtacgagacgctttgaaggatccgaaatgttggctttatggtctaggattccataccttgagcctacctctatataccttatcacttttcttgccaactatcattaccaacttgggattcgcagcagcaaccgctcagctattgactgtgccaccatacgcgttcgcgttcgggactacagtaggaatcgccgtcctatcggagcgaactggcaaacgtgccctcttcataggaggctcggccttgttcgcggctattggatatataatattacttagcaataccgaccctgttgcacgaccaggcgtcagttatgccggtgtgttcttcgcggcgggtggtatatatccagcagttgcattggttctctcgtgg

SEQ ID NO: 6355 - DNA, 2724 bp, Muscodor strobelii
  misc_feature: SGI cDNA ID NO. 561857
  misc_feature: Elevated expression when VOC is produced
  misc_feature: Encodes the peptide sequence at SEQ ID NO 6356
atgacggctagcgtccatcgcatcggattcacgcagctctcccgtgatcacattccacagcggggcttgccaacggttaacatcattttcattcatgggttgaggggtcacccccagacgacatgggagtgtagccgaacggaggcgaaggcagaggcgaatagtacgagcgacagaatacggagcagccgcaacgtcttcaaggcactcttacgccctaaacatgttgaatcgagtgccgcgcccggcgacaggaacatccccaagaccacgccgaactctgcgagagagcataatgtattctggcctcgagattacctcctcgaagacgtgcctgaggcccaagtgtggacgaacgggtacaatgcggatgtcattggcggcctctttcaagccaataatcagaacagcgtctcgcaacatggcagagatctggctgtcaagttagagcgggaaattgagaacgaaatgccaatcatgtttgttgctcatagcttggggggcattattgtcaaagatgcaatccgtcgatctgagatatgccggtcgagaacaaagctgatcatcttcctcggcacgccccatcgaggcagctcgtacgccggatggggggccatcgcatcgaatcttgctgctcttgctttccaggactcaaccaaacgaatcgttcaagcacttgaggtgaacagcgaggtacttgacaacatccacgacgagttcctacgcgtggcaggaagcggcaactttttgatacattcttttcaagaaggaaaggggttatcgggggtcaaagggctaaagggcaaagtagctgatgattattcctcgaaagctggtctcccgccatcgtttgaaacagtggagagtatcgatgcgaatcatatggaaatggcaaggagccgaagcaaggctgacccgcaataccgcgctgtcgtaggagtgcttatgaagtttatgcgtcatagaactcccagtggtgatgatagcagaaatcagaagtcagcctcggctgctcagatagaatcgacaaggggggaggaaacacagggaatcattagccaggcgcgccactacatccctctaccaaagaatgactggttcacgggacgaaaaagtgtattggaagatgtccaagggagattattcgtcgagaatggatgtcatagactcgcactcgtgggcctaggcggcgtgggtaagacccaggtcgctcttgcgatcgcgtactgggtgaagagcaagctgcccgactactccgttttctgggtgccggcattgagcgataataccttcgagcaagcctacacagagattgccaggcggcttggcatccaggtcgacaacaacaaaggtataaaagagtctattattttcggccccgacggttctggcggtatagatgtgcatcttccttataacgataacggttcgattctgttcactacgcgatcgcgtgatgtggcggtagccgtggcaaacagcgacgtggtagtcttgcaagagatggatcaagaggaagcgaccgcattcttcgagaagtctttaatcaataaacagctagttcatgataaagccacggtaaaggagcttcttggcgagcttacaactcttcccctagcaatcacacaagccgccgcatatctcaatcggaatcagatctcgattccagactacctgtcgctgttgaagagcacgtcgcaggatctagtcagtctgctaagtcgagaatttcacgataacacacgatatcgagggtcatataacgccgttgcgacgacatggcttgtttcattcgagcagatccgcagagatgacgccactgcggcagagttgctctcttttctatcgtgcatcgagtcgaaggctatacctcggtcgatattaccccatcctaaaacacgagaggaaatgcaacacgcgatcgggttgctttgcggatatgcttttctagtccgacgaggagatgaagacatatatgacatgcatcgcttagtccacatagctatacggatatgggtacagaaacataatgctgtctacaagacagagagtaaggctattcaacacctggcatctattttcccatctgatgatagagagaaccgtttgctgtggagagaatatatgccgcatgccttgtatgctcttcaaatatgcaaacagtatgacgatacaaaaaggtcttatctctactaccacgtgggatgttgcttaagacaggatcgacgatttgaagaagctgttcaagctttagaagagacgtaccgatgggcgaagcagtgttttcaacaaaagcaccgctctcgactggcatcagagcacgaactcgcgagggcctacctcgatgcccggcggatcaaagaggccatcaaaatattagagcacgtcgtagctgtacaggcgacgctagcggaagaggatgacaatcgactggcatcggagcacgcactcgcgcttgcctatctttcagacggacggattaaagaggccatcgaaatattagagcacgtcgtagctgtacagaagaccacgctagcggaaaaggacaacaatcgattggcgtcggagcatacacttgcgagcgcctatctttcaaacggacggatcacggaggccatcggaatattagaacatgttgtagctgttgaggctgcattggatacgagcgatgaagacaaaactaaatcgcgagaggtgctacaaatggcgtacaatatgcgctag

SEQ ID NO: 6356 - protein, 907 aa, Muscodor strobelii
  misc_feature: SGI Peptide ID NO. 561857
  misc_feature (381)..(905): NCBI GI: 170940153 Blast Desc: protein product [Podospora anserina]
  misc_feature (345)..(903): NCBI GI: 46118594 Blast Desc: FG04718.1 [Gibberella zeae PH-1]
  misc_feature (390)..(852): NCBI GI: 46130712 Blast Desc: FG08959.1 [Gibberella zeae PH-1]
  misc_feature (364)..(877): NCBI GI: 256722701 Blast Desc: NECHADRAFT_53204 [Nectria haematococca mpVI 77-13-4]
  misc_feature (355)..(872): NCBI GI: 156034877 Blast Desc: SS1G_13374 [Sclerotinia sclerotiorum 1980] gi|154698777|gb|EDN98515.1| SS1G_13374 [Sclerotinia sclerotiorum 1980]
  misc_feature (390)..(798): NCBI GI: 256730127 Blast Desc: NECHADRAFT_45218 [Nectria haematococca mpVI 77-13-4]
  misc_feature (353)..(880): NCBI GI: 75858936 Blast Desc: AN9426.2 [Aspergillus nidulans FGSC A4] gi|40747678|gb|EAA66834.1| AN9426.2 [Aspergillus nidulans FGSC A4] gi|259486647|tpe|CBF84668.1| TPA: conserved [Aspergillus FGSC
  misc_feature (353)..(900): NCBI GI: 242791898 Blast Desc: kinesin light chain, [Talaromyces stipitatus ATCC 10500] gi|218718436|gb|EED17856.1| kinesin light chain, [Talaromyces stipitatus ATCC 10500]
  misc_feature (111)..(872): NCBI GI: 171693841 Blast Desc: protein product [Podospora anserina] gi|170946869|emb|CAP73673.1| protein product [Podospora anserina]
  misc_feature (359)..(872): NCBI GI: 212539918 Blast Desc: kinesin, [Penicillium marneffei ATCC 18224] gi|210067413|gb|EEA21505.1| kinesin, [Penicillium marneffei ATCC 18224]
  misc_feature: Useful for introducing or modulating the production of volatile compounds
MTASVHRIGFTQLSRDHIPQRGLPTVNIIFIHGLRGHPQTTWECSRTEAKAEANSTSDRIRSSRNVFKALLRPKHVESSAAPGDRNIPKTTPNSAREHNVFWPRDYLLEDVPEAQVWTNGYNADVIGGLFQANNQNSVSQHGRDLAVKLEREIENEMPIMFVAHSLGGIIVKDAIRRSEICRSRTKLIIFLGTPHRGSSYAGWGAIASNLAALAFQDSTKRIVQALEVNSEVLDNIHDEFLRVAGSGNFLIHSFQEGKGLSGVKGLKGKVADDYSSKAGLPPSFETVESIDANHMEMARSRSKADPQYRAVVGVLMKFMRHRTPSGDDSRNQKSASAAQIESTRGEETQGIISQARHYIPLPKNDWFTGRKSVLEDVQGRLFVENGCHRLALVGLGGVGKTQVALAIAYWVKSKLPDYSVFWVPALSDNTFEQAYTEIARRLGIQVDNNKGIKESIIFGPDGSGGIDVHLPYNDNGSILFTTRSRDVAVAVANSDVVVLQEMDQEEATAFFEKSLINKQLVHDKATVKELLGELTTLPLAITQAAAYLNRNQISIPDYLSLLKSTSQDLVSLLSREFHDNTRYRGSYNAVATTWLVSFEQIRRDDATAAELLSFLSCIESKAIPRSILPHPKTREEMQHAIGLLCGYAFLVRRGDEDIYDMHRLVHIAIRIWVQKHNAVYKTESKAIQHLASIFPSDDRENRLLWREYMPHALYALQICKQYDDTKRSYLYYHVGCCLRQDRRFEEAVQALEETYRWAKQCFQQKHRSRLASEHELARAYLDARRIKEAIKILEHVVAVQATLAEEDDNRLASEHALALAYLSDGRIKEAIEILEHVVAVQKTTLAEKDNNRLASEHTLASAYLSNGRITEAIGILEHVVAVEAALDTSDEDKTKSREVLQMAYNMR

SEQ ID NO: 6357 - DNA, 3213 bp, Muscodor strobelii
  misc_feature: SGI EST ID NO. CUFF.15865.1
  misc_feature: Variant of the nucleotide sequence at SEQ ID NO 6355
cgcggattacagtaccaacagcagacctataaatagcctgcatcaacaggaagaagtatcacgtgattgagagagctgacaagagctgaatcatgatgatcagttgcagactgccgcgtcacctcgcacgaaactataattcctataattcaatgacggtcgatatcctacgatacaccgggccagtccgtcgtgtcctagtaagggcccgtcagcccccgtcatcccgtcatgacggctagcgtccatcgcatcggattcacgcagctctcccgtgatcacattccacagcggggcttgccaacggttaacatcattttcattcatgggttgaggggtcacccccagacgacatgggagtgtagccgaacggaggcgaaggcagaggcgaatagtacgagcgacagaatacggagcagccgcaacgtcttcaaggcactcttacgccctaaacatgttgaatcgagtgccgcgcccggcgacaggaacatccccaagaccacgccgaactctgcgagagagcataatgtattctggcctcgagattacctcctcgaagacgtgcctgaggcccaagtgtggacgaacgggtacaatgcggatgtcattggcggcctctttcaagccaataatcagaacagcgtctcgcaacatggcagagatctggctgtcaagttagagcgggaaattgagaacgaaatgccaatcatgtttgttgctcatagcttggggggcattattgtcaaagatgcaatccgtcgatctgagatatgccggtcgagaacaaagctgatcatcttcctcggcacgccccatcgaggcagctcgtacgccggatggggggccatcgcatcgaatcttgctgctcttgctttccaggactcaaccaaacgaatcgttcaagcacttgaggtgaacagcgaggtacttgacaacatccacgacgagttcctacgcgtggcaggaagcggcaactttttgatacattcttttcaagaaggaaaggggttatcgggggtcaaagggctaaagggcaaagtagctgatgattattcctcgaaagctggtctcccgccatcgtttgaaacagtggagagtatcgatgcgaatcatatggaaatggcaaggagccgaagcaaggctgacccgcaataccgcgctgtcgtaggagtgcttatgaagtttatgcgtcatagaactcccagtggtgatgatagcagaaatcagaagtcagcctcggctgctcagatagaatcgacaaggggggaggaaacacagggaatcagttagtgtcgtattgttgtttcaagcgactacaaacaattgctcatattgatccaagttagccaggcgcgccactacatccctctaccaaagaatgactggttcacgggacgaaaaagtgtattggaagatgtccaagggagattattcgtcgagaatggatgtcatagactcgcactcgtgggcctaggcggcgtgggtaagacccaggtcgctcttgcgatcgcgtactgggtgaagagcaagctgcccgactactccgttttctgggtgccggcattgagcgataataccttcgagcaagcctacacagagattgccaggcggcttggcatccaggtcgacaacaacaaaggtataaaagagtctgtgcgactatacctagagtcagacacagcggggaaatagcttttgatcgtggataacgctgacgacagggagattattttcggccccgacggttctggcggtatagatgtgcatcttccttataacgataacggttcgattctgttcactacgcgatcgcgtgatgtggcggtagccgtggcaaacagcgacgtggtagtcttgcaagagatggatcaagaggaagcgaccgcattcttcgagaagtctttaatcaataaacagctagttcatgataaagccacggtaaaggagcttcttggcgagcttacaactcttcccctagcaatcacacaagccgccgcatatctcaatcggaatcagatctcgattccagactacctgtcgctgttgaagagcacgtcgcaggatctagtcagtctgctaagtcgagaatttcacgataacacacgatatcgagggtcatataacgccgttgcgacgacatggcttgtttcattcgagcagatccgcagagatgacgccactgcggcagagttgctctcttttctatcgtgcatcgagtcgaaggctatacctcggtcgatattaccccatcctaaaacacgagaggaaatgcaacacgcgatcgggttgctttgcggatatgcttttctagtccgacgaggagatgaagacatatatgacatgcatcgcttagtccacatagctatacggatatgggtacagaaacataatgctgtctacaagacagagagtaaggctattcaacacctggcatctattttcccatctgatgatagagagaaccgtttgctgtggagagaatatatgccgcatgccttgtatgctcttcaaatatgcaaacagtatgacgatacaaaaaggtcttatctctactaccacgtgggatgttgcttaagacaggatcgacgatttgaagaagctgttcaagctttagaagagacgtaccgatgggcgaagcagtgttttcaacaaaagcaccgctctcgactggcatcagagcacgaactcgcgagggcctacctcgatgcccggcggatcaaagaggccatcaaaatattagagcacgtcgtagctgtacaggcgacgctagcggaagaggatgacaatcgactggcatcggagcacgcactcgcgcttgcctatctttcagacggacggattaaagaggccatcgaaatattagagcacgtcgtagctgtacagaagaccacgctagcggaaaaggacaacaatcgattggcgtcggagcatacacttgcgagcgcctatctttcaaacggacggatcacggaggccatcggaatattagaacatgttgtagctgttgaggctgcattggatacgagcgatgaagacaaaactaaatcgcgagaggtgctacaaatggcgtacaatatgcgctagctcatatgagccatgttgaatcgggttggaattattatatgttttgggccacttccgtgatcttgagtatctgtacgtatagatctatttaggtttataattcctatttctctatataatactcctcgt

SEQ ID NO: 6358 - DNA, 2094 bp, Muscodor strobelii
  misc_feature: SGI cDNA ID NO. 561858
  misc_feature: Encodes the peptide sequence at SEQ ID NO 6359
atgacggctagcgtccatcgcatcggattcacgcagctctcccgtgatcacattccacagcggggcttgccaacggttaacatcattttcattcatgggttgaggggtcacccccagacgacatgggagtgtagccgaacggaggcgaaggcagaggcgaatagtacgagcgacagaatacggagcagccgcaacgtcttcaaggcactcttacgccctaaacatgttgaatcgagtgccgcgcccggcgacaggaacatccccaagaccacgccgaactctgcgagagagcataatgtattctggcctcgagattacctcctcgaagacgtgcctgaggcccaagtgtggacgaacgggtacaatgcggatgtcattggcggcctctttcaagccaataatcagaacagcgtctcgcaacatggcagagatctggctgtcaagttagagcgggaaattgagaacgaaatgccaatcatgtttgttgctcatagcttggggggcattattgtcaaagatgcaatccgtcgatctgagatatgccggtcgagaacaaagctgatcatcttcctcggcacgccccatcgaggcagctcgtacgccggatggggggccatcgcatcgaatcttgctgctcttgctttccaggactcaaccaaacgaatcgttcaagcacttgaggtgaacagcgaggtacttgacaacatccacgacgagttcctacgcgtggcaggaagcggcaactttttgatacattcttttcaagaaggaaaggggttatcgggggtcaaagggctaaagggcaaagtagctgatgattattcctcgaaagctggtctcccgccatcgtttgaaacagtggagagtatcgatgcgaatcatatggaaatggcaaggagccgaagcaaggctgacccgcaataccgcgctgtcgtaggagtgcttatgaagtttatgcgtcatagaactcccagtggtgatgatagcagaaatcagaagtcagcctcggctgctcagatagaatcgacaaggggggaggaaacacagggaatcattagccaggcgcgccactacatccctctaccaaagaatgactggttcacgggacgaaaaagtgtattggaagatgtccaagggagattattcgtcgagaatggatgtcatagactcgcactcgtgggcctaggcggcgtgggtaagacccaggtcgctcttgcgatcgcgtactgggtgaagagcaagctgcccgactactccgttttctgggtgccggcattgagcgataataccttcgagcaagcctacacagagattgccaggcggcttggcatccaggtcgacaacaacaaagccgtggcaaacagcgacgtggtagtcttgcaagagatggatcaagaggaagcgaccgcattcttcgagaagtctttaatcaataaacagctagttcatgataaagccacggtaaaggagcttcttggcgagcttacaactcttcccctagcaatcacacaagccgccgcatatctcaatcggaatcagatctcgattccagactacctgtcgctgttgaagagcacgtcgcaggatctagatcgacgatttgaagaagctgttcaagctttagaagagacgtaccgatgggcgaagcagtgttttcaacaaaagcaccgctctcgactggcatcagagcacgaactcgcgagggcctacctcgatgcccggcggatcaaagaggccatcaaaatattagagcacgtcgtagctgtacaggcgacgctagcggaagaggatgacaatcgactggcatcggagcacgcactcgcgcttgcctatctttcagacggacggattaaagaggccatcgaaatattagagcacgtcgtagctgtacagaagaccacgctagcggaaaaggacaacaatcgattggcgtcggagcatacacttgcgagcgcctatctttcaaacggacggatcacggaggccatcggaatattagaacatgttgtagctgttgaggctgcattggatacgagcgatgaagacaaaactaaatcgcgagaggtgctacaaatggcgtacaatatgcgctag

SEQ ID NO: 6359 - protein, 697 aa, Muscodor strobelii
  misc_feature: SGI Peptide ID NO. 561858
  misc_feature (5)..(321): NCBI GI: 156060563 Blast Desc: SS1G_02421 [Sclerotinia sclerotiorum 1980] gi|154699828|gb|EDN99566.1| SS1G_02421 [Sclerotinia sclerotiorum 1980]
  misc_feature (5)..(315): NCBI GI: 156051524 Blast Desc: SS1G_07169 [Sclerotinia sclerotiorum 1980] gi|154704947|gb|EDO04686.1| SS1G_07169 [Sclerotinia sclerotiorum 1980]
  misc_feature (23)..(270): NCBI GI: 170940152 Blast Desc: protein product [Podospora anserina]
  misc_feature (27)..(313): NCBI GI: 116197903 Blast Desc: CHGG_07107 [Chaetomium globosum CBS 148.51] gi|88178386|gb|EAQ85854.1| CHGG_07107 [Chaetomium globosum CBS 148.51]
  misc_feature (26)..(444): NCBI GI: 256729456 Blast Desc: NECHADRAFT_47331 [Nectria haematococca mpVI 77-13-4]
  misc_feature (19)..(315): NCBI GI: 256722577 Blast Desc: NECHADRAFT_96544 [Nectria haematococca mpVI 77-13-4]
  misc_feature (12)..(365): NCBI GI: 46117406 Blast Desc: FG04545.1 [Gibberella zeae PH-1]
  misc_feature (27)..(311): NCBI GI: 116204449 Blast Desc: CHGG_10108 [Chaetomium globosum CBS 148.51] gi|88176236|gb|EAQ83704.1| CHGG_10108 [Chaetomium globosum CBS 148.51]
  misc_feature (531)..(693): NCBI GI: 46118594 Blast Desc: FG04718.1 [Gibberella zeae PH-1]
  misc_feature (533)..(695): NCBI GI: 170940154 Blast Desc: protein product [Podospora anserina]
MTASVHRIGFTQLSRDHIPQRGLPTVNIIFIHGLRGHPQTTWECSRTEAKAEANSTSDRIRSSRNVFKALLRPKHVESSAAPGDRNIPKTTPNSAREHNVFWPRDYLLEDVPEAQVWTNGYNADVIGGLFQANNQNSVSQHGRDLAVKLEREIENEMPIMFVAHSLGGIIVKDAIRRSEICRSRTKLIIFLGTPHRGSSYAGWGAIASNLAALAFQDSTKRIVQALEVNSEVLDNIHDEFLRVAGSGNFLIHSFQEGKGLSGVKGLKGKVADDYSSKAGLPPSFETVESIDANHMEMARSRSKADPQYRAVVGVLMKFMRHRTPSGDDSRNQKSASAAQIESTRGEETQGIISQARHYIPLPKNDWFTGRKSVLEDVQGRLFVENGCHRLALVGLGGVGKTQVALAIAYWVKSKLPDYSVFWVPALSDNTFEQAYTEIARRLGIQVDNNKAVANSDVVVLQEMDQEEATAFFEKSLINKQLVHDKATVKELLGELTTLPLAITQAAAYLNRNQISIPDYLSLLKSTSQDLDRRFEEAVQALEETYRWAKQCFQQKHRSRLASEHELARAYLDARRIKEAIKILEHVVAVQATLAEEDDNRLASEHALALAYLSDGRIKEAIEILEHVVAVQKTTLAEKDNNRLASEHTLASAYLSNGRITEAIGILEHVVAVEAALDTSDEDKTKSREVLQMAYNMR

SEQ ID NO: 6360 - DNA, 3213 bp, Muscodor strobelii; identical to SEQ ID NO: 6357
  misc_feature: SGI EST ID NO. CUFF.15865.1
  misc_feature: Variant of the nucleotide sequence at SEQ ID NO 6358

SEQ ID NO: 6361 - DNA, 1323 bp, Muscodor strobelii
  misc_feature: SGI cDNA ID NO. 561860
  misc_feature: Encodes the peptide sequence at SEQ ID NO 6362
atgcctctccagattccccatccctcgacaacactgcacctctaccgccatatgcttcgagaggcatcctatctgcccaacctctgccgccggtacatcacgaaccgtatcaaactccgaaccagacactgccgctatgcaagagatcccgtgccctacgtcaaatccgcacacgcctctcttcgctttcttcgctccgccaatgccggcaacacggacagactccatcgtctatttctcatggccactggccgtgtgggtagacgatgtcgcgtattgtctaaagtcggtctcgccgctcctcccccatccactggccctgaattggaagctcagcgtgtgcttttcaagaagcgcggacctgactggcttgacggctggtctgtccccatgatcaaagctctggccaagtctcagatcaacaatcagaaaccacgttggcccaaggtcatgcgcagaacgctggatccggagccgatgcttgccgttggtaatgcctttcagcggcctttcatcgctgtgactgttcggaacaagacgaagaaacactggaggagcgttcttgagcagatcttgcccccattaccccaggaagaatgggaccaccttggccgtctagccaagggcaagactcatatagaccagctaagactgcctgccaggcgacctgttgcccaaactatccaacctgaagctgcggaatcagcagatgccctctgggactggtctctccacgctatgaagccttcccgcgtcgttgagagagccaatagtcgcccaatgaagagtctaaccggcatggaagaccaagatcctaggggccatgggcgtcccattggtgtgagactcgtgactccaaggaaacttcaacgcatgtacggccgcatttgggaaatgacccccgtcgtcgaccaagttgatgagcgcaagattatcaagtggggtaaaatcgatcggctattgacaaccgcgtcgactagtgatatgcaattctttagtggtgtcactgcgaaaggaagattacttaagaaaaccgaagtgatcccatccggaccaccccgatcttggccaaacacatccgtgtcgaacatacctgaatcaggcccacccaggttaaagctgttcaagtcaaaggtatccgagccagagccacgtgaggtcaaagtgtccttgtcaagcccatctgagtcgggaccatcgtggagcgacgcaaactcgtcattcgaacgattcttttctggcgttcgcgcctcggaaaggaagaagccaaagggaaaatacaagtcaagactgtcagcggactatggacctgcatcgttttga

SEQ ID NO: 6362 - protein, 440 aa, Muscodor strobelii
  misc_feature: SGI Peptide ID NO. 561860
  misc_feature (2)..(346): NCBI GI: 171676664 Blast Desc: protein product [Podospora anserina] gi|170936399|emb|CAP61056.1| protein product [Podospora anserina]
  misc_feature (13)..(344): NCBI GI: 85109543 Blast Desc: NCU07588 [Neurospora crassa OR74A] gi|28924614|gb|EAA33732.1| [Neurospora crassa OR74A]
  misc_feature (1)..(344): NCBI GI: 39964654 Blast Desc: MGG_09868 [Magnaporthe grisea 70-15] gi|145011174|gb|EDJ95830.1| MGG_09868 [Magnaporthe grisea 70-15]
  misc_feature (2)..(226): NCBI GI: 116197262 Blast Desc: CHGG_05229 [Chaetomium globosum CBS 148.51] gi|88181142|gb|EAQ88610.1| CHGG_05229 [Chaetomium globosum CBS 148.51]
  misc_feature (13)..(346): NCBI GI: 46116754 Blast Desc: FG04219.1 [Gibberella zeae PH-1]
  misc_feature (1)..(315): NCBI GI: 261360015 Blast Desc: conserved [Verticillium albo-atrum VaMs.102]
  misc_feature (12)..(347): NCBI GI: 256725589 Blast Desc: NECHADRAFT_43370 [Nectria haematococca mpVI 77-13-4]
  misc_feature (12)..(343): NCBI GI: 189198563 Blast Desc: conserved [Pyrenophora tritici-repentis Pt-1C-BFP] gi|187981567|gb|EDU48193.1| conserved [Pyrenophora tritici-repentis Pt-1C-BFP]
  misc_feature (9)..(374): NCBI GI: 169605561 Blast Desc: SNOG_05806 [Phaeosphaeria nodorum SN15] gi|111065750|gb|EAT86870.1| SNOG_05806 [Phaeosphaeria nodorum SN15]
  misc_feature (2)..(343): NCBI GI: 226280146 Blast Desc: conserved [Paracoccidioides brasiliensis Pb01]
MPLQIPHPSTTLHLYRHMLREASYLPNLCRRYITNRIKLRTRHCRYARDPVPYVKSAHASLRFLRSANAGNTDRLHRLFLMATGRVGRRCRVLSKVGLAAPPPSTGPELEAQRVLFKKRGPDWLDGWSVPMIKALAKSQINNQKPRWPKVMRRTLDPEPMLAVGNAFQRPFIAVTVRNKTKKHWRSVLEQILPPLPQEEWDHLGRLAKGKTHIDQLRLPARRPVAQTIQPEAAESADALWDWSLHAMKPSRVVERANSRPMKSLTGMEDQDPRGHGRPIGVRLVTPRKLQRMYGRIWEMTPVVDQVDERKIIKWGKIDRLLTTASTSDMQFFSGVTAKGRLLKKTEVIPSGPPRSWPNTSVSNIPESGPPRLKLFKSKVSEPEPREVKVSLSSPSESGPSWSDANSSFERFFSGVRASERKKPKGKYKSRLSADYGPASF

SEQ ID NO: 6363 - DNA, 2568 bp, Muscodor strobelii
  misc_feature: SGI EST ID NO. CUFF.15952.0
  misc_feature: Variant of the nucleotide sequence at SEQ ID NO 6361
ccaaaattgcgttagagtgaagatagagatgatgaaactgttcaagacctagccttcagcattggcgactgcctcgaaacccaattagctatctgccagtattgcctgatcgcaccttgtacttggttgtccactgccacatacccgttgttgcactagcatccttgtgatagtcctttcctttggtttttttcgcctcaaatatcagcaaccatgccatcaacaggtagtatagctacctaaattctacgtgaattcataatgcctctccagattccccatccctcgacaacactgcacctctaccgccatatgcttcgagaggcatcctatctgcccaacctctgccgccggtacatcacgaaccgtatcaaactccgaaccagacactgccgctatgcaagagatcccgtgccctacgtcaaatccgcacacgcctctcttcgctttcttcgctccgccaatgccggcaacacggacagactccatcgtctatttctcatggccactggccgtgtgggtagacgatgtcgcgtattgtctaaagtcggtctcgccgctcctcccccatccactggccctgaattggaagctcagcgtgtgcttttcaagaagcgcggacctgactggcttgacggctggtctgtccccatgatcaaagctctggccaagtctcagatcaacaatcagaaaccacgttggcccaaggtcatgcgcagaacgctggatccggagccgatgcttgccgttggtaatgcctttcagcggcctttcatcgctgtgactgttcggaacaagacgaagaaacactggaggagcgttcttgagcagatcttgcccccattaccccaggaagaatgggaccaccttggccgtctagccaagggcaagactcatatagaccagctaagactgcctgccaggcgacctgttgcccaaactatccaacctgaagctgcggaatcagcagatgccctctgggactggtctctccacgctatgaagccttcccgcgtcgttgagagagccaatagtcgcccaatgaagagtctaaccggcatggaagaccaagatcctaggggccatgggcgtcccattggtgtgagactcgtgactccaaggaaacttcaacgcatgtacggccgcatttgggaaatgacccccgtcgtcgaccaagttgatgagcgcaagattatcaagtggggtaaaatcgatcggctattgacaaccgcgtcgactagtgatatgcaattctttagtggtgtcactgcgaaaggaagattacttaagaaaaccgaagtgatcccatccggaccaccccgatcttggccaaacacatccgtgtcgaacatacctgaatcaggcccacccaggttaaagctgttcaagtcaaaggtatccgagccagagccacgtgaggtcaaagtgtccttgtcaagcccatctgagtcgggaccatcgtggagcgacgcaaactcgtcattcgaacgattcttttctggcgttcgcgcctcggaaaggaagaagccaaagggaaaatacaagtcaagactgtcagcggactatggacctgcatcgttttgaagatctatatcatctaggttctgcctttttacgctctacttcaggctcgctctcgtcaggtctgttcctcacgaggcgacattacattgacgtagatgcaagttttatcaaagcgtcaccatccacacgcataccaacccactcattcattggcttggccccgatggcgtcggactcgtagaataggatagacggttcgttccacttcagtacgctccaatcaagtcttccgccattcatagccacgacctccttcgcaagctcgacaagtagtcgcttgccatagcctttcttacgctcggtcgaacgcacgtataagtcctcgaggtaaattcccgactttgcgcgccaagtgctatagttgtagaaatacagggccattcccacagccttgttggtctcattgaaaagcaccaggcatctcgtaggccgcgtaggcgttatgggctctgtattgggattggcactgctggattcgacaccttcaggcgcaaatgcgatggtggctgctagtgattcttccgtggcttcgaccgcgtccagctcatgctcgtaatcagcgagctctcgaatcatctccagaatggatgggacatctgggtttgtaagcatcttgtttggttaccacgttaacggacatgaggctctgctcaccttcacgccgagcatggcggattgtacatggagctggtgccattgggttcgcaagctcagtacactaactcagaactggtgtcaggttgagacgataggttgtaaattatgtatgatatgtactataactgtatagacgatagaagagcgatctacggtttatagggattggagcgtgtggttgaattgaatgaaatgtgaataatagtcatagatcggaagtcaaataattatacccaactcatatgaagttgcgactgctttgaagctatatcgaaatgctgtacgcccttgccttgactcgtatagtggaaaatactagaaattttg

SEQ ID NO: 6364 - DNA, 2616 bp, Muscodor strobelii
  misc_feature: SGI cDNA ID NO. 561861
  misc_feature: Encodes the peptide sequence at SEQ ID NO 6365
atggcctcggcgatcctcacagcccatcagcaccaagctgttaatcctgattctgttgctccgttacctccatcctccctcggcgtgatctcttcgtcgtctacatcccgtccgccgtcttcaagtgcgcgacatcgagcccttccaccgaatactgttgggataggtcgtagtagtagttttgatgccagcaatcgagaccctatcatgtctcaatcacagtcctcacagccgtcatcacagcagtcttttagtctgagccagtcacagtctcagtctcaatatgcccggcatcagctgccggatcattcccggcgcatggcccaggagccgccgcagatctattcggctgtgtattctggcgtcgatgtctacgagatggaagtgaatggtgtagcagtaatgcgccgtcgtaacgatagctggcttaatgcaactcagattctcaaggtcgccaagatcgataagggcaagcgtaccaagattcttgagaaagagattcagactggtgagcatgagaaagtgcaaggtggttatggaaaataccagggcacgtggatatgtttcgagcgaggcagagaggtgtgccagcattatcatgtggaggagttgttacgaccactactcacctacgatatggggcaagatggtggtatcgctggtagaggtgatctgaacacgccgaccaaggagcaggccatggcagcgcaaaggaagcggcagtacagtgtggctcaggatgcccgaacaagtggcatgtctggcaccttcttcaaaaacatttcaagtacagcatctaatgctgttgccgccatcagcaaggcccgcctagactcgccgggtccaagaggtcgcaacgggccaacaaggcctcccagcttcagtcgccattcgtcaatgcaaaatattgatgatttcccaggcaactcccagcagagctttgcttctgattacggccagaacggcgagtctgcttactcgacacaagatacacagatggggaatggggatgaacctccacgcaaacgcccgagaatgatcacacctgctgggagtttcggatacgcatcacagtcgatggagatgtacgccaccaattttccaggctctccaactgaaccaaacgagtctttcgtctactcacatgccggtgtccaacctctcgatccagatgccaagtatctaccgcctttgccattcaaagaatcagcagatgccacccagaaacgtagtctgctgatgagtttgttcatggaaaagggcagtaacgaggtggaacaagagcagctcgacgctcttcacgctttaagtccgatggatctcgatgcgccaatcgacagtgttggccacacttcgtcacattgggcggccacgctagccaggatatcactgttgcgcacactggtttccgctggagccagtatttacagagtgaacgcatcaggtgaaacggccttgatgcgtgctgctcaagtaaccaacaactccgaccatgtctcatttcctgacctgctcgaggttttgggcgatacaatcgacattcgtgacaccagagggcgcacggtcctgcatcacatcgcgatttacagtgcagtccagggccgcagccacgcaggcagatactatttggaaagtcttctggaatgggtggttaggcaaggtagcgtccctagcagccagtcaaccgtagcgaacggcgggggcgccgtggcgcctaggatgagcattggacgtttcatgagcgaaattgtcaatgcacaagataacacaggcgataccgctctctgcatcgctgctagggtgggcaataggagcatcatatcacagctgcttgaagtgggagctgatccgaatatcgcgaatgccgctggattacgaccatcagattttggagtgggtggcgaggatgccgtgaacggtgtgaacgggcacgtggaggatgtcgatgaggtgcttgccatgagcagtggtgttccaaatcctaaggcagaaagtacagatgatattctttcatctattacactcctcctgaatgaaacctccggcagcttccaagcagacgcgaagaagaaacagacggagatcgactcgatacacgcatcattacggtccacgtctgctcagctgaatgacgcccggcgccgactggaatctttacaagcagcagcaaaggcgcaattattaactcgtcagaagattgtaaatctcgcacgaagtcgcgaggacaactcaaagcgactggcggggcttgagcaagcccaggggcgactagatgacaacagtacacgctgggaagcagaacttgattctcttcccgatctgggaagtggaatcgacgatggatcgataccgagcgccacgattctacgagctaagatacaggcttataagaaccataccgccttaacgaatacgggcgtgagctcgttgaagagccgcagcaaggatatcgagatcaagtaccgaagagttgttgccctgtgcaccggggtgttggagcaggaggttgatggtgtggttgatggcttgttaagagcagtggagagtgagaagggggagctggagattggtagggttagacggtttcttgggggtgtggagactactgctcattga

SEQ ID NO: 6365 - protein, 871 aa, Muscodor strobelii
  misc_feature: SGI Peptide ID NO. 561861
  misc_feature (590)..(622): Pfam Id: PF00023 Pfam Desc: Ankyrin repeat
  misc_feature (133)..(216): Pfam Id: PF02292 Pfam Desc: APSES domain
  misc_feature (84)..(867): NCBI GI: 261360014 Blast Desc: start control protein cdc10 [Verticillium albo-atrum VaMs.102]
  misc_feature (114)..(867): NCBI GI: 46116756 Blast Desc: FG04220.1 [Gibberella zeae PH-1]
  misc_feature (114)..(870): NCBI GI: 116197264 Blast Desc: CHGG_05230 [Chaetomium globosum CBS 148.51] gi|88181143|gb|EAQ88611.1| CHGG_05230 [Chaetomium globosum CBS 148.51]
  misc_feature (20)..(867): NCBI GI: 74274844 Blast Desc: Swi6 [Magnaporthe grisea]
  misc_feature (112)..(871): NCBI GI: 164424100 Blast Desc: NCU07587 [Neurospora crassa OR74A] gi|157070373|gb|EAA33731.2| NCU07587 [Neurospora crassa OR74A]
  misc_feature (70)..(867): NCBI GI: 171676662 Blast Desc: protein product [Podospora anserina] gi|170936398|emb|CAP61055.1| protein product [Podospora anserina]
  misc_feature (20)..(867): NCBI GI: 39964664 Blast Desc: MGG_09869 [Magnaporthe grisea 70-15] gi|145011175|gb|EDJ95831.1| MGG_09869 [Magnaporthe grisea 70-15]
  misc_feature (112)..(867): NCBI GI: 156048977 Blast Desc: SS1G_08195 [Sclerotinia sclerotiorum 1980] gi|154692594|gb|EDN92332.1| SS1G_08195 [Sclerotinia sclerotiorum 1980]
  misc_feature (112)..(746): NCBI GI: 154317180 Blast Desc: BC1G_03492 [Botryotinia fuckeliana B05.10] gi|150844909|gb|EDN20102.1| BC1G_03492 [Botryotinia fuckeliana B05.10]
  misc_feature (108)..(867): NCBI GI: 189198561 Blast Desc: start control protein cdc10 [Pyrenophora tritici-repentis Pt-1C-BFP] gi|187981566|gb|EDU48192.1| start control protein cdc10 [Pyrenophora tritici-repentis Pt-1C-BFP]
MASAILTAHQHQAVNPDSVAPLPPSSLGVISSSSTSRPPSSSARHRALPPNTVGIGRSSSFDASNRDPIMSQSQSSQPSSQQSFSLSQSQSQSQYARHQLPDHSRRMAQEPPQIYSAVYSGVDVYEMEVNGVAVMRRRNDSWLNATQILKVAKIDKGKRTKILEKEIQTGEHEKVQGGYGKYQGTWICFERGREVCQHYHVEELLRPLLTYDMGQDGGIAGRGDLNTPTKEQAMAAQRKRQYSVAQDARTSGMSGTFFKNISSTASNAVAAISKARLDSPGPRGRNGPTRPPSFSRHSSMQNIDDFPGNSQQSFASDYGQNGESAYSTQDTQMGNGDEPPRKRPRMITPAGSFGYASQSMEMYATNFPGSPTEPNESFVYSHAGVQPLDPDAKYLPPLPFKESADATQKRSLLMSLFMEKGSNEVEQEQLDALHALSPMDLDAPIDSVGHTSSHWAATLARISLLRTLVSAGASIYRVNASGETALMRAAQVTNNSDHVSFPDLLEVLGDTIDIRDTRGRTVLHHIAIYSAVQGRSHAGRYYLESLLEWVVRQGSVPSSQSTVANGGGAVAPRMSIGRFMSEIVNAQDNTGDTALCIAARVGNRSIISQLLEVGADPNIANAAGLRPSDFGVGGEDAVNGVNGHVEDVDEVLAMSSGVPNPKAESTDDILSSITLLLNETSGSFQADAKKKQTEIDSIHASLRSTSAQLNDARRRLESLQAAAKAQLLTRQKIVNLARSREDNSKRLAGLEQAQGRLDDNSTRWEAELDSLPDLGSGIDDGSIPSATILRAKIQAYKNHTALTNTGVSSLKSRSKDIEIKYRRVVALCTGVLEQEVDGVVDGLLRAVESEKGELEIGRVRRFLGGVETTAH

SEQ ID NO: 6366 - DNA, 5054 bp, Muscodor strobelii
  misc_feature: SGI EST ID NO. CUFF.15958.0
  misc_feature: Variant of the nucleotide sequence at SEQ ID NO 6364
gcgagacagacacgtcttgaccctggtcttccctgtctgcacctcatccacactattcccaattctcaatgtttaattgatttggtctgagtggccattgacctgcataccatcttgaatctgcagacagctgggttagtgtgcgcctgtggatctcaccatcagcgcatcctctcccgcagaccgatgacccgaccgtgaccgtgaagtcttgcgacgatattcatgcctacactccttgatggtcaaatctcacatactaccgacttttacagacttcattgctatgactattagccctacctctcaatcctcttgaaactcccttacctactcgctatattctagtcttttgaattatttcacattaattgcccccacgagaagctctgctttgcgccattcctatgttcactttgtgtgaaaatccaacgtccccctctgtcggagttgagctcatccaccacgtatatcctcaactctccccgttcctgtccctgtagaacctcggtctttctcttgtgcatctcaaatcgatgcgctatcgctcctgcacacctcccgagtctatctcattctcttcagttcgagtctgcgactgccgcaccgaaacccgctcttccatcgacccttatccatatcctacgcttatgaccgaacaatagcccactctagccactcgttccgaatgcgacttgttgagcaatcggctcacacgtcgacacattttgtgcaatttggctagacttgtcttgcgaatgttgattcgacataggcccgccacgattggacgtctccatggcctcggcgatcctcacagcccatcagcaccaagctgttaatcctgattctgttgctccgttacctccatcctccctcggcgtgatctcttcgtcgtctacatcccgtccgccgtcttcaagtgcgcgacatcgagcccttccaccgaatactgttgggataggtcgtagtagtagttttgatgccagcaatcgagaccctatcatgtctcaatcacagtcctcacagccgtcatcacagcagtcttttagtctgagccagtcacagtctcagtctcaatatgcccggcatcagctgccggatcattcccggcgcatggcccaggagccgccgcagatctattcggctgtgtattctggcgtcgatgtctacgagatggaagtgaatggtgtagcagtaatgcgccgtcgtaacgatagctggcttaatgcaactcagattctcaaggtcgccaagatcgataagggcaagcgtaccaagattcttgagaaagagattcagactggtgagcatgagaaagtgcaaggtggttatggaaaataccagggcacgtggatatgtttcgagcgaggcagagaggtgtgccagcattatcatgtggaggagttgttacgaccactactcacctacgatatggggcaagatggtggtatcgctggtagaggtgatctgaacacgccgaccaaggagcaggccatggcagcgcaaaggaagcggcagtacagtgtggctcaggatgcccgaacaagtggcatgtctggcaccttcttcaaaaacatttcaagtacagcatctaatgctgttgccgccatcagcaaggcccgcctagactcgccgggtccaagaggtcgcaacgggccaacaaggcctcccagcttcagtcgccattcgtcaatgcaaaatattgatgatttcccaggcaactcccagcagagctttgcttctgattacggccagaacggcgagtctgcttactcgacacaagatacacagatggggaatggggatgaacctccacgcaaacgcccgagaatgatcacacctgctgggagtttcggatacgcatcacagtcgatggagatgtacgccaccaattttccaggctctccaactgaaccaaacgagtctttcgtctactcacatgccggtgtccaacctctcgatccagatgccaagtatctaccgcctttgccattcaaagaatcagcagatgccacccagaaacgtagtctgctgatgagtttgttcatggaaaagggcagtaacgaggtggaacaagagcagctcgacgctcttcacgctttaagtccgatggatctcgatgcgccaatcgacagtgttggccacacttcgtcacattgggcggccacgctagccaggatatcactgttgcgcacactggtttccgctggagccagtatttacagagtgaacgcatcaggtgaaacggccttgatgcgtgctgctcaagtaaccaacaactccgaccatgtctcatttcctgacctgctcgaggttttgggcgatacaatcgacattcgtgacaccagagggcgcacggtcctgcatcacatcgcgatttacagtgcagtccagggccgcagccacgcaggcagatactatttggaaagtcttctggaatgggtggttaggcaaggtagcgtccctagcagccagtcaaccgtagcgaacggcgggggcgccgtggcgcctaggatgagcattggacgtttcatgagcgaaattgtcaatgcacaagataacacaggcgataccgctctctgcatcgctgctagggtgggcaataggagcatcatatcacagctgcttgaagtgggagctgatccgaatatcgcgaatgccgctggattacgaccatcagattttggagtgggtggcgaggatgccgtgaacggtgtgaacgggcacgtggaggatgtcgatgaggtgcttgccatgagcagtggtgttccaaatcctaaggcagaaagtacagatgatattctttcatctattacactcctcctgaatgaaacctccggcagcttccaagcagacgcgaagaagaaacagacggagatcgactcgatacacgcatcattacggtccacgtctgctcagctgaatgacgcccggcgccgactggaatctttacaagcagcagcaaaggcgcaattattaactcgtcagaagattgtaaatctcgcacgaagtcgcgaggacaactcaaagcgactggcggggcttgagcaagcccaggggcgactagatgacaacagtacacgctgggaagcagaacttgattctcttcccgatctgggaagtggaatcgacgatggatcgataccgagcgccacgattctacgagctaagatacaggcttataagaaccataccgccttaacgaatacgggcgtgagctcgttgaagagccgcagcaaggatatcgagatcaagtaccgaagagttgttgccctgtgcaccggggtgttggagcaggaggttgatggtgtggttgatggcttgttaagagcagtggagagtgagaagggggagctggagattggtagggttagacggtttcttgggggtgtggagactactgctcattgagcttgagtaaccttttcgaagttgtataccggttggatggagtgggcatcgagctgttggtttatttgtcggtccgcttggatgacgataatgtgtatgagtctgctggatctgtgcatttgttcgcaggcagagatgtggcagtgtagggatatactaaaagtgcgacgggagtcgcgtggatgagataccatggttttgttaggtgcctattgcctcacacgggtagataggtggttgctagagtttataacactggcagttgcagtttatgaaatcacaattgcttgaattgcacttgaatctcgcaccatttgctttagtcctgggtatcattatcgtcaccattagtacttgatctacgtatcgtccctctccttctgccctctcctcttccccccaaactccccttcatcatagcaaactttcatcatcaaccaaagcagctaaatccaacgcctccttactccaccccggtccctctgccctcttaatcaaattctccaggaacgtaacgacgggcttgtcatcgccgcgcggcgcgaagagttttacgcgtccgtcggataaagcgaaggcgtcgcatgttacgcgcagcacacgtacggaggggtggaagatgttgagcgctaggtgatgggagaggtatgctgccaaggcttctgtgaacggttgatgagtttgattttgtgagggggtgtgagtgcttggggagcgccacgtccagccttcttctgcgttgcctcctgccagtttgcgggtgagagatggggatagaggagtttgagcagggggcgtggcggaggagtttacgaagcgctggacttcggctgcgggaatcacgacgtcgattgtttttagaccgaggggttgcggtggttctgtcgttgatgggatgtggaagccgagtgttagggcgacgtctttggttagttgtttcccggatgatacacctgattgcgagacccaggtttcccagcttgagattagagtccgggtcccgaggcggagggggctgatccggacgtcgaaggtggttgataggaaatcgatgagtacggattttaggggggtgggcatacgggttaggaggagggggaggtggagaaatcttccatcttgctcatgagaggtctggggcgtggcggtccatgtccaggatggttgggtttgggcttgagatgtggtgagtgaggataagaggagagcgctgaatgtcacgttttcgtatgtgagttctagacagaggactcgtttattctcgtcttttggtattgagatgaggttggacatgtgagcccagcgccattgtacactctctaatgcacctgttcggccgagggaggcgtcattctcgagaccgacttgtacgcctcggacaacgtcaccgacgagtgtatctcttaggcggcgggagattgtctccagtctggtggtggtcaagggttctgagcctatgtagagtggtgaaactcggaatgtggagaacgttgtattgtagaggcggacttgttgctcgtcttcttctccctcctggtctgagtgatttgatgattggtccgagacttctggctctggctctggttcttgttgtggtcgtggacgaccgcgtttccttggagccatgtttggctctaaac

SEQ ID NO: 6367 - DNA, 1212 bp, Muscodor strobelii
  misc_feature: SGI cDNA ID NO. 561862
  misc_feature: Encodes the peptide sequence at SEQ ID NO 6368
atggctccaaggaaacgcggtcgtccacgaccacaacaagaaccagagccagagccagaagtctcggaccaatcatcaaatcactcagaccaggagggagaagaagacgagcaacaagtccgcctctacaatacaacgttctccacattccgagtttcaccactctacataggctcagaacccttgaccaccaccagactggagacaatctcccgccgcctaagagatacactcgtcggtgacgttgtccgaggcgtacaagtcggtctcgagaatgacgcctccctcggccgaacaggtgcattagagagtgtacaatggcgctgggctcacatgtccaacctcatctcaataccaaaagacgagaataaacgagtcctctgtctagaactcacatacgaaaacgtgacattcagcgctctcctcttatcctcactcaccacatctcaagcccaaacccaaccatcctggacatggaccgccacgccccagacctctcatgagcaagatggaagatttctccacctccccctcctcctaacccgtatgcccacccccctaaaatccgtactcatcgatttcctatcaaccaccttcgacgtccggatcagccccctccgcctcgggacccggactctaatctcaagctgggaaacctgggtctcgcaatcaggtgtatcatccgggaaacaactaaccaaagacgtcgccctaacactcggcttccacatcccatcaacgacagaaccaccgcaacccctcggtctaaaaacaatcgacgtcgtgattcccgcagccgaagtccagcgcttcgtaaactcctccgccacgccccctgctcaaactcctctatccccatctctcacccgcaaactggcaggaggcaacgcagaagaaggctggacgtggcgctccccaagcactcacaccccctcacaaaatcaaactcatcaaccgttcacagaagccttggcagcatacctctcccatcacctagcgctcaacatcttccacccctccgtacgtgtgctgcgcgtaacatgcgacgccttcgctttatccgacggacgcgtaaaactcttcgcgccgcgcggcgatgacaagcccgtcgttacgttcctggagaatttgattaagagggcagagggaccggggtggagtaaggaggcgttggatttagctgctttggttgatgatgaaagtttgctatga

SEQ ID NO: 6368 - protein, 403 aa, Muscodor strobelii
  misc_feature: SGI Peptide ID NO. 561862
  misc_feature (1)..(381): NCBI GI: 261360009 Blast Desc: conserved [Verticillium albo-atrum VaMs.102]
  misc_feature (1)..(365): NCBI GI: 116197270 Blast Desc: CHGG_05233 [Chaetomium globosum CBS 148.51] gi|88181146|gb|EAQ88614.1| CHGG_05233 [Chaetomium globosum CBS 148.51]
  misc_feature (1)..(383): NCBI GI: 85109549 Blast Desc: NCU07591 [Neurospora crassa OR74A] gi|28924617|gb|EAA33735.1| [Neurospora crassa OR74A]
  misc_feature (42)..(363): NCBI GI: 46116766 Blast Desc: FG04225.1 [Gibberella zeae PH-1]
  misc_feature (42)..(361): NCBI GI: 256725984 Blast Desc: NECHADRAFT_70037 [Nectria haematococca mpVI 77-13-4]
  misc_feature (8)..(363): NCBI GI: 39971361 Blast Desc: MGG_10701 [Magnaporthe grisea 70-15] gi|145009409|gb|EDJ94109.1| MGG_10701 [Magnaporthe grisea 70-15]
  misc_feature (39)..(381): NCBI GI: 171676682 Blast Desc: protein product [Podospora anserina] gi|170936408|emb|CAP61065.1| protein product [Podospora anserina]
  misc_feature (39)..(363): NCBI GI: 156031241 Blast Desc: SS1G_14042 [Sclerotinia sclerotiorum 1980] gi|154699444|gb|EDN99182.1| SS1G_14042 [Sclerotinia sclerotiorum 1980]
  misc_feature (42)..(365): NCBI GI: 225558721 Blast Desc: conserved [Ajellomyces capsulatus G186AR]
  misc_feature (42)..(365): NCBI GI: 240275118 Blast Desc: conserved [Ajellomyces capsulatus H143]
MAPRKRGRPRPQQEPEPEPEVSDQSSNHSDQEGEEDEQQVRLYNTTFSTFRVSPLYIGSEPLTTTRLETISRRLRDTLVGDVVRGVQVGLENDASLGRTGALESVQWRWAHMSNLISIPKDENKRVLCLELTYENVTFSALLLSSLTTSQAQTQPSWTWTATPQTSHEQDGRFLHLPLLLTRMPTPLKSVLIDFLSTTFDVRISPLRLGTRTLISSWETWVSQSGVSSGKQLTKDVALTLGFHIPSTTEPPQPLGLKTIDVVIPAAEVQRFVNSSATPPAQTPLSPSLTRKLAGGNAEEGWTWRSPSTHTPSQNQTHQPFTEALAAYLSHHLALNIFHPSVRVLRVTCDAFALSDGRVKLFAPRGDDKPVVTFLENLIKRAEGPGWSKEALDLAALVDDESLL

SEQ ID NO: 6369 - DNA, 5618 bp, Muscodor strobelii
  misc_feature: SGI EST ID NO. CUFF.15959.2
  misc_feature: Variant of the nucleotide sequence at SEQ ID NO 6367
aacatcttcaaccttgtcgccgatatcgaattacctaaagagcttcgagtatacttacgattacgtcaattgcactctaaacgcagtatcaaaatacttgaggttctttttatttcccctcaccggaatacaattcatcatatagtagcacagcacgacgcgtctaaagctctggccctcaccagaattagacattttctcccatctttaaaaggctgatcgactccaattcaaggctctaggagagaagacagagggtttagagccaaacatggctccaaggaaacgcggtcgtccacgaccacaacaagaaccagagccagagccagaagtctcggaccaatcatcaaatcactcagaccaggagggagaagaagacgagcaacaagtccgcctctacaatacaacgttctccacattccgagtttcaccactctacataggctcagaacccttgaccaccaccagactggagacaatctcccgccgcctaagagatacactcgtcggtgacgttgtccgaggcgtacaagtcggtctcgagaatgacgcctccctcggccgaacaggtgcattagagagtgtacaatggcgctgggctcacatgtccaacctcatctcaataccaaaagacgagaataaacgagtcctctgtctagaactcacatacgaaaacgtgacattcagcgctctcctcttatcctcactcaccacatctcaagcccaaacccaaccatcctggacatggaccgccacgccccagacctctcatgagcaagatggaagatttctccacctccccctcctcctaacccgtatgcccacccccctaaaatccgtactcatcgatttcctatcaaccaccttcgacgtccggatcagccccctccgcctcgggacccggactctaatctcaagctgggaaacctgggtctcgcaatcaggtgtatcatccgggaaacaactaaccaaagacgtcgccctaacactcggcttccacatcccatcaacgacagaaccaccgcaacccctcggtctaaaaacaatcgacgtcgtgattcccgcagccgaagtccagcgcttcgtaaactcctccgccacgccccctgctcaaactcctctatccccatctctcacccgcaaactggcaggaggcaacgcagaagaaggctggacgtggcgctccccaagcactcacaccccctcacaaaatcaaactcatcaaccgttcacagaagccttggcagcatacctctcccatcacctagcgctcaacatcttccacccctccgtacgtgtgctgcgcgtaacatgcgacgccttcgctttatccgacggacgcgtaaaactcttcgcgccgcgcggcgatgacaagcccgtcgttacgttcctggagaatttgattaagagggcagagggaccggggtggagtaaggaggcgttggatttagctgctttggttgatgatgaaagtttgctatgatgaaggggagtttggggggaagaggagagggcagaaggagagggacgatacgtagatcaagtactaatggtgacgataatgatacccaggactaaagcaaatggtgcgagattcaagtgcaattcaagcaattgtgatttcataaactgcaactgccagtgttataaactctagcaaccacctatctacccgtgtgaggcaataggcacctaacaaaaccatggtatctcatccacgcgactcccgtcgcacttttagtatatccctacactgccacatctctgcctgcgaacaaatgcacagatccagcagactcatacacattatcgtcatccaagcggaccgacaaataaaccaacagctcgatgcccactccatccaaccggtatacaacttcgaaaaggttactcaagctcaatgagcagtagtctccacacccccaagaaaccgtctaaccctaccaatctccagctcccccttctcactctccactgctcttaacaagccatcaaccacaccatcaacctcctgctccaacaccccggtgcacagggcaacaactcttcggtacttgatctcgatatccttgctgcggctcttcaacgagctcacgcccgtattcgttaaggcggtatggttcttataagcctgtatcttagctcgtagaatcgtggcgctcggtatcgatccatcgtcgattccacttcccagatcgggaagagaatcaagttctgcttcccagcgtgtactgttgtcatctagtcgcccctgggcttgctcaagccccgccagtcgctttgagttgtcctcgcgacttcgtgcgagatttacaatcttctgacgagttaataattgcgcctttgctgctgcttgtaaagattccagtcggcgccgggcgtcattcagctgagcagacgtggaccgtaatgatgcgtgtatcgagtcgatctccgtctgtttcttcttcgcgtctgcttggaagctgccggaggtttcattcaggaggagtgtaatagctaggtaatgtcagtgttgatcgctggtgggaggtgtgatccatgattgaaaactcacatgaaagaatatcatctgtactttctgccttaggatttggaacaccactgctcatggcaagcacctcatcgacatcctccacgtgcccgttcacaccgttcacggcatcctcgccacccactccaaaatctgatggtcgtaatccagcggcattcgcgatattcggatcagctcccacttcaagcagctgtgatatgatgctcctattgcccaccctagcagcgatgcagagagcggtatcgcctgtgttatcttgtgcattgacaatttcgctcatgaaacgtccaatgctcatcctaggcgccacggcgcccccgccgttcgctacggttgactggctgctagggacgctaccttgcctaaccacccattccagaagactttccaaatagtatctgcctgcgtggctgcggccctggactgcactgtaaatcgcgatgtgatgcaggaccgtgcgccctctggtgtcacgaatgtcgattgtatcgcccaaaacctcgagcaggtcaggaaatgagacatggtcggagttgttggttacttgagcagcacgcatcaaggccgtttcacctgatgcgttcactctgtaaatactggctccagcggaaaccagtgtgcgcaacagtgatatcctggctagcgtggccgcccaatgtgacgaagtgtggccaacactgtcgattggcgcatcgagatccatcggacttaaagcgtgaagagcgtcgagctgctcttgttccacctcgttactgcccttttccatgaacaaactcatcagcagactacgtttctgggtggcatctgctgattctttgaatggcaaaggcggtagatacttggcatctggatcgagaggttggacaccggcatgtgagtagacgaaagactcgtttggttcagttggagagcctggaaaattggtggcgtacatctccatcgactgtgatgcgtatccgaaactcccagcaggtgtgatcattctcgggcgtttgcgtggaggttcatccccattccccatctgtgtatcttgtgtcgagtaagcagactcgccgttctggccgtaatcagaagcaaagctctgctgggagttgcctgggaaatcatcaatattttgcattgacgaatggcgactgaagctgggaggccttgttggcccgttgcgacctcttggacccggcgagtctaggcgggccttgctgatggcggcaacagcattagatgctgtacttgaaatgtttttgaagaaggtgccagacatgccacttgttcgggcatcctgagccacactgtactgccgcttcctttgcgctgccatggcctgctccttggtcggcgtgttcagatcacctctaccagcgataccaccatcttgccccatatcgtaggtgagtagtggtcgtaacaactcctccacatgataatgctggcacacctctctgcctcgctcgaaacatatccacgtgccctggtattttccataaccaccttgcactttctcatgctcaccagtctgaatctctttctcaagaatcttggtacgcttgcccttatcgatcttggcgaccttgagaatctgagttgcattaagccagctatcgttacgacggcgcattactgctacaccattcacttccatctcgtagacatcgacgccagaatacacagcctaattgcaaagatgtcaatgcgctgttacgaataaccaggtattggggaaaagggggatcgaccaaccgaatagatctgcggcggctcctgggccatgcgccgggaatgatccggcagctgatgccgggcatattgagactgagactgtgactggctcagactaaaagactgctgtgatgacggctgtgaggactgtgattgagacatgatagggtctcgattgctggcatcaaaactactactacgacctatcccaacagtattcggtggaagggctcgatgtcgcgcacttgaagacggcggacgggatgtagacgacgaagagatcacgccgagggaggatggaggtaacggagcaacagaatcaggattaacagcttggtgctgatgggctgtgaggatcgccgaggccatggagacgtccaatcgtggcgggcctatgtcgaatcaacattcgcaagacaagtctagccaaattgcacaaaatgtgtcgacgtgtgagccgattgctcaacaagtcgcattcggaacgagtggctagagtgggctattgttcggtcataagcgtaggatatggataagggtcgatggaagagcgggtttcggtgcggcagtcgcagactcgaactgaagagaatgagatagactcgggaggtgtgcaggagcgatagcgcatcgatctgtggcagggacgatatatgagactattgtcgataattgttaagtcagggaggcaatgttcaacaactggcaaacaggtatgggtctgggtatgtatccgtctacaatacgccttgaagctctaaggatgcgggacaaattacagcaaagatggaattctaatactaagtcaagacttacttgagatgcacaagagaaagaccgaggttctacagggacaggaacggggagagttgaggatatacgtggtggatgagctcaactccgacagagggggacgttggattttcacacaaagtgaacataggaatggcgcaaagcagagcttctcgtgggggcaattaatgtgaaataattcaaaagactagaatatagcgagtaggtaagggagtttcaagaggattgagaggtagggctaatagtcatagcaatgaagtctgtaaaagtcggtagtatgtgagatttgaccatcaaggagtgtaggcatgaatatcgtcgcaagacttcacggtcacggtcgggtcatcggtctgcgggagaggatgcgctgatggtgagatccacaggcgcacactaacccagctgtctgcagattcaagatggtatgcaggtcaatggccactcagaccaaatcaattaaacattgagaattgggaatagtgtggatgaggtgcagacagggaagaccagggtcaagacgtgtctgtctcgc

SEQ ID NO: 6370 - DNA, 1122 bp, Muscodor strobelii
  misc_feature: SGI cDNA ID NO. 561863
  misc_feature: Encodes the peptide sequence at SEQ ID NO 6371
atgactgatcctccagtagcaggcactgatgacgtcggctctccctgctcgccaacgtcgtctcactcctcatcagactcagacccaggccctcacttctcacgattctgctccctccctcccgaacttcgccatcagatctggcgcttcgccataccatctcccggcatcaacttcttcaacgtccattgttttcccaacgatcatgatggatgcaatctctccacctcgccgccctggagctatctcgacctccgccgtctcgacatagaacattccgacggcgaagttgcaacctacgacccctccgcatggcaagcacgtcacgcgatccgacagacatgtcgcgaagcccgcatcgtctgcgctatacccaactccaagtccgcaaccatcgtcctcacgcggccgaaacgcggtctctacgttcgggctggggacgggcaactccgcaattatactcgatcctacagagactatcagcgattgcacgatctagccgatattctcccttggatagacaaccgcgtctacagaaaaattaccatccacaccgacgacatcctctccctctccgtcgaaaactgcagcttcaacctcccgcacgaggagacacctacattctcctcagatgacgaaaccgacggtctaacaacaggcgacatagaggacggctggtctttcgatcctcaattgactcccgagctaccttcaaacataccctcccaccgtttatgcgcagccatgacgcgctgcaataaagcggtcctccacaacaccaccgactccctcttcggcctactttatgcccacattccaggatataacgaccttttaccaggccagctctggtctggacgcttactcctcatgttcgatgcccacaatcaagcgctgggcgagagagacttggaagaacttacgcctactccgcaagtcgtcaaagatcgctggggagacagctatgcgaggttaccgtggaagacgggccaacctgatgagccagatgggtttccaattatgtatcgacttaccaagatctggcctgagagtaatgacataagagaacgatatctgcgatctgctattttgaggtcgccaaaacggcccgtggggtcttag

SEQ ID NO: 6371 - protein, 373 aa, Muscodor strobelii
  misc_feature: SGI Peptide ID NO. 561863
MTDPPVAGTDDVGSPCSPTSSHSSSDSDPGPHFSRFCSLPPELRHQIWRFAIPSPGINFFNVHCFPNDHDGCNLSTSPPWSYLDLRRLDIEHSDGEVATYDPSAWQARHAIRQTCREARIVCAIPNSKSATIVLTRPKRGLYVRAGDGQLRNYTRSYRDYQRLHDLADILPWIDNRVYRKITIHTDDILSLSVENCSFNLPHEETPTFSSDDETDGLTTGDIEDGWSFDPQLTPELPSNIPSHRLCAAMTRCNKAVLHNTTDSLFGLLYAHIPGYNDLLPGQLWSGRLLLMFDAHNQALGERDLEELTPTPQVVKDRWGDSYARLPWKTGQPDEPDGFPIMYRLTKIWPESNDIRERYLRSAILRSPKRPVGS

SEQ ID NO: 6372 - DNA, 1757 bp, Muscodor strobelii
  misc_feature: SGI EST ID NO. CUFF.15868.0
  misc_feature: Variant of the nucleotide sequence at SEQ ID NO 6370
ggtgattccagtttccaaatccttgagatcttctcccttattgaaagttccattgcttataaatattgcagacttcatactcttccatgttctcagaagcatgttcatagatttccactagttctggaaccaccgattcacgcttttcagcacgacaccatgactgatcctccagtagcaggcactgatgacgtcggctctccctgctcgccaacgtcgtctcactcctcatcagactcagacccaggccctcacttctcacgattctgctccctccctcccgaacttcgccatcagatctggcgcttcgccataccatctcccggcatcaacttcttcaacgtccattgttttcccaacgatcatgatggatgcaatctctccacctcgccgccctggagctatctcgacctccgccgtctcgacatagaacattccgacggcgaagttgcaacctacgacccctccgcatggcaagcacgtcacgcgatccgacagacatgtcgcgaagcccgcatcgtctgcgctatacccaactccaagtccgcaaccatcgtcctcacgcggccgaaacgcggtctctacgttcgggctggggacgggcaactccgcaattatactcgatcctacagagactatcagcgattgcacgatctagccgatattctcccttggatagacaaccgcgtctacagaaaaattaccatccacaccgacgacatcctctccctctccgtcgaaaactgcagcttcaacctcccgcacgaggagacacctacattctcctcagatgacgaaaccgacggtctaacaacaggcgacatagaggacggctggtctttcgatcctcaattgactcccgagctaccttcaaacataccctcccaccgtttatgcgcagccatgacgcgctgcaataaagcggtcctccacaacaccaccgactccctcttcggcctactttatgcccacattccaggatataacgaccttttaccaggccagctctggtctggacgcttactcctcatgttcgatgcccacaatcaagcgctgggcgagagagacttggaagaacttacgcctactccgcaagtcgtcaaagatcgctggggagacagctatgcgaggttaccgtggaagacgggccaacctgatgagccagatgggtttccaattatgtatcgacttaccaagatctggcctgagagtaatgacataagagaacgatatctgcgatctgctattttgaggtcgccaaaacggcccgtggggtcttaggatcctgatctagtttaggggataaaacagctcgagacgttaataagctcgaatatcttaagacctaatttaccaatagtttgtctagtttactatatggagtactgacttcaagggccttcgaaactatttcatcgccctaatccgtagacttacaccgatcttgtaccccaaaaggagggaaatcaaaaagctagagagaaatagacagaaagaaaaacgtagcgaaggaaaaaaaaaggaaatgagtgaatactggcgtctcacctcggggaatcgaacccaagggccgcaaggttcgaggggttacggagcgaaacagtataagcatgcgactggccactgcaccagttggatacagggtgtgatgctctctctttccaaattacttgccatttcgtacctatatacctccttccatgtgatagctgctccacttttgattccgcggttctttcctggaagttgaagcaaac

SEQ ID NO: 6373 - DNA, 2001 bp, Muscodor strobelii
  misc_feature: SGI cDNA ID NO. 561864
  misc_feature: Encodes the peptide sequence at SEQ ID NO 6374
atgtctgggcgtaaattgggaggaggcagagtgctgggcagcggcaaaggccttgcgccgccaacctcgcctgccatcaagaagcagagagatgcgagtccctccgcgccctccgacagcacgttctctgctggctctccgtccacatccctctcgccgagtgtttcgagtcccctgcccgactttgcacaagaccttacgtccaacatcagcctcgggcagcgcagtgatgtcggcgcttccagctccaagctggtctgtcctatctgcaacgaggagatgttgacgctgctgcagctgaaccgacacatcgacgacaatcatcaagagctgcccgacttcgaacaggacgaagtcaagtcctggatagacaaacaggttctcaaagccaagcgattccaacccttatcgctcatcaacctcaaactccgtggcctcgatgtcttcgagtccaacgaatcgcaaccaccaccgccccccgtttccatccgtgctggctctggccagagaccaccacccgctcccgaaccggccatcgaccccgacgacttgatcacgactgcccactggcagagacaaggcgtgaatgacccgtgcacagatctcgcttgtgggaaacggctgggccctgtcaacgggagcattaattgcagacaatgcggtcgtctattctgtgaagagcataccatgtaccagatgaaattgtcgagatctgctgcccacgaacccgtgaggggctactggtaccgtgtctgtgaaacgtgctacaagtcgagggagggatataacgaccacgagggatttaccagggatcatactcaggcctttactgcgatacggaggaagaaggtcgaccagcaaactctggagagctcacgtctggagaagaggctcaccaagttgacacagttactggcgaaccctcccatggagatgcccacaaatagtagcgggagcctgctctcaagctctttgaacggccagcggaaccagcgcaaagcgatagagcagtcggtcgtcacgtgggaagaagatgcaaaggtaccaaaatgtcccttctgtaagcaagagttcggctcgtggacctttagacgacaccactgccgtatatgcgggaaggtagtctgtgccgatccacagactgggtgctcgaccgaggtaggactgaatgtggccaataccagcaacacaccttctgagaaaccagaaaatggaacactacaggtcgacgtaaggatgtgtcaagactgcaaaacaacaatcttctccaaacgagatttcgcagagtcactggtacgcaagccaccagatcagcgagcctacgaaactctgcggcagttcgaacgaggtatcgaactactgcttcccagctttcagcgtgcattgctaccgctgcagaacgaagacaatccaccaagtcacgcacagatacaagaggctggaaaactgaggaaaagattaacagacagcttcacaaaatacgacctagcggcccgtcgaataagagacatgaaaacagacagcgtcacacaacaaaggttacagaaagccgtatacgcagccgcatcaggttttctacacatgcatatgcttccgctcaaaaacctaccccggatgctcaaacacgcctcctcgtcctcatcatccctctcagccaaacaccggctcctcgccaacggccacacagctagtccgcttcgcaatggtgacgtagcagatacggctagtcagacaagcgagagtagtacaatcgcctcggcgctagagaccgaggagaaagacctcagggaacgactgattgtgcttgaggagcagaagtacatggtgcagaagatgatcaatgcctccagaggagcccggaggttcgaggaggttagtgcgctgactaggaatgtggaggagcttgataaggagattgaaggggtgagaactaaagttacgggcgttgaggagaggtggcagggcttttatgctaatggtggaccgaatcccgctgcgtga

SEQ ID NO: 6374 - protein, 666 aa, Muscodor strobelii
  misc_feature: SGI Peptide ID NO. 561864
  misc_feature (340)..(423): Pfam Id: PF01363 Pfam Desc: FYVE zinc finger
  misc_feature (340)..(378): Pfam Id: PF01363 Pfam Desc: FYVE zinc finger
  misc_feature (1)..(660): NCBI GI: 261360013 Blast Desc: VAC1 protein [Verticillium albo-atrum VaMs.102]
  misc_feature (1)..(660): NCBI GI: 164424102 Blast Desc: NCU07584 [Neurospora crassa OR74A] gi|157070374|gb|EAA33728.2| conserved [Neurospora crassa OR74A]
  misc_feature (1)..(658): NCBI GI: 116197268 Blast Desc: CHGG_05232 [Chaetomium globosum CBS 148.51] gi|88181145|gb|EAQ88613.1| CHGG_05232 [Chaetomium globosum CBS 148.51]
  misc_feature (1)..(660): NCBI GI: 46116758 Blast Desc: FG04221.1 [Gibberella zeae PH-1]
  misc_feature (1)..(660): NCBI GI: 256725588 Blast Desc: [Nectria haematococca mpVI 77-13-4]
  misc_feature (1)..(666): NCBI GI: 39964338 Blast Desc: MGG_09837 [Magnaporthe grisea 70-15] gi|145011142|gb|EDJ95798.1| MGG_09837 [Magnaporthe grisea 70-15]
  misc_feature (1)..(657): NCBI GI: 154293329 Blast Desc: BC1G_13688 [Botryotinia fuckeliana B05.10] gi|150845345|gb|EDN20538.1| BC1G_13688 [Botryotinia fuckeliana B05.10]
  misc_feature (4)..(661): NCBI GI: 171676680 Blast Desc: protein product [Podospora anserina] gi|170936407|emb|CAP61064.1| protein product [Podospora anserina]
  misc_feature (98)..(663): NCBI GI: 156031307 Blast Desc: SS1G_14075 [Sclerotinia sclerotiorum 1980] gi|154699477|gb|EDN99215.1| SS1G_14075 [Sclerotinia sclerotiorum 1980]
  misc_feature (1)..(660): NCBI GI: 240106461 Blast Desc: FYVE zinc finger domain containing protein [Coccidioides posadasii C735 delta SOWgp]
MSGRKLGGGRVLGSGKGLAPPTSPAIKKQRDASPSAPSDSTFSAGSPSTSLSPSVSSPLPDFAQDLTSNISLGQRSDVGASSSKLVCPICNEEMLTLLQLNRHIDDNHQELPDFEQDEVKSWIDKQVLKAKRFQPLSLINLKLRGLDVFESNESQPPPPPVSIRAGSGQRPPPAPEPAIDPDDLITTAHWQRQGVNDPCTDLACGKRLGPVNGSINCRQCGRLFCEEHTMYQMKLSRSAAHEPVRGYWYRVCETCYKSREGYNDHEGFTRDHTQAFTAIRRKKVDQQTLESSRLEKRLTKLTQLLANPPMEMPTNSSGSLLSSSLNGQRNQRKAIEQSVVTWEEDAKVPKCPFCKQEFGSWTFRRHHCRICGKVVCADPQTGCSTEVGLNVANTSNTPSEKPENGTLQVDVRMCQDCKTTIFSKRDFAESLVRKPPDQRAYETLRQFERGIELLLPSFQRALLPLQNEDNPPSHAQIQEAGKLRKRLTDSFTKYDLAARRIRDMKTDSVTQQRLQKAVYAAASGFLHMHMLPLKNLPRMLKHASSSSSSLSAKHRLLANGHTASPLRNGDVADTASQTSESSTIASALETEEKDLRERLIVLEEQKYMVQKMINASRGARRFEEVSALTRNVEELDKEIEGVRTKVTGVEERWQGFYANGGPNPAA

SEQ ID NO: 6375 - DNA, 2966 bp, Muscodor strobelii
  misc_feature: SGI EST ID NO. CUFF.15874.0
  misc_feature: Variant of the nucleotide sequence at SEQ ID NO 6373
atcgagttttcacatgccttgaacgacaatcttgagcatcaaatcacactcattatacaattgatctattgctcattgggctttgaaagctaggaggaagtcagtagtttgtgattttgtctagatcttttgatgatagtgatactcgtaagcgccaacaaagcacgagagcttgcaggggatagacagactcgttgcggataggattggaggcgtggtggtatttcacccctcaccccaaactccaggtaaccaacttgacaagggcgattggaagcttcgcctcatctaccctctccatcttatcatttctccattctcgtttcctctgtcccgtagccttgcatgccgctcaaatcaagacctccattttcactctttaccccgaggtcattgacgaataaaagccctgttcgtcctagtatcgttcattgcgtactacttcattctagtcgagactgagccgattgtgttactgtgctgtaaatgcactagacatcacttcacttcgccatactgcacttgccgaattcattgcgctcctgcccccgacctgcaacttacttgaaaaactattgttcgtactgcttagagtcggacaaaacaccgcaaggattacctgaattacctggattctcagtgggtttctgggggccatcgcccaccccatcgctgctctcgtgccgacttcgagtttcacctgccaacatctagagaagccgacagatggctcaagcctcgcctcttacgccgtacttagcagagttgaatcgtcagaatataactgagcatgtctgggcgtaaattgggaggaggcagagtgctgggcagcggcaaaggccttgcgccgccaacctcgcctgccatcaagaagcagagagatgcgagtccctccgcgccctccgacagcacgttctctgctggctctccgtccacatccctctcgccgagtgtttcgagtcccctgcccgactttgcacaagaccttacgtccaacatcagcctcgggcagcgcagtgatgtcggcgcttccagctccaagctggtctgtcctatctgcaacgaggagatgttgacgctgctgcagctgaaccgacacatcgacgacaatcatcaagagctgcccgacttcgaacaggacgaagtcaagtcctggatagacaaacaggttctcaaagccaagcgattccaacccttatcgctcatcaacctcaaactccgtggcctcgatgtcttcgagtccaacgaatcgcaaccaccaccgccccccgtttccatccgtgctggctctggccagagaccaccacccgctcccgaaccggccatcgaccccgacgacttgatcacgactgcccactggcagagacaaggcgtgaatgacccgtgcacagatctcgcttgtgggaaacggctgggccctgtcaacgggagcattaattgcagacaatgcggtcgtctattctgtgaagagcataccatgtaccagatgaaattgtcgagatctgctgcccacgaacccgtgaggggctactggtaccgtgtctgtgaaacgtgctacaagtcgagggagggatataacgaccacgagggatttaccagggatcatactcaggcctttactgcgatacggaggaagaaggtcgaccagcaaactctggagagctcacgtctggagaagaggctcaccaagttgacacagttactggcgaaccctcccatggagatgcccacaaatagtagcgggagcctgctctcaagctctttgaacggccagcggaaccagcgcaaagcgatagagcagtcggtcgtcacgtgggaagaagatgcaaaggtaccaaaatgtcccttctgtaagcaagagttcggctcgtggacctttagacgacaccactgccgtatatgcgggaaggtagtctgtgccgatccacagactgggtgctcgaccgaggtaggactgaatgtggccaataccagcaacacaccttctgagaaaccagaaaatggaacactacaggtcgacgtaaggatgtgtcaagactgcaaaacaacaatcttctccaaacgagatttcgcagagtcactggtacgcaagccaccagatcagcgagcctacgaaactctgcggcagttcgaacgaggtatcgaactactgcttcccagctttcagcgtgcattgctaccgctgcagaacgaagacaatccaccaagtcacgcacagatacaagaggctggaaaactgaggaaaagattaacagacagcttcacaaaatacgacctagcggcccgtcgaataagagacatgaaaacagacagcgtcacacaacaaaggttacagaaagccgtatacgcagccgcatcaggttttctacacatgcatatgcttccgctcaaaaacctaccccggatgctcaaacacgcctcctcgtcctcatcatccctctcagccaaacaccggctcctcgccaacggccacacagctagtccgcttcgcaatggtgacgtagcagatacggctagtcagacaagcgagagtagtacaatcgcctcggcgctagagaccgaggagaaagacctcagggaacgactgattgtgcttgaggagcagaagtacatggtgcagaagatgatcaatgcctccagaggagcccggaggttcgaggaggttagtgcgctgactaggaatgtggaggagcttgataaggagattgaaggggtgagaactaaagttacgggcgttgaggagaggtggcagggcttttatgctaatggtggaccgaatcccgctgcgtgagtaaggcaggtgatttaggtattgactattattattttaatttcgttgcatggcatggcgctcgggcagacattattaggcatatctattggaattagtcgttatacactacgaaatgtagtatttagtggtatagggttttatatcattgttatatgtatgactttgaaacata

SEQ ID NO: 6376 - DNA, 801 bp, Muscodor strobelii
  misc_feature: SGI cDNA ID NO. 561865
  misc_feature: Encodes the peptide sequence at SEQ ID NO 6377
atgcctcaacccaaagagtttcccaatgtccaaggcggtgggagcctgatactcgcatggcagatcagaaataagactgtcttagtagtcggcggtggtgaggtcgctgccggaagaatactcaacgtcctcaacgcggacgccaaagtggtagttgtgtgtccctattcgggcctcaacccagaagtccgccaccgcgttgagcaaaacgaggtcacgcacatcgaccgagttttcgagccgtcagatcttgattctcttccacccgccaacggaccaccagacatggtcctcgtcgccatcgacgacccggcagcctccacgcagatctggaagctatgcaaggagaaacgcatcgccgccaacatcgccgatgtgccatccgagtgcgacttctacttcgggagtgtgcatcgggacggcccgcttcagatcatggtcagcacgaatgggaaaggaccaaggctggcggccagcatcaggaagtggatcggcaaacagctgccagtaggggtcggaaacgcgatagagaggattggcgagctgcgcgtcaagttgaggaagactgctcccgagacggaggatggacctaagagaatgcgctggatgacgaaggttagcgataagtatacctgggatgagatgtgcgagcttacggatgaggatatgaataatctcttgacgttctatgagtcggcgaatgtgccggaggtccagttgttgaaagctatgcgtgaggggaggaatctggaggacttggatgtgttcgatgggtcttttgggttcagtgtcgttgcttga

SEQ ID NO: 6377 - protein, 266 aa, Muscodor strobelii
  misc_feature: SGI Peptide ID NO. 561865
  misc_feature (5)..(266): NCBI GI: 46116760 Blast Desc: FG04222.1 [Gibberella zeae PH-1]
  misc_feature (5)..(266): NCBI GI: 256725985 Blast Desc: [Nectria haematococca mpVI 77-13-4]
  misc_feature (1)..(264): NCBI GI: 261360012 Blast Desc: conserved [Verticillium albo-atrum VaMs.102]
  misc_feature (2)..(264): NCBI GI: 171676678 Blast Desc: protein product [Podospora anserina] gi|170936406|emb|CAP61063.1| protein product [Podospora anserina]
  misc_feature (4)..(266): NCBI GI: 116197266 Blast Desc: CHGG_05231 [Chaetomium globosum CBS 148.51] gi|88181144|gb|EAQ88612.1| CHGG_05231 [Chaetomium globosum CBS 148.51]
  misc_feature (7)..(264): NCBI GI: 154293331 Blast Desc: BC1G_13689 [Botryotinia fuckeliana B05.10] gi|150845346|gb|EDN20539.1| BC1G_13689 [Botryotinia fuckeliana B05.10]
  misc_feature (1)..(245): NCBI GI: 39964688 Blast Desc: MGG_09871 [Magnaporthe grisea 70-15] gi|145011177|gb|EDJ95833.1| MGG_09871 [Magnaporthe grisea 70-15]
  misc_feature (5)..(264): NCBI GI: 156031309 Blast Desc: SS1G_14076 [Sclerotinia sclerotiorum 1980] gi|154699478|gb|EDN99216.1| SS1G_14076 [Sclerotinia sclerotiorum 1980]
  misc_feature (7)..(260): NCBI GI: 169605649 Blast Desc: SNOG_05850 [Phaeosphaeria nodorum SN15] gi|111065794|gb|EAT86914.1| SNOG_05850 [Phaeosphaeria nodorum SN15]
  misc_feature (6)..(249): NCBI GI: 255943913 Blast Desc: Pc20g01650 [Penicillium chrysogenum Wisconsin 54-1255] gi|211587459|emb|CAP85494.1| Pc20g01650 [Penicillium chrysogenum Wisconsin 54-1255]
  misc_feature (6)..(230): SWISSPROT Homolog: EC 1.3.1.76 Precorrin-2 dehydrogenase
  misc_feature (6)..(230): SWISSPROT Homolog: EC 4.99.1.4 Sirohydrochlorin ferrochelatase
MPQPKEFPNVQGGGSLILAWQIRNKTVLVVGGGEVAAGRILNVLNADAKVVVVCPYSGLNPEVRHRVEQNEVTHIDRVFEPSDLDSLPPANGPPDMVLVAIDDPAASTQIWKLCKEKRIAANIADVPSECDFYFGSVHRDGPLQIMVSTNGKGPRLAASIRKWIGKQLPVGVGNAIERIGELRVKLRKTAPETEDGPKRMRWMTKVSDKYTWDEMCELTDEDMNNLLTFYESANVPEVQLLKAMREGRNLEDLDVFDGSFGFSVVA

SEQ ID NO: 6378 - DNA, 1357 bp, Muscodor strobelii
  misc_feature: SGI EST ID NO. CUFF.15877.0
  misc_feature: Variant of the nucleotide sequence at SEQ ID NO 6376
ctccaatcaactgtaaatgaaaaagttccaaagcaatatagtcaatttctggaataagaacagctcacaccactagtttcatatagaagttgctatatcgctagatctaattatacaacagtatgaagtgacaaatatctatccttcatacatgtatgatccttcatttccacccagtagtataatcatttagtcaccatgcctcaacccaaagagtttcccaatgtccaaggcggtgggagcctgatactcgcatggcagatcagaaataagactgtcttagtagtcggcggtggtgaggtcgctgccggaagaatactcaacgtcctcaacgcggacgccaaagtggtagttgtgtgtccctattcgggcctcaacccagaagtccgccaccgcgttgagcaaaacgaggtcacgcacatcgaccgagttttcgagccgtcagatcttgattctcttccacccgccaacggaccaccagacatggtcctcgtcgccatcgacgacccggcagcctccacgcagatctggaagctatgcaaggagaaacgcatcgccgccaacatcgccgatgtgccatccgagtgcgacttctacttcgggagtgtgcatcgggacggcccgcttcagatcatggtcagcacgaatgggaaaggaccaaggctggcggccagcatcaggaagtggatcggcaaacagctgccagtaggggtcggaaacgcgatagagaggattggcgagctgcgcgtcaagttgaggaagactgctcccgagacggaggatggacctaagagaatgcgctggatgacgaaggttagcgataagtatacctgggatgagatgtgcgagcttacggatgaggatatgaataatctcttgacgttctatgagtcggcgaatgtgccggaggtccagttgttgaaagctatgcgtgaggggaggaatctggaggacttggatgtgttcgatgggtcttttgggttcagtgtcgttgcttgatggagtggaagtcaacgctgcgagcaatgagaaattacctcttcatgcgaatgatgccaaggactcacagacgaatcggagacttgccatatcagagcatataggaacggtcgtggggtgacctatgatatcagtgtgtctcacgggactcgggattcatgcaaacgttgaggcctcacaaaactctatcgaggcatcgtcggttttggtgtcaccctccgagtcagaataggggctatcaaatggaaacagtaaaagctccaaattcaggatttgtcacagtcttccacaggtcggatgagattttcgcatatggatgtgtgtttttggtaattcagagcataagcttcattttatt

SEQ ID NO: 6379 - DNA, 2142 bp, Muscodor strobelii
  misc_feature: SGI cDNA ID NO. 561866
  misc_feature: Encodes the peptide sequence at SEQ ID NO 6380
atgtctgctgttaagtttaactatccgacgtataagttgttcgagcctccctatcaacccgagaggccaataatcattgacgtcgacgcgattgaatctcccgagacagtgaccctccagtacgaggaagctgccgccagagcgaacggtggggaccttcgtggggattccccgcgtggtctccttgcaatagaatcgtgtccgaaggcacaaccgcccctcatgcactcattcgattctgagagatcatatcaagatcagtatcaatttacaacacagccatttgcgactcaacaggccgaaaataatgcggcggcgcaacttaaccacctggctttcgccgccaacaactcggcaagccagtatatgcaatctgttgagccagctttgatctcttatcaaccagctagcggcgtcttcggaaccaaaattatgatcaagatcacagctccatacgacttgatcacaagccatttctttctcgcctttgggtctcaaaaaagcccagcgcaggctgtccgggacgccaacgacgccagtggacttgtatatttagtcaccagcgacacaccgcacttagaagacgtgatagatcatagcggaaacgtgcctttatcacttttgatagaaagtgtagatgggcagacgacgctggctagtattaatgttggcacgtttacttatcataacactcaagttgtgagtgcagaggtaccccatgaggcagtcacgcggagcctgtcccggtcaccggaacaagaagagcagcagcgcacaagtccctctaagccacaagatactgatcaattaattgatgctgccgctacaaatacatatggctacgctccaaccgcgcatcaggctgtagcctcaaactatgacgccgcaggctatacaagtaacaacaatatgctatccacttatcatcgtccttcctacggagccgactatcctcggccgccgtcactgctcaaagcaccgtcttgggcaaatccatacggctcatctttgacgtcgcctcgcagtcctagcatccaccacctcgcaataccgcgcccaagtacaacgaccctaccgaatctgagcgtaccacagctcatccgtaccagcactcttcagcaatcaggctcttcaagtggcgggcagttgaatgcgtatgccctgtattcaacgaaagcagtgctcaaaatcaatggagatcttgattcgatggccaagaactggacaccagaagaatgcgagaatggcaggcgacttgttctattccataagaagcaatccggatcaacacttcagacaactttcaaggcagtgtccgtcagcgagcgtccaccgaacagcatatgtattagttgcatctactgggcagagaagggcgagtgtttcgttaccagcgtggataccatttcattacttgagcagctcgtcgtggcgccgtcaagattcagcgtggaagagaagaacagaatacggcgaaacctagaaggattccggcctctgacggttagcaaggccaaggcggacagcgaagagtttttcaaagtcatcatgggatttcctaacccgaagccgcggaacatcgagaaagatgtcaaagtatttccctggaagatcttggcgtcagctttgaaaaagatcattggaaaatactctgcatcaccaagtccatctcccgggctacatcattcaggaccatcataccattcggtatcaggaccgtccgcgttgctcacgccggtcagcactacgagcccaggtctctatggaccgcctcatacaccagccgtagcagagacaagctactcgcatcacgactcgcatacgatggcatctcctcgctcgctctctggagcgccccccagctggggtccatacacaactcgaaccgtctcaccaagcctcaagcactcacctcagacaggaggacttcggattcctagtctaccatcatatggacagacggacctgagacatcactcaggacacagctacggcatgggatcacatagtcgctgggacaccaccgcagtgaccaatggttatggtgacacagcaacggcgcctgcgtattccacccactcgcattctaatcatgggtatggagccggtgcatacggaagcagtggtcaccatcgcgaatag

SEQ ID NO: 6380 - protein, 713 aa, Muscodor strobelii
  misc_feature: SGI Peptide ID NO. 561866
  misc_feature (1)..(678): NCBI GI: 256726039 Blast Desc: NECHADRAFT_43529 [Nectria haematococca mpVI 77-13-4]
  misc_feature (1)..(705): NCBI GI: 27544802 Blast Desc: MedA homolog [Fusarium oxysporum]
  misc_feature (1)..(706): NCBI GI: 46111179 Blast Desc: FG02471.1 [Gibberella zeae PH-1]
  misc_feature (1)..(682): NCBI GI: 171676694 Blast Desc: protein product [Podospora anserina] gi|170936414|emb|CAP61071.1| protein product [Podospora anserina]
  misc_feature (1)..(645): NCBI GI: 116197246 Blast Desc: CHGG_05221 [Chaetomium globosum CBS 148.51] gi|88181134|gb|EAQ88602.1| CHGG_05221 [Chaetomium globosum CBS 148.51]
  misc_feature (1)..(705): NCBI GI: 85109302 Blast Desc: NCU07617 [Neurospora crassa OR74A] gi|28924490|gb|EAA33615.1| conserved [Neurospora crassa OR74A]
  misc_feature (22)..(583): NCBI GI: 156059306 Blast Desc: SS1G_03665 [Sclerotinia sclerotiorum 1980] gi|154701452|gb|EDO01191.1| SS1G_03665 [Sclerotinia sclerotiorum 1980]
  misc_feature (69)..(583): NCBI GI: 154317286 Blast Desc: BC1G_03545 [Botryotinia fuckeliana B05.10] gi|150844962|gb|EDN20155.1| BC1G_03545 [Botryotinia fuckeliana B05.10]
  misc_feature (128)..(582): NCBI GI: 115384240 Blast Desc: ATEG_01302 [Aspergillus terreus NIH2624] gi|114196359|gb|EAU38059.1| ATEG_01302 [Aspergillus terreus NIH2624]
  misc_feature (128)..(559): NCBI GI: 261199456 Blast Desc: transcriptional regulator Medusa [Ajellomyces dermatitidis SLH14081] gi|239594337|gb|EEQ76918.1| transcriptional regulator Medusa [Ajellomyces dermatitidis
MSAVKFNYPTYKLFEPPYQPERPIIIDVDAIESPETVTLQYEEAAARANGGDLRGDSPRGLLAIESCPKAQPPLMHSFDSERSYQDQYQFTTQPFATQQAENNAAAQLNHLAFAANNSASQYMQSVEPALISYQPASGVFGTKIMIKITAPYDLITSHFFLAFGSQKSPAQAVRDANDASGLVYLVTSDTPHLEDVIDHSGNVPLSLLIESVDGQTTLASINVGTFTYHNTQVVSAEVPHEAVTRSLSRSPEQEEQQRTSPSKPQDTDQLIDAAATNTYGYAPTAHQAVASNYDAAGYTSNNNMLSTYHRPSYGADYPRPPSLLKAPSWANPYGSSLTSPRSPSIHHLAIPRPSTTTLPNLSVPQLIRTSTLQQSGSSSGGQLNAYALYSTKAVLKINGDLDSMAKNWTPEECENGRRLVLFHKKQSGSTLQTTFKAVSVSERPPNSICISCIYWAEKGECFVTSVDTISLLEQLVVAPSRFSVEEKNRIRRNLEGFRPLTVSKAKADSEEFFKVIMGFPNPKPRNIEKDVKVFPWKILASALKKIIGKYSASPSPSPGLHHSGPSYHSVSGPSALLTPVSTTSPGLYGPPHTPAVAETSYSHHDSHTMASPRSLSGAPPSWGPYTTRTVSPSLKHSPQTGGLRIPSLPSYGQTDLRHHSGHSYGMGSHSRWDTTAVTNGYGDTATAPAYSTHSHSNHGYGAGAYGSSGHHRE

SEQ ID NO: 6381 - DNA, 2463 bp, Muscodor strobelii
  misc_feature: SGI EST ID NO. CUFF.15946.0
  misc_feature: Variant of the nucleotide sequence at SEQ ID NO 6379
gcaggctatacaagtaacaacaatatgctatccacttatcatcgtccttcctacggagccgactatcctcggccgccgtcactgctcaaagcaccgtcttgggcaaatccatacggctcatctttgacgtcgcctcgcagtcctagcatccaccacctcgcaataccgcgcccaagtacaacgaccctaccgaatctgagcgtaccacagctcatccgtaccagcactcttcagcaatcaggctcttcaagtggcgggcagttgaatgcgtatgccctgtattcaacgaaagcagtgctcaaaatcaatggagatcttgattcgatggccaagaactggacaccagaagaatgcgagaatggcaggcgacttgttctattccataagaagcaatccggatcaacacttcagacaactttcaaggcagtgtccgtcagcgagcgtccaccgaacagcatatgtattagttgcatctactgggcagagaagggcgagtgtttcgttaccagcgtggataccatttcattacttgagcagctcgtcgtggcgccgtcaagattcagcgtggaagagaagaacagaatacggcgaaacctagaaggattccggcctctgacggttagcaaggccaaggcggacagcgaagagtttttcaaagtcatcatgggatttcctaacccgaagccgcggaacatcgagaaagatgtcaaagtatttccctggaagatcttggcgtcagctttgaaaaagatcattggaaaatactctgcatcaccaagtccatctcccgggctacatcattcaggaccatcataccattcggtatcaggaccgtccgcgttgctcacgccggtcagcactacgagcccaggtctctatggaccgcctcatacaccagccgtagcagagacaagctactcgcatcacgactcgcatacgatggcatctcctcgctcgctctctggagcgccccccagctggggtccatacacaactcgaaccgtctcaccaagcctcaagcactcacctcagacaggaggacttcggattcctagtctaccatcatatggacagacggacctgagacatcactcaggacacagctacggcatgggatcacatagtcgctgggacaccaccgcagtgaccaatggttatggtgacacagcaacggcgcctgcgtattccacccactcgcattctaatcatgggtatggagccggtgcatacggaagcagtggtcaccatcgcgaatagtgtcatccacggtattcagctggcgatgcacagatattcatgtggacaacagagttgccaaagtcaacagctgcttcattcggtatacccagatggtggatgccgaaaattgtacactattcagcaccctttggttatttgatggtcaagggtggccttttacttgtattcacggacatttttggcgttttccggtccacacgataaggcgttctttctgcgttaagggttgaggggcgtgaggcgacggctgagaagcatgcatgactctacaaacacgagggaaagaatcagacgcgtggtcgcctggcgcgcgtgtctattctgattcaatcatttgcagccaacatgcgatggaaggatgcaattggtgtgggtggaggccgggagggcgaaatggactttgggtcagctgccgaatgacagccaagccaagcagccaatcacgacacattccacgactccatctccatatttctgtcatccctgaccctctcgtcctaccctgtacatcatctaccgacgccctactcgtatgcattcccttgcctcgttgagctagagatggctgggtgcggttgtactttatcaacaaacatgctcgaagcctaatattcaccgaactacatcctcttggtctcttattacccattgatctccaataacatcgacccattcacgcactccaaaccagctcttgtgctggtcgcacgcagtgaacatcaaccacacgcacttcgaactttacggcgcactcttttctctattcacttctctttaggtctattctcacacggcaggcttcatcactttcatttctacttttacactgtactattcaaccatcaggacttgcttcatcccattcatcttttgttttccgactgggcggggagttggttggatattgggcttttttagatgggaacggacagacaaggctgagacagacgggatcgatagatagacaggattggccaggacatggaatcggatgggggatgaagttacgaatgatagaagatcgggacttgtatctgatagctggggaacatcgggggaacgcaatctagcatagcattataccctcttccttaccttgcttctttctaccctcgatttgtttttcgctctggacgtaggagtacgtaggaggatagtattggctcgtgtaattatgtacggaaggaagaacagcgcgcgtcg

SEQ ID NO: 6382 - DNA, 4431 bp, Muscodor strobelii
  misc_feature: SGI cDNA ID NO. 561867
  misc_feature: Reduced expression when VOC is produced
  misc_feature: Encodes the peptide sequence at SEQ ID NO 6383
atgccttcgtcaaacttaccctccagctttgcttcggcagctgctggccaaaaccccaaccgtgatgccagagccggtgctagaggcgacggtcgcggcaacgggagcggagagtggtctagaccaggccgctcagctaacggcaccctcaccttgcgccgcacatcgacgacgccgtcaagccagacattcaaccagccaaacatgagcgacacggtctcctcagacgaccctgctgtgctagcagccatgcccgttggttctacagtcgtcgagagtgctgcctcacaaaaatactcccgtgacgagttacttaccatttttaataatatgtcacaaggcggccatccagaaccagtcgatgtttctagcttgttcgtggccggttggaatcctggccacggcacctcatctcgcggttggggcaagccaaatgatccacatgttgttcctcaggacccggaaacttgctgggatccccagggctctgccaaagctatgggactacaagagatgacggccgatgaaaaagagctcttgacttcggatgtcaactcgaccatgaaaccacctgctcagaataaagaggcagcccatcccagcggaggactgaatggccgaaaggcctctttctctcacggcacgaccaataactatggactttcgtcgccctcgacagcctcccgcccaggcacgcgacgtcgcgagaccaccgacaccaatcccttttctggtggcagcggcgcgctggtctcgccggtttccgccacccgtccccgtgatgcctcggctttttggttagatcggaagaccgtcgacagcaaggagtccatgtatgaggagcctgaggaggaagagcatgacgggcgcggcatgggcacgagacctcccgctgccggcccttctcggaccaacactaccaccagtacttcgggatttccgatttctgggcagtggaatacctccaccaccaccccaggctccatgtctggtcttggcagctttggaaacttcgcgctgcctggttcgtctgtcggggaaaagcggcctggaaatgttcgcggcgaaagccgtctggcccacctgctcccccagaacaacacagacaatacaggcaacagaccgagcgacggttcgtctgccatcgacccgaatcgatcttggcgatctcgaccacgcaccgacacggatccgtttggcgatgatggcggcctctcgggaagtgctgtccttgggggcgctcaagatactagtcctccgcccatgtctcatccgcctcttcacatgcaatcatatgacacaccagtgaagggttccgctggagatttcgggatggctggactcaacctgaatgaccatgatcaagatccactcagtccttctgatacgaatcccttccgcagcccgcccggcgatcgaggtgaccatgaagaggggtctgacaagccacaagggttccccggcagcggagacgcgaatgtgaactacggaggtggtttccctcgagcttttccccatcccgggtttgaaggcagtgaccgtagtcagacatccagcgttggcgctaaagcttatcctaatctaggcaacctctcaggctggccttcatcgagcacgccggaccgcgaacgagctccctttgccggctttggtggttccctatttggacaggttggcgacatgcaatctccagggctcggaaacctgggcggcgtgtttggtcctgcctcggcaactggcctcgctggctcgggatccatcagtcgtggcagtaaattgggctctctgtttcctccggccatgcaagcacagatgcaatcacatgataatgaaggcctgcgcgactcgattcctgacctacgccagagtaatccccttggtgctattggacgcaaccccttgaacgatccttcgagggaggtggaaagcccgatgagaaccgacagaccaggtttcaccgatattttcgctcatatggccgagcccggtcgaacgccctcggccgcggaatccgggctacatggtggtgctacgggtacacctggccaagcctatcctggtggaggtagtgcaccatcattccctccactccagtcgcatgaacccgcatctgcgcaggcgcgtaccatggtcatgccagatcgcatgcgatggacttaccttgacccccaaggccgtcaacagggccccttcaccggccttgaaatgaacgattggttcaagggaaatttcttcacgaatgacctcagagtgaagaagctggaggatagcgagtttgaacctctggggcaactcattaggcgaattggtaattctagggagccttttctcgttcctcagattggtattcctcatggccctccggcgcagggagcgcagttccctccaaacgccagcggcgtcatccagcctcctctggtcaatgctttcccaagcttcggacgtacattgactgctgaagagcagaataatctcgagagacgaaagcaagaggaacagtactatatggcccgtcatcgcgagtttataacgaatcagcaggcaatgaataggatgccaatgcagaacatccctggcttaaaccatcactccagcgcccatagtcttcacagtcaaccgagttttggaagcatgacttcgcccattacaatgcctcctcaggcgcctatcggcccaatcggaacagggggttcttttttcgatcagctagccacacgtcaacccgccgcgcatggtgaatcccggtcaagcctcgacatgtttcgcgaggaggagcttacacatttgaccggtcccgagcgccaggtgttggctagcatgcaaactacgggagtgctcggcgggggcctctctcaacaacccattggtgccccttctcccgaatccagtctgaggggccggcttccaggaagcagtgagctcaccgaagataacgagggatttaaagatcggctgcaggagtttgagaagattcaggcgcgatatgaagctgagcgaagcgtggcatcgaattctcgacaacaagaccagaatgagcatgtctcaactcatcagcagcccgctgctggttccgagtttgtcgagggtctttctcctgagcaaatgcccgagcctgaaccagccagacaaggcaataagacgacgggggcgtcaaaccaggagtttagagaataccagcaagctcaggctgcggctgcggctgcgaaactgagtggattgcctatgtccttcccacctccaccatctggcactcctcttcctgctcctgctccccagcgtgttcgatccaacctacctgaacaatatgcggctagctcccgctctggtaccccggatatcggttctgctacatctacccaagctcctcctccccttgccccttgggccaaagagagtggagtggaggcacacaaggggccgagtcttaaggaaatccagcaggctgaggctctcaaggctgctaaggcagaggaagccgccgctttggcccgccgaattcagcttgaaatggaagccgccgcagagcggattagagtagttcaggctgcgccagggctgccaaccaccagtacatggggaacagcatcccccgtctccgccggaccatccagcagcagcccctgggctaagcccgcggcaggcaagggcgccaccccaagtctaccaacaccaagcgcatctgacaagaagaagactcttgccgacatccagcgcgaggaagaggcacgcaaacaaaaggctaaggagatatcggctcaaactggagctccaacgagcgcaggtaaacgctatgccgaccttgccagtaagattggcaacgcggctggtggtccggctgcaaacaacagtgctactactgcttctacgggctcaggttgggcaacagtcggagctggtggcaaggtcaaaggtgcacctacaggccccgcgtcccaagcacgatcaaccagcacagccaacgtgaagcctgcgcaggcggctgctgctccttcacctcgctcgactcccaagaccgctactacggtagtgggatcgggccgcacagaagccatggctgactttaagaaatgggttcataatgagcttgtgcgcgaaatcaatgccgatgtcaatattaacgatttgacatctacgttgcttgcactcccgttgcagtccgatattgttgccgatgtagtgtacgctagttccggaaccatcgatgggcaacgctttgtgcaagagttcattcgtcgcaagaaattagctgagaagggagtcgtcgagaagacaacaacggacagctccacggccagcacccaagctagcagcgcaggtggctggaacgaagtggcgaagaagagcgctcctaaagatgcttctactgatgccaatgcggcacaaggtgctagcttcaagctggtacctggacgtaagaagggcaagaaatag

SEQ ID NO: 6383 - protein, 1476 aa, Muscodor strobelii
  misc_feature: SGI Peptide ID NO. 561867
  misc_feature (716)..(771): Pfam Id: PF02213 Pfam Desc: GYF domain
  misc_feature (1)..(1476): NCBI GI: 256725606 Blast Desc: NECHADRAFT_104706 [Nectria haematococca mpVI 77-13-4]
  misc_feature (1)..(1476): NCBI GI: 85091072 Blast Desc: NCU09657 [Neurospora crassa OR74A] gi|28920105|gb|EAA29487.1| [Neurospora crassa OR74A]
  misc_feature (21)..(1476): NCBI GI: 171676674 Blast Desc: protein product [Podospora anserina] gi|170936404|emb|CAP61061.1| protein product [Podospora anserina]
  misc_feature (5)..(1447): NCBI GI: 116197252 Blast Desc: CHGG_05224 [Chaetomium globosum CBS 148.51] gi|88181137|gb|EAQ88605.1| CHGG_05224 [Chaetomium globosum CBS 148.51]
  misc_feature (50)..(1476): NCBI GI: 145602763 Blast Desc: MGG_09850 [Magnaporthe grisea 70-15] gi|145011157|gb|EDJ95813.1| MGG_09850 [Magnaporthe grisea 70-15]
  misc_feature (1)..(1010): NCBI GI: 46116684 Blast Desc: FG04184.1 [Gibberella zeae PH-1]
  misc_feature (21)..(1476): NCBI GI: 156059356 Blast Desc: SS1G_03690 [Sclerotinia sclerotiorum 1980] gi|154701477|gb|EDO01216.1| SS1G_03690 [Sclerotinia sclerotiorum 1980]
  misc_feature (21)..(1476): NCBI GI: 154317224 Blast Desc: BC1G_03514 [Botryotinia fuckeliana B05.10] gi|150844931|gb|EDN20124.1| BC1G_03514 [Botryotinia fuckeliana B05.10]
  misc_feature (1)..(1447): NCBI GI: 239615499 Blast Desc: GYF domain-containing protein [Ajellomyces dermatitidis ER-3]
  misc_feature (1)..(1447): NCBI GI: 261199446 Blast Desc: GYF domain-containing protein [Ajellomyces dermatitidis SLH14081] gi|239594332|gb|EEQ76913.1| GYF domain-containing protein [Ajellomyces dermatitidis SLH14081]
  misc_feature: Useful for introducing or modulating the production of volatile compounds
MPSSNLPSSFASAAAGQNPNRDARAGARGDGRGNGSGEWSRPGRSANGTLTLRRTSTTPSSQTFNQPNMSDTVSSDDPAVLAAMPVGSTVVESAASQKYSRDELLTIFNNMSQGGHPEPVDVSSLFVAGWNPGHGTSSRGWGKPNDPHVVPQDPETCWDPQGSAKAMGLQEMTADEKELLTSDVNSTMKPPAQNKEAAHPSGGLNGRKASFSHGTTNNYGLSSPSTASRPGTRRRETTDTNPFSGGSGALVSPVSATRPRDASAFWLDRKTVDSKESMYEEPEEEEHDGRGMGTRPPAAGPSRTNTTTSTSGFPISGQWNTSTTTPGSMSGLGSFGNFALPGSSVGEKRPGNVRGESRLAHLLPQNNTDNTGNRPSDGSSAIDPNRSWRSRPRTDTDPFGDDGGLSGSAVLGGAQDTSPPPMSHPPLHMQSYDTPVKGSAGDFGMAGLNLNDHDQDPLSPSDTNPFRSPPGDRGDHEEGSDKPQGFPGSGDANVNYGGGFPRAFPHPGFEGSDRSQTSSVGAKAYPNLGNLSGWPSSSTPDRERAPFAGFGGSLFGQVGDMQSPGLGNLGGVFGPASATGLAGSGSISRGSKLGSLFPPAMQAQMQSHDNEGLRDSIPDLRQSNPLGAIGRNPLNDPSREVESPMRTDRPGFTDIFAHMAEPGRTPSAAESGLHGGATGTPGQAYPGGGSAPSFPPLQSHEPASAQARTMVMPDRMRWTYLDPQGRQQGPFTGLEMNDWFKGNFFTNDLRVKKLEDSEFEPLGQLIRRIGNSREPFLVPQIGIPHGPPAQGAQFPPNASGVIQPPLVNAFPSFGRTLTAEEQNNLERRKQEEQYYMARHREFITNQQAMNRMPMQNIPGLNHHSSAHSLHSQPSFGSMTSPITMPPQAPIGPIGTGGSFFDQLATRQPAAHGESRSSLDMFREEELTHLTGPERQVLASMQTTGVLGGGLSQQPIGAPSPESSLRGRLPGSSELTEDNEGFKDRLQEFEKIQARYEAERSVASNSRQQDQNEHVSTHQQPAAGSEFVEGLSPEQMPEPEPARQGNKTTGASNQEFREYQQAQAAAAAAKLSGLPMSFPPPPSGTPLPAPAPQRVRSNLPEQYAASSRSGTPDIGSATSTQAPPPLAPWAKESGVEAHKGPSLKEIQQAEALKAAKAEEAAALARRIQLEMEAAAERIRVVQAAPGLPTTSTWGTASPVSAGPSSSSPWAKPAAGKGATPSLPTPSASDKKKTLADIQREEEARKQKAKEISAQTGAPTSAGKRYADLASKIGNAAGGPAANNSATTASTGSGWATVGAGGKVKGAPTGPASQARSTSTANVKPAQAAAAPSPRSTPKTATTVVGSGRTEAMADFKKWVHNELVREINADVNINDLTSTLLALPLQSDIVADVVYASSGTIDGQRFVQEFIRRKKLAEKGVVEKTTTDSSTASTQASSAGGWNEVAKKSAPKDASTDANAAQGASFKLVPGRKKGKK

SEQ ID NO: 6384 - DNA, 5252 bp, Muscodor strobelii
  misc_feature: SGI EST ID NO. CUFF.16077.1
  misc_feature: Variant of the nucleotide sequence at SEQ ID NO 6382
tgggagtgccatcacgacgatccgcacacatcatcaaaccacagccgcccactgctttacagctttacagctctcccgccacgcgacaaccatctgtatctgcatctgcccttagcctagcgttacgagcagtgttatgcaccccatcgctatcaaccactgtcccgtgtaattgatccccatcagctgcacgtccagaacaccgcatcctggaaccatccatcccctgcgacggagacaaccacgcacgcgtgcgcaaccgcgaattgctccctctctgcaacaccacagaccgcacgacgccgcttcatctcgccccgccgacaatctgcgtcgatccccgggctctgtatatcggatttgtgctatttgtgctgtcagaagatccgcattgtgctcgtcctgaccgcaataccgcaacactcgcctcttgacgtctccccggactcccccttactaccatgatgccttcgtcaaacttaccctccagctttgcttcggcagctgctggccaaaaccccaaccgtgatgccagagccggtgctagaggcgacggtcgcggcaacgggagcggagagtggtctagaccaggccgctcagctaacggcaccctcaccttgcgccgcacatcgacgacgccgtcaagccagacattcaaccagccaaacatgagcgacacggtctcctcagacgaccctgctgtgctagcagccatgcccgttggttctacagtcgtcgagagtgctgcctcacaaaaatactcccgtgacgagttacttaccatttttaataatatgtcacaaggcggccatccagaaccagtcgatgtttctagcttgttcgtggccggttggaatcctggccacggcacctcatctcgcggttggggcaagccaaatgatccacatgttgttcctcaggacccggaaacttgctgggatccccagggctctgccaaagctatgggactacaagagatgacggccgatgaaaaagagctcttgacttcggatgtcaactcgaccatgaaaccacctgctcagaataaagaggcagcccatcccagcggaggactgaatggccgaaaggcctctttctctcacggcacgaccaataactatggactttcgtcgccctcgacagcctcccgcccaggcacgcgacgtcgcgagaccaccgacaccaatcccttttctggtggcagcggcgcgctggtctcgccggtttccgccacccgtccccgtgatgcctcggctttttggttagatcggaagaccgtcgacagcaaggagtccatgtatgaggagcctgaggaggaagagcatgacgggcgcggcatgggcacgagacctcccgctgccggcccttctcggaccaacactaccaccagtacttcgggatttccgatttctgggcagtggaatacctccaccaccaccccaggctccatgtctggtcttggcagctttggaaacttcgcgctgcctggttcgtctgtcggggaaaagcggcctggaaatgttcgcggcgaaagccgtctggcccacctgctcccccagaacaacacagacaatacaggcaacagaccgagcgacggttcgtctgccatcgacccgaatcgatcttggcgatctcgaccacgcaccgacacggatccgtttggcgatgatggcggcctctcgggaagtgctgtccttgggggcgctcaagatactagtcctccgcccatgtctcatccgcctcttcacatgcaatcatatgacacaccagtgaagggttccgctggagatttcgggatggctggactcaacctgaatgaccatgatcaagatccactcagtccttctgatacgaatcccttccgcagcccgcccggcgatcgaggtgaccatgaagaggggtctgacaagccacaagggttccccggcagcggagacgcgaatgtgaactacggaggtggtttccctcgagcttttccccatcccgggtttgaaggcagtgaccgtagtcagacatccagcgttggcgctaaagcttatcctaatctaggcaacctctcaggctggccttcatcgagcacgccggaccgcgaacgagctccctttgccggctttggtggttccctatttggacaggttggcgacatgcaatctccagggctcggaaacctgggcggcgtgtttggtcctgcctcggcaactggcctcgctggctcgggatccatcagtcgtggcagtaaattgggctctctgtttcctccggccatgcaagcacagatgcaatcacatgataatgaaggcctgcgcgactcgattcctgacctacgccagagtaatccccttggtgctattggacgcaaccccttgaacgatccttcgagggaggtggaaagcccgatgagaaccgacagaccaggtttcaccgatattttcgctcatatggccgagcccggtcgaacgccctcggccgcggaatccgggctacatggtggtgctacgggtacacctggccaagcctatcctggtggaggtagtgcaccatcattccctccactccagtcgcatgaacccgcatctgcgcaggcgcgtaccatggtcatgccagatcgcatgcgatggacttaccttgacccccaaggccgtcaacagggccccttcaccggccttgaaatgaacgattggttcaagggaaatttcttcacgaatgacctcagagtgaagaagctggaggatagcgagtttgaacctctggggcaactcattaggcgaattggtaattctagggagccttttctcgttcctcagattggtattcctcatggccctccggcgcagggagcgcagttccctccaaacgccagcggcgtcatccagcctcctctggtcaatgctttcccaagcttcggacgtacattgactgctgaagagcagaataatctcgagagacgaaagcaagaggaacagtactatatggcccgtcatcgcgagtttataacgaatcagcaggcaatgaataggatgccaatgcagaacatccctggcttaaaccatcactccagcgcccatagtcttcacagtcaaccgagttttggaagcatgacttcgcccattacaatgcctcctcaggcgcctatcggcccaatcggaacagggggttcttttttcgatcagctagccacacgtcaacccgccgcgcatggtgaatcccggtcaagcctcgacatgtttcgcgaggaggagcttacacatttgaccggtcccgagcgccaggtgttggctagcatgcaaactacgggagtgctcggcgggggcctctctcaacaacccattggtgccccttctcccgaatccagtctgaggggccggcttccaggaagcagtgagctcaccgaagataacgagggatttaaagatcggctgcaggagtttgagaagattcaggcgcgatatgaagctgagcgaagcgtggcatcgaattctcgacaacaagaccagaatgagcatgtctcaactcatcagcagcccgctgctggttccgagtttgtcgagggtctttctcctgagcaaatgcccgagcctgaaccagccagacaaggcaataagacgacgggggcgtcaaaccaggagtttagagaataccagcaagctcaggctgcggctgcggctgcgaaactgagtggattgcctatgtccttcccacctccaccatctggcactcctcttcctgctcctgctccccagcgtgttcgatccaacctacctgaacaatatgcggctagctcccgctctggtaccccggatatcggttctgctacatctacccaagctcctcctccccttgccccttgggccaaagagagtggagtggaggcacacaaggggccgagtcttaaggaaatccagcaggctgaggctctcaaggctgctaaggcagaggaagccgccgctttggcccgccgaattcagcttgaaatggaagccgccgcagagcggattagagtagttcaggctgcgccagggctgccaaccaccagtacatggggaacagcatcccccgtctccgccggaccatccagcagcagcccctgggctaagcccgcggcaggcaagggcgccaccccaagtctaccaacaccaagcgcatctgacaagaagaagactcttgccgacatccagcgcgaggaagaggcacgcaaacaaaaggctaaggagatatcggctcaaactggagctccaacgagcgcaggtaaacgctatgccgaccttgccagtaagattggcaacgcggctggtggtccggctgcaaacaacagtgctactactgcttctacgggctcaggttgggcaacagtcggagctggtggcaaggtcaaaggtgcacctacaggccccgcgtcccaagcacgatcaaccagcacagccaacgtgaagcctgcgcaggcggctgctgctccttcacctcgctcgactcccaagaccgctactacggtagtgggatcgggccgcacagaagccatggctgactttaagaaatgggttcataatgagcttgtgcgcgaaatcaatgccgatgtcaatattaacgatttgacatctacgttgcttgcactcccgttgcagtccgatattgttgccgatgtagtgtacgctagttccggaaccatcgatgggcaacgctttgtgcaagagttcattcgtcgcaagaaattagctgagaagggagtcgtcgagaagacaacaacggacagctccacggccagcacccaagctagcagcgcaggtggctggaacgaagtggcgaagaagagcgctcctaaagatgcttctactgatgccaatgcggcacaaggtgctagcttcaagctggtacctggacgtaagaagggcaagaaatagatgaccgatggctacatgtggttcatacacttgaccccacgatttcttgcttaggtactgttgcattatacaaagctgtatcatcttaagggttcctgtttggcttcgtcaacattatgatatggccgagatggatcatgacgtggaaacggcgtctatttgcctcctaaactgcacactgtcttgttaagcgcttgcagttgctaccggtcaaatgtccatcagtcttgtgtgggaatacatgttagttgtcgtgtatgcattgtagtacgattactgcactcgatacacagtgtatctttgtcagtagtagccttcagtagcaaaataaggagcgagattcttgagaacgtcgta

SEQ ID NO: 6385 - DNA, 3213 bp, Muscodor strobelii
  misc_feature: SGI cDNA ID NO. 561868
  misc_feature: Reduced expression when VOC is produced
  misc_feature: Encodes the peptide sequence at SEQ ID NO 6386
atggcgacaacgaacggcagcgccaaaggccagaatggggcggctacgacctctgagttcggccatcgctctcttccacacctcgtagatgagatggcgaagacaaacccggatcttgaatgtttctctgtaccacgaagctctgatccaaaggatggttggaaatatatctcttggaagcaatacgccaacgccatcaactacgtagcccatagaatcctcgacgtaaacggaagagcgccagagggcacacatcccaccatcgcctacatcgggcccaacgacccccgctacgtcgtcgtgaccctcgccgccgtcaaagccgggtataaggtgctcttcatctcccctcgtaattcaatggaaggtcaaatgtccctcttcgagaaaacggagtgtacatcgttggcttatccaaaatcacaccgcaagattgtccaaccatggctattagaacaccatatgagtgccgttgaggtggggaccctcgatagttggtttccagaagaagaaatagagaatgtcccctatgagaagacttgggaaaagtcggaatgggatcctttggtcgtgcttcacacttctggatcgacgggcattccaaagccaatcgttgttcgacagggcatgatagcgatttctgatctgtaccatgatgtaccggattggcaagggacggaaattttcgttaagggtttcgcgacccgggctaaaaagatattcttgcccatgcctatgttccacgctgccggactgtacatcttcctgacggctggtctctactgggggactcctatcgcctttggactacccgaccgtccactttcgtcggactctgttgttgagtgtcttcaatacaacggcgcggatgcggcagtcgttccaccagcgatcctagaagatatgagccaaagcgagcactatgcgcaagtcctcaagaagctgtcgtatgttgcatttggcggtggcaatctggctcgagacgccggaaaccgtctggttgagcaggggataactctgtacaaccttatctctgcaactgagtttacccccttcccaatctacttgcaaaatgacaccaagctctggcaatggtttgttatcaatgacgatcagtttggtgccgattggcgtaaagtcgagggagaagatgatgtctatcgccttgtcatcgttaggaaagctgaacatcctggctttcagggatttttctacaccttccctgatgatgaggaatatgacacgaaagatatgtacaggaaacatcctacgctacctaatcactggttgtatgctggacgatctgataacattattgtgttttccaacggtgaaaaactcaatccagtaaccatcgaggagatcgtggaagaccacccagatgccaaaggcgcaattgtagtgggcgcagggcgcttccaaccggctcttatcctcgaaccaagaattcatcctcaaagcgacagcgaaaaacaagagcttctggaccgcgtttggccacatgtcgtcaaagccaataaggagacagtggctcatggtcagatcggacgggatctcattatgatctctaacccagagaagccattcctccgcgctggcaaaggcacaattcagaaagctggcacgttgacattgtacaaggatgagatcgacaatttgtacgagaacgctggacgggattctggcagcgaagcaccgaagatagatgtgagctcggaggagactttggttgcttcgatccgggagttgttcgagactcgactcggtatcgagacaaagattgagccagatgccgactttttctctggcggtattgatagcatgcatgtcatcaatgcttcaagacttattcgctcaggacttgaagcggctggccatcatgtggacgcaagtgcactggcaactcgtgtaatctacggcaacccaacccctcggagattggctagctacattttctctctcgtgagcgatggcggcaagacctcggacgagagcgaagaagaccatgaaattagcgctatgaaagcactatgggacaaatacacccgtgacccagtcaaggccgagcccggtcgacctgacccgcttgacgatggccaaactgttctactgacgggctctaccggtatgctcggttcatacatgttggaccagatggtaagaaaccccgccatcaagcggatcttctgcctcaaccgagccgaggacggtggacagaggcagcagtaccacgcgatgcagagccgtggacttacgactgactacgcatcgaaaaccacattcttccatgccgatatgttccgttctgactttgggctcccacgcaagacttacgaggagctacagaagacagcagatcggttcatacacaatgcttggccagtcaacttcaacatcccagtagagtcgtttgatccgcacctaaggggtgtacgcaatgtggccgacttcgccgcacaagctgagaagcgcgtggcagtagtattcatctcgtctatcggtacaggtgatcgttgggacgccagtacaggttcatttcccgagaagcgactcgaagacctacatctcgcaagcggcgggtatggaagaagtaagcttattggtagtttgattcttgaagatgtcgccaaggaaggcgatttcccggcggctatcatccgcgtcggacagatcgccgggcccgaaggcgagaaaggattctggaacaagcaagaatggctgccgagcatcattgctagtagtttgtacatgggggctcttcctaagaacctgggcgccatggatagagttgactggacaccagtggagagcattgcaggtctcgttcttgacgtgattggggtgtctcaaaaggtcccagcgaaggacatcaacggctattatcacggcgtcaatccgtcatcaacagaatggtcaaagctcgcactcgctgtgcaggacttctttggcaaagatcgcatctccgaacttatcagcttccaggagtgggttgagaggcttgacaagagccagacaaatgacacgcagtcactcgaaaagaacccgggagtgaagcttttggactcgtatcggggcatggcgagtgcggaggcaaatgcaaatcatgtggtgtttgatatggagagggcgaaggaacgcagtccttcagcgaggagtgcgaaggtcgtaacgcctgagctgatgaggcattggtgtaagcagtggaacttctag

SEQ ID NO: 6386 - protein, 1070 aa, Muscodor strobelii
  misc_feature: SGI Peptide ID NO. 561868
  misc_feature (58)..(467): Pfam Id: PF00501 Pfam Desc: AMP-binding enzyme
  misc_feature (702)..(959): Pfam Id: PF01370 Pfam Desc: NAD dependent epimerase/dehydratase family
  misc_feature (704)..(942): Pfam Id: PF07993 Pfam Desc: Male sterility protein
  misc_feature (58)..(352): Pfam Id: PF00501 Pfam Desc: AMP-binding enzyme
  misc_feature (17)..(1070): NCBI GI: 116178826 Blast Desc: CHGG_00041 [Chaetomium globosum CBS 148.51] gi|88184338|gb|EAQ91806.1| CHGG_00041 [Chaetomium globosum CBS 148.51]
  misc_feature (16)..(1070): NCBI GI: 171679130 Blast Desc: protein product [Podospora anserina] gi|170937636|emb|CAP62295.1| protein product [Podospora anserina]
  misc_feature (20)..(1070): NCBI GI: 85075756 Blast Desc: NCU05000 [Neurospora crassa OR74A] gi|28916838|gb|EAA26584.1| [Neurospora crassa OR74A]
  misc_feature (22)..(1070): NCBI GI: 46138205 Blast Desc: FG10617.1 [Gibberella zeae PH-1]
  misc_feature (19)..(1070): NCBI GI: 169783030 Blast Desc: [Aspergillus oryzae RIB40] gi|83774721|dbj|BAE64844.1| protein product [Aspergillus oryzae]
  misc_feature (15)..(1070): NCBI GI: 145611438 Blast Desc: MGG_00385 [Magnaporthe grisea 70-15] gi|145018724|gb|EDK03003.1| MGG_00385 [Magnaporthe grisea 70-15]
  misc_feature (20)..(1070): NCBI GI: 39941158 Blast Desc: MGG_05491 [Magnaporthe grisea 70-15] gi|145022151|gb|EDK06171.1| MGG_05491 [Magnaporthe grisea 70-15]
  misc_feature (2)..(970): NCBI GI: 238492773 Blast Desc: NRPS-like enzyme, [Aspergillus flavus NRRL3357] gi|220696117|gb|EED52459.1| NRPS-like enzyme, [Aspergillus flavus NRRL3357]
  misc_feature (20)..(1069): NCBI GI: 156063804 Blast Desc: SS1G_02020 [Sclerotinia sclerotiorum 1980] gi|154697354|gb|EDN97092.1| SS1G_02020 [Sclerotinia sclerotiorum 1980]
  misc_feature (17)..(1068): NCBI GI: 154318668 Blast Desc: BC1G_02723 [Botryotinia fuckeliana B05.10] gi|150857853|gb|EDN33045.1| BC1G_02723 [Botryotinia fuckeliana B05.10]
  misc_feature: Useful for introducing or modulating the production of volatile compounds
MATTNGSAKGQNGAATTSEFGHRSLPHLVDEMAKTNPDLECFSVPRSSDPKDGWKYISWKQYANAINYVAHRILDVNGRAPEGTHPTIAYIGPNDPRYVVVTLAAVKAGYKVLFISPRNSMEGQMSLFEKTECTSLAYPKSHRKIVQPWLLEHHMSAVEVGTLDSWFPEEEIENVPYEKTWEKSEWDPLVVLHTSGSTGIPKPIVVRQGMIAISDLYHDVPDWQGTEIFVKGFATRAKKIFLPMPMFHAAGLYIFLTAGLYWGTPIAFGLPDRPLSSDSVVECLQYNGADAAVVPPAILEDMSQSEHYAQVLKKLSYVAFGGGNLARDAGNRLVEQGITLYNLISATEFTPFPIYLQNDTKLWQWFVINDDQFGADWRKVEGEDDVYRLVIVRKAEHPGFQGFFYTFPDDEEYDTKDMYRKHPTLPNHWLYAGRSDNIIVFSNGEKLNPVTIEEIVEDHPDAKGAIVVGAGRFQPALILEPRIHPQSDSEKQELLDRVWPHVVKANKETVAHGQIGRDLIMISNPEKPFLRAGKGTIQKAGTLTLYKDEIDNLYENAGRDSGSEAPKIDVSSEETLVASIRELFETRLGIETKIEPDADFFSGGIDSMHVINASRLIRSGLEAAGHHVDASALATRVIYGNPTPRRLASYIFSLVSDGGKTSDESEEDHEISAMKALWDKYTRDPVKAEPGRPDPLDDGQTVLLTGSTGMLGSYMLDQMVRNPAIKRIFCLNRAEDGGQRQQYHAMQSRGLTTDYASKTTFFHADMFRSDFGLPRKTYEELQKTADRFIHNAWPVNFNIPVESFDPHLRGVRNVADFAAQAEKRVAVVFISSIGTGDRWDASTGSFPEKRLEDLHLASGGYGRSKLIGSLILEDVAKEGDFPAAIIRVGQIAGPEGEKGFWNKQEWLPSIIASSLYMGALPKNLGAMDRVDWTPVESIAGLVLDVIGVSQKVPAKDINGYYHGVNPSSTEWSKLALAVQDFFGKDRISELISFQEWVERLDKSQTNDTQSLEKNPGVKLLDSYRGMASAEANANHVVFDMERAKERSPSARSAKVVTPELMRHWCKQWNF

SEQ ID NO: 6387 - DNA, 3713 bp, Muscodor strobelii
  misc_feature: SGI EST ID NO. CUFF.16675.0
  misc_feature: Variant of the nucleotide sequence at SEQ ID NO 6385
cagacatctacagcatagcaaccactaatacactttttacatttcaaatacatatctcatacgacagacaatctactagatctacctggattaaataagacacttgctttgagagaaccgcatattctaaactcgcatatacatatacttgccacacgactattcacacaaactatctaccaaaaccttcttgaacgaattcgaaaacaaaaaagtaatggcgacaacgaacggcagcgccaaaggccagaatggggcggctacgacctctgagttcggccatcgctctcttccacacctcgtagatgagatggcgaagacaaacccggatcttgaatgtttctctgtaccacgaagctctgatccaaaggatggttggaaatatatctcttggaagcaatacgccaacgccatcaactacgtagcccatagaatcctcgacgtaaacggaagagcgccagagggcacacatcccaccatcgcctacatcgggcccaacgacccccgctacgtcgtcgtgaccctcgccgccgtcaaagccgggtataaggtgctcttcatctcccctcgtaattcaatggaaggtcaaatgtccctcttcgagaaaacggagtgtacatcgttggcttatccaaaatcacaccgcaagattgtccaaccatggctattagaacaccatatgagtgccgttgaggtggggaccctcgatagttggtttccagaagaagaaatagagaatgtcccctatgagaagacttgggaaaagtcggaatgggatcctttggtcgtgcttcacacttctggatcgacgggcattccaaagccaatcgttgttcgacagggcatgatagcgatttctgatctgtaccatgatgtaccggattggcaagggacggaaattttcgttaagggtttcgcgacccgggctaaaaagatattcttgcccatgcctatgttccacgctgccggactgtacatcttcctgacggctggtctctactgggggactcctatcgcctttggactacccgaccgtccactttcgtcggactctgttgttgagtgtcttcaatacaacggcgcggatgcggcagtcgttccaccagcgatcctagaagatatgagccaaagcgagcactatgcgcaagtcctcaagaagctgtcgtatgttgcatttggcggtggcaatctggctcgagacgccggaaaccgtctggttgagcaggggataactctgtacaaccttatctctgcaactgagtttacccccttcccaatctacttgcaaaatgacaccaagctctggcaatggtttgttatcaatgacgatcagtttggtgccgattggcgtaaagtcgagggagaagatgatgtctatcgccttgtcatcgttaggaaagctgaacatcctggctttcagggatttttctacaccttccctgatgatgaggaatatgacacgaaagatatgtacaggaaacatcctacgctacctaatcactggttgtatgctggacgatctgataacattattgtgttttccaacggtgaaaaactcaatccagtaaccatcgaggagatcgtggaagaccacccagatgccaaaggcgcaattgtagtgggcgcagggcgcttccaaccggctcttatcctcgaaccaagaattcatcctcaaagcgacagcgaaaaacaagagcttctggaccgcgtttggccacatgtcgtcaaagccaataaggagacagtggctcatggtcagatcggacgggatctcattatgatctctaacccagagaagccattcctccgcgctggcaaaggcacaattcagaaagctggcacgttgacattgtacaaggatgagatcgacaatttgtacgagaacgctggacgggattctggcagcgaagcaccgaagatagatgtgagctcggaggagactttggttgcttcgatccgggagttgttcgagactcgactcggtatcgagacaaagattgagccagatgccgactttttctctggcggtattgatagcatgcatgtcatcaatgcttcaagacttattcgctcaggacttgaagcggctggccatcatgtggacgcaagtgcactggcaactcgtgtaatctacggcaacccaacccctcggagattggctagctacattttctctctcgtgagcgatggcggcaagacctcggacgagagcgaagaagaccatgaaattagcgctatgaaagcactatgggacaaatacacccgtgacccagtcaaggccgagcccggtcgacctgacccgcttgacgatggccaaactgttctactgacgggctctaccggtatgctcggttcatacatgttggaccagatggtaagaaaccccgccatcaagcggatcttctgcctcaaccgagccgaggacggtggacagaggcagcagtaccacgcgatgcagagccgtggacttacgactgactacgcatcgaaaaccacattcttccatgccgatatgttccgttctgactttgggctcccacgcaagacttacgaggagctacagaagacagcagatcggttcatacacaatgcttggccagtcaacttcaacatcccagtagagtcgtttgatccgcacctaaggggtgtacgcaatgtggccgacttcgccgcacaagctgagaagcgcgtggcagtagtattcatctcgtctatcggtacaggtgatcgttgggacgccagtacaggttcatttcccgagaagcgactcgaagacctacatctcgcaagcggcgggtatggaagaagtaagcttattggtagtttgattcttgaagatgtcgccaaggaaggcgatttcccggcggctatcatccgcgtcggacagatcgccgggcccgaaggcgagaaaggattctggaacaagcaagaatggctgccgagcatcattgctagtagtttgtacatgggggctcttcctaagaacctgggcgccatggatagagttgactggacaccagtggagagcattgcaggtctcgttcttgacgtgattggggtgtctcaaaaggtcccagcgaaggacatcaacggctattatcacggcgtcaatccgtcatcaacagaatggtcaaagctcgcactcgctgtgcaggacttctttggcaaagatcgcatctccgaacttatcagcttccaggagtgggttgagaggcttgacaagagccagacaaatgacacgcagtcactcgaaaagaacccgggagtgaagcttttggactcgtatcggggcatggcgagtgcggaggcaaatgcaaatcatgtggtgtttgatatggagagggcgaaggaacgcagtccttcagcgaggagtgcgaaggtcgtaacgcctgagctgatgaggcattggtgtaagcagtggaacttctaggctttactgatatcaataaggagttctggaaggatctgagatttaaagggaaagacatctgcattaatatgaaaagggtatggtgcagtgtctatttggagttttcttccagggtgtcacagatattgtcaataattgactttttcacaaatttccatatcgactcaacttctgcccatacaagcgatgataaatgagcacagtaaagttagcatgatcgagatgttcatttccggaatactatgtaaacttagttgaataaagatggctcattatgttttca

SEQ ID NO: 6388 - DNA, 435 bp, Muscodor strobelii
  misc_feature: SGI cDNA ID NO. 561869
  misc_feature: Reduced expression when VOC is produced
  misc_feature: Encodes the peptide sequence at SEQ ID NO 6389
atggatagagttgactggacaccagtggagagcattgcaggtctcgttcttgacgtgattggggtgtctcaaaaggtcccagcgaaggacatcaacggctattatcacggcgtcaatccgtcatcaacagaatggtcaaagctcgcactcgctgtgcaggacttctttggcaaagatcgcatctccgaacttatcagcttccaggagtgggttgagaggcttgacaagagccagacaaatgacacgcagtcactcgaaaagaacccgggagtgaagcttttggactcgtatcggggcatggcgagtgcggaggcaaatgcaaatcatgtggtgtttgatatggagagggcgaaggaacgcagtccttcagcgaggagtgcgaaggtcgtaacgcctgagctgatgaggcattggtgtaagcagtggaacttctag

SEQ ID NO: 6389 - protein, 144 aa, Muscodor strobelii
  misc_feature: SGI Peptide ID NO. 561869
  misc_feature (4)..(144): NCBI GI: 46138205 Blast Desc: FG10617.1 [Gibberella zeae PH-1]
  misc_feature (1)..(144): NCBI GI: 116178826 Blast Desc: CHGG_00041 [Chaetomium globosum CBS 148.51] gi|88184338|gb|EAQ91806.1| CHGG_00041 [Chaetomium globosum CBS 148.51]
  misc_feature (1)..(144): NCBI GI: 85075756 Blast Desc: NCU05000 [Neurospora crassa OR74A] gi|28916838|gb|EAA26584.1| [Neurospora crassa OR74A]
  misc_feature (1)..(144): NCBI GI: 171679130 Blast Desc: protein product [Podospora anserina] gi|170937636|emb|CAP62295.1| protein product [Podospora anserina]
  misc_feature (1)..(144): NCBI GI: 145611438 Blast Desc: MGG_00385 [Magnaporthe grisea 70-15] gi|145018724|gb|EDK03003.1| MGG_00385 [Magnaporthe grisea 70-15]
  misc_feature (6)..(144): NCBI GI: 169783030 Blast Desc: [Aspergillus oryzae RIB40] gi|83774721|dbj|BAE64844.1| protein product [Aspergillus oryzae]
  misc_feature (1)..(144): NCBI GI: 39941158 Blast Desc: MGG_05491 [Magnaporthe grisea 70-15] gi|145022151|gb|EDK06171.1| MGG_05491 [Magnaporthe grisea 70-15]
  misc_feature (4)..(144): NCBI GI: 238840114 Blast Desc: ochratoxin A non-ribosomal peptide synthetase [Microsporum canis CBS 113480]
  misc_feature (4)..(144): NCBI GI: 238506699 Blast Desc: NRPS-like enzyme, [Aspergillus flavus NRRL3357] gi|220689264|gb|EED45615.1| NRPS-like enzyme, [Aspergillus flavus NRRL3357]
  misc_feature (4)..(144): NCBI GI: 121701267 Blast Desc: nonribosomal peptide synthetase, [Aspergillus clavatus NRRL 1] gi|119397041|gb|EAW07472.1| nonribosomal peptide synthetase, [Aspergillus clavatus NRRL 1]
  misc_feature: Useful for introducing or modulating the production of volatile compounds
MDRVDWTPVESIAGLVLDVIGVSQKVPAKDINGYYHGVNPSSTEWSKLALAVQDFFGKDRISELISFQEWVERLDKSQTNDTQSLEKNPGVKLLDSYRGMASAEANANHVVFDMERAKERSPSARSAKVVTPELMRHWCKQWNF

SEQ ID NO: 6390 - DNA, 3813 bp, Muscodor strobelii
  misc_feature: SGI EST ID NO. CUFF.16674.1
  misc_feature: Variant of the nucleotide sequence at SEQ ID NO 6388
cagacatctacagcatagcaaccactaatacactttttacatttcaaatacatatctcatacgacagacaatctactagatctacctggattaaataagacacttgctttgagagaaccgcatattctaaactcgcatatacatatacttgccacacgactattcacacaaactatctaccaaaaccttcttgaacgaattcgaaaacaaaaaagtaatggcgacaacgaacggcagcgccaaaggccagaatggggcggctacgacctctgagttcggccatcgctctcttccacacctcgtagatgagatggcgaagacaaacccggatcttgaatgtttctctgtaccacgaagctctgatccaaaggatggttggaaatatatctcttggtacgttgactgcctccatctcttcactgggacacattcgtctggtcctatatcgccccatgataccctgctagatgaacaaaaattaaccccaggccaggaagcaatacgccaacgccatcaactacgtagcccatagaatcctcgacgtaaacggaagagcgccagagggcacacatcccaccatcgcctacatcgggcccaacgacccccgctacgtcgtcgtgaccctcgccgccgtcaaagccgggtataaggtgctcttcatctcccctcgtaattcaatggaaggtcaaatgtccctcttcgagaaaacggagtgtacatcgttggcttatccaaaatcacaccgcaagattgtccaaccatggctattagaacaccatatgagtgccgttgaggtggggaccctcgatagttggtttccagaagaagaaatagagaatgtcccctatgagaagacttgggaaaagtcggaatgggatcctttggtcgtgcttcacacttctggatcgacgggcattccaaagccaatcgttgttcgacagggcatgatagcgatttctgatctgtaccatgatgtaccggattggcaagggacggaaattttcgttaagggtttcgcgacccgggctaaaaagatattcttgcccatgcctatgttccacgctgccggactgtacatcttcctgacggctggtctctactgggggactcctatcgcctttggactacccgaccgtccactttcgtcggactctgttgttgagtgtcttcaatacaacggcgcggatgcggcagtcgttccaccagcgatcctagaagatatgagccaaagcgagcactatgcgcaagtcctcaagaagctgtcgtatgttgcatttggcggtggcaatctggctcgagacgccggaaaccgtctggttgagcaggggataactctgtacaaccttatctctgcaactgagtttacccccttcccaatctacttgcaaaatgacaccaagctctggcaatggtttgttatcaatgacgatcagtttggtgccgattggcgtaaagtcgagggagaagatgatgtctatcgccttgtcatcgttaggaaagctgaacatcctggctttcagggatttttctacaccttccctgatgatgaggaatatgacacgaaagatatgtacaggaaacatcctacgctacctaatcactggttgtatgctggacgatctgataacattattgtgttttccaacggtgaaaaactcaatccagtaaccatcgaggagatcgtggaagaccacccagatgccaaaggcgcaattgtagtgggcgcagggcgcttccaaccggctcttatcctcgaaccaagaattcatcctcaaagcgacagcgaaaaacaagagcttctggaccgcgtttggccacatgtcgtcaaagccaataaggagacagtggctcatggtcagatcggacgggatctcattatgatctctaacccagagaagccattcctccgcgctggcaaaggcacaattcagaaagctggcacgttgacattgtacaaggatgagatcgacaatttgtacgagaacgctggacgggattctggcagcgaagcaccgaagatagatgtgagctcggaggagactttggttgcttcgatccgggagttgttcgagactcgactcggtatcgagacaaagattgagccagatgccgactttttctctggcggtattgatagcatgcatgtcatcaatgcttcaagacttattcgctcaggacttgaagcggctggccatcatgtggacgcaagtgcactggcaactcgtgtaatctacggcaacccaacccctcggagattggctagctacattttctctctcgtgagcgatggcggcaagacctcggacgagagcgaagaagaccatgaaattagcgctatgaaagcactatgggacaaatacacccgtgacccagtcaaggccgagcccggtcgacctgacccgcttgacgatggccaaactgttctactgacgggctctaccggtatgctcggttcatacatgttggaccagatggtaagaaaccccgccatcaagcggatcttctgcctcaaccgagccgaggacggtggacagaggcagcagtaccacgcgatgcagagccgtggacttacgactgactacgcatcgaaaaccacattcttccatgccgatatgttccgttctgactttgggctcccacgcaagacttacgaggagctacagaagacagcagatcggttcatacacaatgcttggccagtcaacttcaacatcccagtagagtcgtttgatccgcacctaaggggtgtacgcaatgtggccgacttcgccgcacaagctgagaagcgcgtggcagtagtattcatctcgtctatcggtacaggtgatcgttgggacgccagtacaggttcatttcccgagaagcgactcgaagacctacatctcgcaagcggcgggtatggaagaagtaagcttattggtagtttgattcttgaagatgtcgccaaggaaggcgatttcccggcggctatcatccgcgtcggacagatcgccgggcccgaaggcgagaaaggattctggaacaagcaagaatggctgccgagcatcattgctagtagtttgtacatgggggctcttcctaagaacctgggcgccatggatagagttgactggacaccagtggagagcattgcaggtctcgttcttgacgtgattggggtgtctcaaaaggtcccagcgaaggacatcaacggctattatcacggcgtcaatccgtcatcaacagaatggtcaaagctcgcactcgctgtgcaggacttctttggcaaagatcgcatctccgaacttatcagcttccaggagtgggttgagaggcttgacaagagccagacaaatgacacgcagtcactcgaaaagaacccgggagtgaagcttttggactcgtatcggggcatggcgagtgcggaggcaaatgcaaatcatgtggtgtttgatatggagagggcgaaggaacgcagtccttcagcgaggagtgcgaaggtcgtaacgcctgagctgatgaggcattggtgtaagcagtggaacttctaggctttactgatatcaataaggagttctggaaggatctgagatttaaagggaaagacatctgcattaatatgaaaagggtatggtgcagtgtctatttggagttttcttccagggtgtcacagatattgtcaataattgactttttcacaaatttccatatcgactcaacttctgcccatacaagcgatgataaatgagcacagtaaagttagcatgatcgagatgttcatttccggaatactatgtaaacttagttgaataaagatggctcattatgttttca

SEQ ID NO: 6391 - DNA, 987 bp, Muscodor strobelii
  misc_feature: SGI cDNA ID NO. 561870
  misc_feature: Encodes the peptide sequence at SEQ ID NO 6392
atgtcccgctacgccagtacgcatgtgaacaccagtgggccaggcgactctcgtcccacagccttgcagattatcaaggacgaaggcctcgaaggcaagctcaccgacaaagtcttcctcgtcacaggatgttcgtcaggtattggcattgaaacaggtcgcgctctcgcagcgacaggtgccaaggtgttcctcactgcacgttccctagagaaggcgaaggcggcatgcgcatcttacctagagcctggacgtgttgagctgatcgagctcgatactagcgatctggcatctgttcgatcggccgcggctgagttcctccgacgctcatctacactcaacggtcttatttgcaacgcaggtgtgatggctattcccacccgtgagcagactgtcgatggattcgaaatgcaactgggaacaaactacctcggccactatctacttttcgacttgctcaaggatgctctgttgaaaggatcgactcctgagttcaattccagagtagtcaacgtttccagctccggccatcatatgtccgagatagtatacgacgatttccaattggagaagcctggtgcctacgctgaatggaaggcatatggccaatccaagctggctcagatctaccaggcaaattatatcgaacgtaactttggccgtcaaggtctccatgccttcagcttaatgccaggaggtatcatgactggattgcaaaagcatgttacacaggagacaaaggatgaatggaacaatgatgcgatgatcaaatttatgaaaaacgcagaacaaggtgctgccaccacgatcgttgctgcggttgcaaaggaatgggaaggaaaggggggcaagtatcttgaagactgcagagagggtactcgcgaacccttcatccaactcacggtgggcgtcgcaccgtacgcgtacgatgaagagaaagagaatcggctgtgggagctcacacgcaagacattgaaactctcttaa

SEQ ID NO: 6392 - protein, 328 aa, Muscodor strobelii
  misc_feature: SGI Peptide ID NO. 561870
  misc_feature (37)..(184): Pfam Id: PF00106 Pfam Desc: short chain dehydrogenase
  misc_feature (37)..(174): Pfam Id: PF00106 Pfam Desc: short chain dehydrogenase
  misc_feature (1)..(328): NCBI GI: 119173201 Blast Desc: CIMG_10118 [Coccidioides immitis RS]
  misc_feature (1)..(328): NCBI GI: 240111776 Blast Desc: oxidoreductase,short chain dehydrogenase, [Coccidioides posadasii C735 delta SOWgp]
  misc_feature (3)..(328): NCBI GI: 255931831 Blast Desc: Pc12g06300 [Penicillium chrysogenum Wisconsin 54-1255] gi|211582091|emb|CAP80257.1| Pc12g06300 [Penicillium chrysogenum Wisconsin 54-1255]
  misc_feature (2)..(328): NCBI GI: 225558401 Blast Desc: short-chain dehydrogenase [Ajellomyces capsulatus G186AR]
  misc_feature (2)..(328): NCBI GI: 240274834 Blast Desc: short-chain dehydrogenase [Ajellomyces capsulatus H143]
  misc_feature (1)..(328): NCBI GI: 256721804 Blast Desc: NECHADRAFT_97586 [Nectria haematococca mpVI 77-13-4]
  misc_feature (4)..(327): NCBI GI: 256720144 Blast Desc: NECHADRAFT_73270 [Nectria haematococca mpVI 77-13-4]
  misc_feature (1)..(319): NCBI GI: 154304821 Blast Desc: BC1G_08996 [Botryotinia fuckeliana B05.10] gi|150853858|gb|EDN29050.1| BC1G_08996 [Botryotinia fuckeliana B05.10]
  misc_feature (1)..(327): NCBI GI: 256734990 Blast Desc: NECHADRAFT_75805 [Nectria haematococca mpVI 77-13-4]
  misc_feature (2)..(327): NCBI GI: 154314108 Blast Desc: BC1G_04997 [Botryotinia fuckeliana B05.10] gi|150849143|gb|EDN24336.1| BC1G_04997 [Botryotinia fuckeliana B05.10]
  misc_feature (40)..(242): SWISSPROT Homolog: EC 1.3.1.33 Protochlorophyllide reductase
MSRYASTHVNTSGPGDSRPTALQIIKDEGLEGKLTDKVFLVTGCSSGIGIETGRALAATGAKVFLTARSLEKAKAACASYLEPGRVELIELDTSDLASVRSAAAEFLRRSSTLNGLICNAGVMAIPTREQTVDGFEMQLGTNYLGHYLLFDLLKDALLKGSTPEFNSRVVNVSSSGHHMSEIVYDDFQLEKPGAYAEWKAYGQSKLAQIYQANYIERNFGRQGLHAFSLMPGGIMTGLQKHVTQETKDEWNNDAMIKFMKNAEQGAATTIVAAVAKEWEGKGGKYLEDCREGTREPFIQLTVGVAPYAYDEEKENRLWELTRKTLKLS

SEQ ID NO: 6393 - DNA, 1677 bp, Muscodor strobelii
  misc_feature: SGI cDNA ID NO. 561871
  misc_feature: Encodes the peptide sequence at SEQ ID NO 6394
atgccattcatagttatattcattgtttggtttttgggcgtcctcgccggatgccttgcggtgccctggtcatctccgaaagaccggcgacaacccgcaaattgttcctccggctatttcaccaatatagtcccggccggactgcgcgtcgaacgggttgagtacgtaacatcaggcgtttttcgtgagacgggaaacttaggctacccgacttttccaacagatttacctcttctatgcgctgcaattttgaataatactacggcgaattatcggttcggactgtttttaccagatgattggaattcaagaattttgaccattggctcgtatgcatttttgggtggtatcaattggctggatatgggttctggtgtgaaatatggtgctgcaactttgtctaccgatacgggtcataattctggagctggtgacattacatgggccaacacaacacaaaaacagatcaactgggcacaccaagcactcgaaggatccatttatgccggaaaatcattgatagaccaatactacggtcgaccaatatcttattcttacttctctggttgttctacaggtggtcggcaggcattgaaacagattcaacgagatcccgctatatttgatggagcacttgtcggagcccctgcttgggacaccgaacacttgatgccgtggatatcaaaacaggcgacgtggaacttgccagagagtgcgcactcgagcttgaacgataatgatcttttcgtaagcttacaagccgaagttctcaagcaatgcgactcgcttgatgggataaaagacagtatcatcagctcgccttatacatgtagacagcggtttaacataacaaaagtacgatgcgatgttgcgtcaaacaaaactggatgttggacgcagccgcagattgagacggccctcaagatgtatgccgattatgtgacaacagacggtaaatttgtctacaaaggatccgaatacggctcagaactcgactgggcgacgtatctcctaccagccgatcccaacgacagctcagataatgtccgaagaaacttcgatgcgcagtacgaacgatctttcatgaaccttggtccagattggcagatcacgtcttacaacgattcagttgtcaagactgccgaagcccgggataagcaagttgtgcaagctactgcagatcagtttgatctcggtgcattcacgaataaaggcaaaataatcatgtacggcggtcttgcagataacgtcgtaccagttcaacaaacaacgctctactacaacaggaccgttgacgccatgggcaatattgacagcttcttccggtattttcaaattcctggcatgaaacactgctggaattcgcctgacaacgtgaaagcgccgtggatgatgggaggggccgggcaagctgttcaactgcctccgtatgcggcggcctggtcagtgccgaagggctataacgattccaagcacgatgctttactcgctttgattgattgggtggagaagggccgggccgtttcgcagatcattgcatctgaattcaattacacggatgacacattccaggatatcgttctgtacagacagcgaccgatatgcatgtttccaaagactgcgaaatgggatgataaagggaatcaggatgcggcgtcaagctggagctgttgctaa

SEQ ID NO: 6394 - protein, 558 aa, Muscodor strobelii
  misc_feature: SGI Peptide ID NO. 561871
  misc_feature (80)..(558): Pfam Id: PF07519 Pfam Desc: Tannase and feruloyl esterase
  misc_feature (97)..(335): Pfam Id: PF07519 Pfam Desc: Tannase and feruloyl esterase
  misc_feature (489)..(557): Pfam Id: PF07519 Pfam Desc: Tannase and feruloyl esterase
  misc_feature (405)..(452): Pfam Id: PF07519 Pfam Desc: Tannase and feruloyl esterase
  misc_feature (26)..(538): NCBI GI: 85091584 Blast Desc: NCU09026 [Neurospora crassa OR74A] gi|28920367|gb|EAA29737.1| conserved [Neurospora crassa OR74A]
  misc_feature (22)..(552): NCBI GI: 116214427 Blast Desc: CHGG_11054 [Chaetomium globosum CBS 148.51] gi|88175409|gb|EAQ82878.1| CHGG_11054 [Chaetomium globosum CBS 148.51]
  misc_feature (68)..(557): NCBI GI: 189210102 Blast Desc: feruloyl esterase B precursor [Pyrenophora tritici-repentis Pt-1C-BFP] gi|187977476|gb|EDU44102.1| feruloyl esterase B precursor [Pyrenophora tritici-repentis Pt-1C-BFP]
  misc_feature (20)..(557): NCBI GI: 39942844 Blast Desc: MGG_03502 [Magnaporthe grisea 70-15] gi|145009941|gb|EDJ94597.1| MGG_03502 [Magnaporthe grisea 70-15]
  misc_feature (27)..(557): NCBI GI: 171679739 Blast Desc: protein product [Podospora anserina] gi|170939495|emb|CAP64723.1| protein product [Podospora anserina]
  misc_feature (34)..(557): NCBI GI: 154322593 Blast Desc: BC1G_00639 [Botryotinia fuckeliana B05.10] gi|150847973|gb|EDN23166.1| BC1G_00639 [Botryotinia fuckeliana B05.10]
  misc_feature (33)..(558): NCBI GI: 39940908 Blast Desc: MGG_05366 [Magnaporthe grisea 70-15] gi|145021994|gb|EDK06014.1| MGG_05366 [Magnaporthe grisea 70-15]
  misc_feature (33)..(557): NCBI GI: 169621189 Blast Desc: SNOG_13802 [Phaeosphaeria nodorum SN15] gi|111057706|gb|EAT78826.1| SNOG_13802 [Phaeosphaeria nodorum SN15]
  misc_feature (2)..(557): NCBI GI: 154302760 Blast Desc: BC1G_09495 [Botryotinia fuckeliana B05.10] gi|150855242|gb|EDN30434.1| BC1G_09495 [Botryotinia fuckeliana B05.10]
  misc_feature (76)..(557): NCBI GI: 145257202 Blast Desc: An04g02780 [Aspergillus niger] gi|134058558|emb|CAK96445.1| protein product [Aspergillus niger]
  misc_feature (79)..(557): SWISSPROT Homolog: EC 3.1.1.73 Feruloyl esterase
MPFIVIFIVWFLGVLAGCLAVPWSSPKDRRQPANCSSGYFTNIVPAGLRVERVEYVTSGVFRETGNLGYPTFPTDLPLLCAAILNNTTANYRFGLFLPDDWNSRILTIGSYAFLGGINWLDMGSGVKYGAATLSTDTGHNSGAGDITWANTTQKQINWAHQALEGSIYAGKSLIDQYYGRPISYSYFSGCSTGGRQALKQIQRDPAIFDGALVGAPAWDTEHLMPWISKQATWNLPESAHSSLNDNDLFVSLQAEVLKQCDSLDGIKDSIISSPYTCRQRFNITKVRCDVASNKTGCWTQPQIETALKMYADYVTTDGKFVYKGSEYGSELDWATYLLPADPNDSSDNVRRNFDAQYERSFMNLGPDWQITSYNDSVVKTAEARDKQVVQATADQFDLGAFTNKGKIIMYGGLADNVVPVQQTTLYYNRTVDAMGNIDSFFRYFQIPGMKHCWNSPDNVKAPWMMGGAGQAVQLPPYAAAWSVPKGYNDSKHDALLALIDWVEKGRAVSQIIASEFNYTDDTFQDIVLYRQRPICMFPKTAKWDDKGNQDAASSWSCC

SEQ ID NO: 6395 - DNA, 1158 bp, Muscodor strobelii
  misc_feature: SGI cDNA ID NO. 561872
  misc_feature: Encodes the peptide sequence at SEQ ID NO 6396
atgttgcagagtgggggaagtagtggaactattgccctggtctatgcagttgttgctgatatttctgtgtccgccgaacggggcaaatatatgggcatagtcggtgcagtatgtttcgtctgctattttgccacgttgcctggcggcttgctaaatgcctacctgggctgggcctggatattctggttcttagtcattttgacggctgtctggttcgtgccattcgtcattgctgtgccagaaacggcgcgcaaggttgttggaaatggatcagttcagccacgagggtggaacatgagcttgatcgattattatcgattccggcatcaagttcaaggcccatcaacaactcctccgaaacagaagctccggttccctaacccttttaacactttgagggtatttcgtcacaaggatatggcaatgatccttttctacaacggagctttatttgtctgtttctcgactgttacagccacattgagtacgcagtacaagcagatctatggatataatgaccttgtaattggactgctctatcttcctatcggtggctctacaaccctggcttcgatcggcggaggtcttctcgctgactggaattttcgccgaattgcaaaaaagctgaacgtcacgattgatcgcaaacgcggcaatgacatgatgaattttcccgttgagaaagctcgtctccagttgatttatccgcttattccgatcggtgccgctgctaccatcagttatggatgggctctccaacgagaggcacatgttgcagtgccattggtactcacatttttaatcggcttttgtgtgaccggaccgttccaggttctgaatattttgattgtcgactcatatcccaatgtgccggctacagccagtgcagccaataacttggttcggtgtctgctcggggcggcggcaacaggatctattgaacctattataaacgcaatagggcgagggtgggcatttacgctgatccccctaatatttctcgttccctttccagtgctattcataatcgctaagcatggtcctacctggagaaaggagcgaacattagaagcaatgagacaggcagagaaacagaaggcggccgtagaattcagcgaaaaagatgaaataacaccacaaaatgcgccgccgaaataa

SEQ ID NO: 6396 - protein, 385 aa, Muscodor strobelii
  misc_feature: SGI Peptide ID NO. 561872
  misc_feature (1)..(310): Pfam Id: PF07690 Pfam Desc: Major Facilitator Superfamily
  misc_feature (1)..(367): NCBI GI: 171676988 Blast Desc: protein product [Podospora anserina] gi|170936561|emb|CAP61221.1| protein product [Podospora anserina]
  misc_feature (2)..(381): NCBI GI: 156031347 Blast Desc: SS1G_14095 [Sclerotinia sclerotiorum 1980] gi|154699497|gb|EDN99235.1| SS1G_14095 [Sclerotinia sclerotiorum 1980]
  misc_feature (1)..(358): NCBI GI: 261359816 Blast Desc: chloramphenicol resistance protein [Verticillium albo-atrum VaMs.102]
  misc_feature (2)..(375): NCBI GI: 39944284 Blast Desc: MGG_04153 [Magnaporthe grisea 70-15] gi|145014887|gb|EDJ99455.1| MGG_04153 [Magnaporthe grisea 70-15]
  misc_feature (2)..(367): NCBI GI: 256727508 Blast Desc: NECHADRAFT_76423 [Nectria haematococca mpVI 77-13-4]
  misc_feature (1)..(376): NCBI GI: 85107816 Blast Desc: NCU07938 [Neurospora crassa OR74A] gi|28924060|gb|EAA33218.1| conserved [Neurospora crassa OR74A]
  misc_feature (2)..(359): NCBI GI: 212543579 Blast Desc: conserved [Penicillium marneffei ATCC 18224] gi|210066851|gb|EEA20944.1| conserved [Penicillium marneffei ATCC 18224]
  misc_feature (2)..(357): NCBI GI: 255950382 Blast Desc: Pc22g20580 [Penicillium chrysogenum Wisconsin 54-1255] gi|211592975|emb|CAP99346.1| Pc22g20580 [Penicillium chrysogenum Wisconsin 54-1255]
  misc_feature (2)..(350): NCBI GI: 242787158 Blast Desc: florfenicol exporter, [Talaromyces stipitatus ATCC 10500] gi|218721094|gb|EED20513.1| florfenicol exporter, [Talaromyces stipitatus ATCC 10500]
  misc_feature (2)..(322): NCBI GI: 46136443 Blast Desc: FG09737.1 [Gibberella zeae PH-1]
MLQSGGSSGTIALVYAVVADISVSAERGKYMGIVGAVCFVCYFATLPGGLLNAYLGWAWIFWFLVILTAVWFVPFVIAVPETARKVVGNGSVQPRGWNMSLIDYYRFRHQVQGPSTTPPKQKLRFPNPFNTLRVFRHKDMAMILFYNGALFVCFSTVTATLSTQYKQIYGYNDLVIGLLYLPIGGSTTLASIGGGLLADWNFRRIAKKLNVTIDRKRGNDMMNFPVEKARLQLIYPLIPIGAAATISYGWALQREAHVAVPLVLTFLIGFCVTGPFQVLNILIVDSYPNVPATASAANNLVRCLLGAAATGSIEPIINAIGRGWAFTLIPLIFLVPFPVLFIIAKHGPTWRKERTLEAMRQAEKQKAAVEFSEKDEITPQNAPPK

SEQ ID NO: 6397 - DNA, 622 bp, Muscodor strobelii
  misc_feature: SGI EST ID NO. CUFF.15984.0
  misc_feature: Variant of the nucleotide sequence at SEQ ID NO 6395
gttcttagtcattttgacggctgtctggttcgtgccattcgtcattgctgtgccagaaacggcgcgcaaggttgttggaaatggatcagttcagccacgagggtggaacatgagcttgatcgattattatcgattccggcatcaagttcaaggcccatcaacaactcctccgaaacagaagctccggttccctaacccttttaacactttgagggtatttcgtcacaaggatatggcaatgatccttttctacaacggagctttatttgtctgtttctcgactgttacagccacattgagtacgcagtacaagcagatctatggatataatgaccttgtaattggactgctctatcttcctatcggtggctctacaaccctggcttcgatcggcggaggtcttctcgctgactggaattttcgccgaattgcaaaaaagctgaacgtcacgattgatcgcaaacgcggcaatgacatgatgaattttcccgttgagaaagctcgtctccagttgatttatccgcttattccgatcggtgccgctgctaccatcagttatggatgggctctccaacgagaggcacatgttgcagtgccattggtactcacatttttaatcggc

SEQ ID NO: 6398 - DNA, 1110 bp, Muscodor strobelii
  misc_feature: SGI cDNA ID NO. 561873
  misc_feature: Reduced expression when VOC is produced
  misc_feature: Encodes the peptide sequence at SEQ ID NO 6399
atgaccgacattacacctgccttcaatggattgctgaaacagcacgaggcgccatctaccaacggacgcttcagtctcgatagtatcgaagacttcctcaaggaagcatacagaattaactcccacatcacctcccttcatactgaacttcgagctattcgacaatcctacctctcaacagcccaaccccgcaaaaatgtcatccgttccgcacagaaggacaggcaggccatgccccttaccgatcgagagcgcgaggaaatcgatgcaaatgccaagaagatgctacgccagctagatgccagcatacggaatctaggcgacgtcgaaaaggcccgagccgatgtcgagactcagatcatccacaaaaagttctcgcgcggcctgggcgcattgggttcctgggcagcaggcggcttatctggaggcaaatcatcagagcacctggcagcggaggaagaggcggagtcgataagtacacatcgcgacggtgtgctgtggctgcttcgccatcatttgcaagaatgcgcacaaacgcagcagcgcatgatggagattaggatcatgcgcgaggtggaaaagaaccgcagcgttctggctaaggctcgaggccaagatgctgcgtttctaaaaaacacagcacctagtgttgcaaccaaggccgcgatgaatgttggggagcctccgaggtacacggacttcacgcagcaaagtagccaaaaccaacagctgctgctcgaggaaactcctgcacaagatacgcaggccaacgattacaccagcgatttgacacaagagcaattgcaaatatttgcggaggagaatcatgccatgctcgagcaatacgaaagcacattggatcaagtcagaactgcggagcaatcgttgatggaaatctccgaactgcagactcgactaataggcaccctcgtcacacagcaagaatctattgacgttctggtaggtgatgttgggatgacggcagagaacattgaaggtggaaataagcaactctctcaagcgaccaaaaaatccggaccggcaaagtacgtgttctttgcgacctgtggactatgcaccttcttagtcgtatgggatctaataatatga

SEQ ID NO: 6399 - protein, 369 aa, Muscodor strobelii
  misc_feature: SGI Peptide ID NO. 561873
  misc_feature (3)..(369): NCBI GI: 46136445 Blast Desc: FG09738.1 [Gibberella zeae PH-1]
  misc_feature (1)..(369): NCBI GI: 85107821 Blast Desc: NCU07939 [Neurospora crassa OR74A] gi|28924061|gb|EAA33219.1| conserved [Neurospora crassa OR74A]
  misc_feature (1)..(369): NCBI GI: 171676990 Blast Desc: protein product [Podospora anserina] gi|170936562|emb|CAP61222.1| protein product [Podospora anserina]
  misc_feature (1)..(369): NCBI GI: 116196880 Blast Desc: CHGG_05038 [Chaetomium globosum CBS 148.51] gi|88180951|gb|EAQ88419.1| CHGG_05038 [Chaetomium globosum CBS 148.51]
  misc_feature (1)..(331): NCBI GI: 145607307 Blast Desc: MGG_04155 [Magnaporthe grisea 70-15] gi|145014888|gb|EDJ99456.1| MGG_04155 [Magnaporthe grisea 70-15]
  misc_feature (3)..(369): NCBI GI: 189194149 Blast Desc: syntaxin [Pyrenophora tritici-repentis Pt-1C-BFP] gi|187978977|gb|EDU45603.1| syntaxin [Pyrenophora tritici-repentis Pt-1C-BFP]
  misc_feature (1)..(369): NCBI GI: 119480859 Blast Desc: SNARE protein (Ufe1), [Neosartorya fischeri NRRL 181] gi|119408612|gb|EAW18561.1| SNARE protein (Ufe1), [Neosartorya fischeri NRRL 181]
  misc_feature (1)..(369): NCBI GI: 242795190 Blast Desc: SNARE protein (Ufe1), [Talaromyces stipitatus ATCC 10500] gi|218719118|gb|EED18538.1| SNARE protein (Ufe1), [Talaromyces stipitatus ATCC 10500]
  misc_feature (1)..(369): NCBI GI: 154271001 Blast Desc: [Ajellomyces capsulatus NAm1] gi|150409577|gb|EDN05021.1| [Ajellomyces capsulatus NAm1]
  misc_feature (1)..(369): NCBI GI: 212536224 Blast Desc: SNARE protein (Ufe1), [Penicillium marneffei ATCC 18224] gi|210070667|gb|EEA24757.1| SNARE protein (Ufe1), [Penicillium marneffei ATCC 18224]
  misc_feature: Useful for introducing or modulating the production of volatile compounds
MTDITPAFNGLLKQHEAPSTNGRFSLDSIEDFLKEAYRINSHITSLHTELRAIRQSYLSTAQPRKNVIRSAQKDRQAMPLTDREREEIDANAKKMLRQLDASIRNLGDVEKARADVETQIIHKKFSRGLGALGSWAAGGLSGGKSSEHLAAEEEAESISTHRDGVLWLLRHHLQECAQTQQRMMEIRIMREVEKNRSVLAKARGQDAAFLKNTAPSVATKAAMNVGEPPRYTDFTQQSSQNQQLLLEETPAQDTQANDYTSDLTQEQLQIFAEENHAMLEQYESTLDQVRTAEQSLMEISELQTRLIGTLVTQQESIDVLVGDVGMTAENIEGGNKQLSQATKKSGPAKYVFFATCGLCTFLVVWDLII

SEQ ID NO: 6400 - DNA, 4295 bp, Muscodor strobelii
  misc_feature: SGI EST ID NO. CUFF.16508.2
  misc_feature: Variant of the nucleotide sequence at SEQ ID NO 6398
atggggagatagatgcacggaccaagccactgtaacaccaccaggaacgaagcgaaatacgtggaggacaacgtcactgaaccccaaaattaatcgtaatagcgcccgttttggacagctttccagttgcattattcccaccaccacaggcatggctttagctctctcttgatcctttggagcaccctttcgtatcacaaatactccccaacttaatatctacattaccgaccacaagatgaccgacattacacctgccttcaatggattgctgaaacagcacgaggcgccatctaccaacggacgcttcagtctcgatagtatcgaagacttcctcaaggaagcatacagaattaactcccacatcacctcccttcatactgaacttcgagctattcgacaatcctacctctcaacagcccaaccccgcaaaaatgtcatccgttccgcacagaaggacaggcaggccatgccccttaccgatcgagagcgcgaggaaatcgatgcaaatgccaagaagatgctacgccagctagatgccagcatacggaatctaggcgacgtcgaaaaggcccgagccgatgtcgagactcagatcatccacaaaaagttctcgcgcggcctgggcgcattgggttcctgggcagcaggcggcttatctggaggcaaatcatcagagcacctggcagcggaggaagaggcggagtcgataagtacacatcgcgacggtgtgctgtggctgcttcgccatcatttgcaagaatgcgcacaaacgcagcagcgcatgatggagattaggatcatgcgcgaggtggaaaagaaccgcagcgttctggctaaggctcgaggccaagatgctgcgtttctaaaaaacacagcacctagtgttgcaaccaaggccgcgatgaatgttggggagcctccgaggtacacggacttcacgcagcaaagtagccaaaaccaacagctgctgctcgaggaaactcctgcacaagatacgcaggccaacgattacaccagcgatttgacacaagagcaattgcaaatatttgcggaggagaatcatgccatgctcgagcaatacgaaagcacattggatcaagtcagaactgcggagcaatcgttgatggaaatctccgaactgcagactcgactaataggcaccctcgtcacacagcaagaatctattgacgttctggtaggtgatgttgggatgacggcagagaacattgaaggtggaaataagcaactctctcaagcgaccaaaaaatccggaccggcaaagtacgtgttctttgcgacctgtggactatgcaccttcttagtcgtatgggatctaataatatgagcattgatgcaattcaaagcaccaactaaaatcacatacattagctgtcgttcaaaacgaagactatatttgcatgtgattaaagaaaggtaaaaatactcagagtgacataagatatatttgcgtggtgtgagatgggaatgtaatcacatgccactgcctattgtagatcaccacattgcctcatatgcatgtcatcctacttggtagtatattagagtgacccgagagagtttcttcaacacaacacaacacaatgggacggtacccaattgatgtggacgaacaacctcaacttggaaactggaacgcattcattatgccctcaattcggacaaaatccttgatataacggccgcgggtgggcggttttgtgaacctcggcctggtgatcatcgtgagagtagcatatccgtacagctccacttgtcgcgatttatagtcaaggcacgaggtcatcctcaaaagtttacaattgcaagcctacaatcttacctcttatatctttttcttcgtgttctcatattgttactatcgttgtacatcacttgtgctattaaacctgaaattggctggaaagtctcttattctatacgcactacttggtaactgcaaaacgccgccgaatcccgatcttagtccggtgttcgttctatggtggcatgaagtacgccatttgaaacggcattgcattcaaatagtcagacgacttttaataggcaccgtatctcacgtaccatactgccatctagccaggcaaattgcagcgaacattccctacgcccggcgcttgaatgagaacctaggtaccttaggtatcgaaatcggatatctcttccccagctaccttgcctcactcatcccacctttcattccggggtgctatcgactgaagcggacctatcacactagctcttattccccttaccaagagcttcccaccgacgtctggagtcatcagcccactgaaacggacgatcgcgtcaccaccaagcacgacccagcacctgtggccccattccctcgcgctcgaccggggaaaacggagaactcaaatcgcacccgcaggagctgtgcataaccgcttgaccggacattggcattgggagaaatctgatcagcaggtactgctaatcactggctttacggagtacccacctagctgtctcactgttgcagcttctactggtgacagtctggagaatcgataagctgttccctgtcagagagctgtctgttattacctggttgcccctccattcaattgactgtttctcccctcctacatcatgccctttgatccctcctatcacggacaatccgttgccagagtcaagagtatagttaaacaaatgtcgcctccttcagtcaccagctttcccgccgagaaagttcctcaggcacctgaggatcctctgttcggccttgtgagagcattcagatctgacgagttcccggacaaggtcgatgttagtattggcgcataccgcgatgataacgcaaagccatgggtcttacccgtagttaagaaggccgacgaaatcttgcgcaatgaccctaatctcgatcacgaatatgctccgattgccggtatcgcttccttcaccaccaaggccgccgagctgatcctgggcggcgccgactcgccggcctttaaggagaagcgtgttgcctccgtccagaccatctccggcacgggtgccgtccatctcggcgccttgttcctcgccaagttctacaccggcaccaagaaggtctacctctccaaccctacctgggccaaccacaaccagatcttctccaatgtcgacatccccatcgcccaatacccctatttctccaagcagaccaagggccttgactttgatggcatgaagtccgccatctacggagccccagaccgttctgttatcctgctccacgcctgcgcacacaaccccacgggtgtcgaccctacgctcgaccaatggaaggagattgccgagatcatgcggcagaagaatcacttccccttcttcgactgcgcataccagggctttgcttccggtaacctgctccaggacaacgcagccgtccgatacttcgtcgagcaaggtttcgagctcgtcattgctcagagtttcgccaagaacttcggcctgtacggtgagcgtgctggctgcttccacttcgttgcggcacccgcttcagatgctacggagaccgtcacgcgcattgcctcgcagctcgccatcctgcagcgatctgagatctcgaatccaccgttgtatggtgcacgtattgccagcacggtcctgaacgatcccaagctctttgctgagtgggaggaaaacctgcgcactatgtcaggtcgtatcaaggagatgcgcaaggcactgcggagcaagctagaggagcttggcaccccgggcacgtggaaccatatcacagatcaaatcggcatgttcagcttcacgggtctgagtgaagcgcaggtgctgaagatccgggaagaggcacacgtatacatgaccaagaacggtcgcatcagcatggccggtctgaacacgaagaacatagactactttgccaaagcagtcgacaaggttgttcgcgaggtcaagtaggtgagaaaaatgtatgcatagactcctagatggggatggtgttgggttttctggctcatctcgggtcgatctgggagcaaaagtcccacttagtcgcctttcatagacgcatcatgcaggatagaagtgttggcttgggcaaaagtatcaagactggatgaatgaatgacttgtatatcaggatgaataaaaaagactccacgacatctctcttcttcgatacgttgatctgacgactcgtgacatttcagtcgtcggagttgatggttaggttaccacatgataagtgcgagaatcacaaagaactgctagtattgatatcaaacatatttagaaccgta

SEQ ID NO: 6401 - DNA, 1317 bp, Muscodor strobelii
  misc_feature: SGI cDNA ID NO. 561874
  misc_feature: Reduced expression when VOC is produced
  misc_feature: Encodes the peptide sequence at SEQ ID NO 6402
atgccctttgatccctcctatcacggacaatccgttgccagagtcaagagtatagttaaacaaatgtcgcctccttcagtcaccagctttcccgccgagaaagttcctcaggcacctgaggatcctctgttcggccttgtgagagcattcagatctgacgagttcccggacaaggtcgatgttagtattggcgcataccgcgatgataacgcaaagccatgggtcttacccgtagttaagaaggccgacgaaatcttgcgcaatgaccctaatctcgatcacgaatatgctccgattgccggtatcgcttccttcaccaccaaggccgccgagctgatcctgggcggcgccgactcgccggcctttaaggagaagcgtgttgcctccgtccagaccatctccggcacgggtgccgtccatctcggcgccttgttcctcgccaagttctacaccggcaccaagaaggtctacctctccaaccctacctgggccaaccacaaccagatcttctccaatgtcgacatccccatcgcccaatacccctatttctccaagcagaccaagggccttgactttgatggcatgaagtccgccatctacggagccccagaccgttctgttatcctgctccacgcctgcgcacacaaccccacgggtgtcgaccctacgctcgaccaatggaaggagattgccgagatcatgcggcagaagaatcacttccccttcttcgactgcgcataccagggctttgcttccggtaacctgctccaggacaacgcagccgtccgatacttcgtcgagcaaggtttcgagctcgtcattgctcagagtttcgccaagaacttcggcctgtacggtgagcgtgctggctgcttccacttcgttgcggcacccgcttcagatgctacggagaccgtcacgcgcattgcctcgcagctcgccatcctgcagcgatctgagatctcgaatccaccgttgtatggtgcacgtattgccagcacggtcctgaacgatcccaagctctttgctgagtgggaggaaaacctgcgcactatgtcaggtcgtatcaaggagatgcgcaaggcactgcggagcaagctagaggagcttggcaccccgggcacgtggaaccatatcacagatcaaatcggcatgttcagcttcacgggtctgagtgaagcgcaggtgctgaagatccgggaagaggcacacgtatacatgaccaagaacggtcgcatcagcatggccggtctgaacacgaagaacatagactactttgccaaagcagtcgacaaggttgttcgcgaggtcaagtag

SEQ ID NO: 6402 - protein, 438 aa, Muscodor strobelii
  misc_feature: SGI Peptide ID NO. 561874
  misc_feature (56)..(430): Pfam Id: PF00155 Pfam Desc: Aminotransferase class I and II
  misc_feature (14)..(437): NCBI GI: 171676992 Blast Desc: protein product [Podospora anserina] gi|170936563|emb|CAP61223.1| protein product [Podospora anserina]
  misc_feature (14)..(438): NCBI GI: 85107829 Blast Desc: aspartate aminotransferase [Neurospora crassa OR74A] gi|28924063|gb|EAA33221.1| aspartate aminotransferase [Neurospora crassa OR74A]
  misc_feature (11)..(438): NCBI GI: 189194151 Blast Desc: aspartate aminotransferase [Pyrenophora tritici-repentis Pt-1C-BFP] gi|187978978|gb|EDU45604.1| aspartate aminotransferase [Pyrenophora tritici-repentis Pt-1C-BFP]
  misc_feature (26)..(436): NCBI GI: 46136447 Blast Desc: FG09739.1 [Gibberella zeae PH-1]
  misc_feature (26)..(436): NCBI GI: 256726940 Blast Desc: [Nectria haematococca mpVI 77-13-4]
  misc_feature (22)..(438): NCBI GI: 154293369 Blast Desc: BC1G_13706 [Botryotinia fuckeliana B05.10] gi|150845363|gb|EDN20556.1| BC1G_13706 [Botryotinia fuckeliana B05.10]
  misc_feature (11)..(438): NCBI GI: 39944290 Blast Desc: MGG_04156 [Magnaporthe grisea 70-15] gi|145014889|gb|EDJ99457.1| MGG_04156 [Magnaporthe grisea 70-15]
  misc_feature (22)..(438): NCBI GI: 156031351 Blast Desc: SS1G_14097 [Sclerotinia sclerotiorum 1980] gi|154699499|gb|EDN99237.1| SS1G_14097 [Sclerotinia sclerotiorum 1980]
  misc_feature (14)..(437): NCBI GI: 67539756 Blast Desc: AN6048.2 [Aspergillus nidulans FGSC A4] gi|40738833|gb|EAA58023.1| AN6048.2 [Aspergillus nidulans FGSC A4] gi|259479767|tpe|CBF70290.1| TPA: aspartate transaminase FGSC
  misc_feature (13)..(437): NCBI GI: 226279893 Blast Desc: aspartate aminotransferase [Paracoccidioides brasiliensis Pb01]
  misc_feature (22)..(438): SWISSPROT Homolog: EC 2.6.1.1 Aspartate transaminase
  misc_feature: Useful for introducing or modulating the production of volatile compounds
MPFDPSYHGQSVARVKSIVKQMSPPSVTSFPAEKVPQAPEDPLFGLVRAFRSDEFPDKVDVSIGAYRDDNAKPWVLPVVKKADEILRNDPNLDHEYAPIAGIASFTTKAAELILGGADSPAFKEKRVASVQTISGTGAVHLGALFLAKFYTGTKKVYLSNPTWANHNQIFSNVDIPIAQYPYFSKQTKGLDFDGMKSAIYGAPDRSVILLHACAHNPTGVDPTLDQWKEIAEIMRQKNHFPFFDCAYQGFASGNLLQDNAAVRYFVEQGFELVIAQSFAKNFGLYGERAGCFHFVAAPASDATETVTRIASQLAILQRSEISNPPLYGARIASTVLNDPKLFAEWEENLRTMSGRIKEMRKALRSKLEELGTPGTWNHITDQIGMFSFTGLSEAQVLKIREEAHVYMTKNGRISMAGLNTKNIDYFAKAVDKVVREVK

SEQ ID NO: 6403 - DNA, 4295 bp, Muscodor strobelii; identical to SEQ ID NO: 6400
  misc_feature: SGI EST ID NO. CUFF.16508.2
  misc_feature: Variant of the nucleotide sequence at SEQ ID NO 6401

SEQ ID NO: 6404 - DNA, 2559 bp, Muscodor strobelii
  misc_feature: SGI cDNA ID NO. 561875
  misc_feature: Reduced expression when VOC is produced
  misc_feature: Encodes the peptide sequence at SEQ ID NO 6405
atgtctctcttccacatcttggggttcttgaccgtcttgctcgccgatggcgtgcaggcaaatagctatttccaaaagagacaaaacataccgacggcacgatgtacgagtcatttgatggtcgacaactttgttgggtggtcgaatggggtcaatctcctccaaggtgctacaagcgatgatgctactatgacggcaacgagtactgacgacggatcactcacattcacacccaacaacacaggtagctcgtatatctacgagcagttcgattgtgttgacgccactacgcttggatacgacagcatatcctttgagatcaagggcccagaggctgcgtcagtcagtctcgagctgcaaactaaagccaactgctcggcaacagacctccagagcacttattacactgtcaacgacttgagcggctctctacagacaatcaacgttcctctaaccagcttcgatggggcaaatttacaaagcatcgttggtgtcctctggtatggcttctcggctggtctaactggaaatgacacccaatggaagctggtcaatctacagtttctctgcgctggcgttccggcccctactgatcctgcgccgacctcaacgcccacgtctcctggcggtataacctcaaccgtaacagtaaccgttactgcgacgcccagtacaacagctcggccgacaaccacgacgaagacaacaactacccgacggacaacaacgcggcgtccgaccccaactccaacaccatgttgggacccctgggatgatgattgcgatggtgatgacgaccctggatggggttggggcaagcgggatgaaaaagcagccgtcccctccggctcagacgccccaacatgccagaacgctctgatagatgactgggtgtcacaatctagactgacatttctcggttacaactccatgctccaagcatctagcgacgacggcacgatgaagtctgttgtcgtggaccagaacaaagtgacattcacgccacagaattcagagtcgtatttctactcgcaatttggatgtttccaggccaaggactacggcggcattgctctacggattaaggccgccaagggctcgtctttcagtgtccaactatcatcaagcaagaatggtgcctgtgatggctcttctacgaaggatgttacgcagagtacgagtgatctcggatggaaatttgatggcacggagcagctctactccatcccgttcactaaatatacaggcttagactacactaagctcacacagatcgtcatctcaggcttgaaatcagcagtcactctgggacctgtggacatatactgcggtacaaccccatctgagtacaaagtaccagctatcgcagagcccacagaagcaacagcaactcagagtgcaccaacctctaaggccaccactctcctaatcgacaacttcgcgaacaaagagacaaacgccctcggccaatggcacggcacagacgacgaaaccctgaagacgacattcagccgcaacaccatgacgctcaagaccaacgactcagatctccaatgggaaacccaagtcgccgaaaaatgcagagatctgactgagttcgacggttcctacctgcacatcgcctacacagggagcaacagattctcaatcgccctacaacagcacaacgacgcctgcaacaacgacatcgcgccatacccagcaacatgggactcactcgaagccgcgcgatacgccacagacaccgatatatacatcccgatgatacacttcaacgtcgaccgcacaaaatccatcggtttctccgtaaagggcttctacacactcgacagcacaacattctccaagatcgaaatcgtgccctcgatcccgcagggagtcaccatcccagtaaaactcccctcaggcacattcgtgatggcgtgcaagcgaccaaactccttcgccttcgcaatcgacgacggaaacccagagttcgcacaacaagtcatgcgaaccgtcgagaagaacaacataaaagtaacattcttcaccgtcggtctcccgctcctcgactctacaacaaatctctcctcagtatacaaagacatggaagcccgcggtcatcaaatcgcgctgcactcttacacgcacccaccactcgaaggtctatcagacgaagcgtccatagactgggagtacaacaacgacttcaatgcggtatccaccgtcttcggtgcagcgaaagcacagaaatacttcaagtatttccgcccacccttcggcaccgaaggcgcgcgtatgcgccagcgctacgcggcacatgtggagaacccgtatatcatgcagtggagcgttgacgtcgaggactggatgtgggctgagagttcaacccctgaaaaacaactcgcggctttcaaacgagatgttgcggcgggtggtagtatcactgttatgcattatctgtataatagtacggttagctatctccaggatttcatcgatattgcgaaggcgagtgggaagcagcttatgcgtgttgatcagtgtatgatggatcctgatgcgccgcctctatga

SEQ ID NO: 6405 - protein, 852 aa, Muscodor strobelii
  misc_feature: SGI Peptide ID NO. 561875
  misc_feature (641)..(773): Pfam Id: PF01522 Pfam Desc: Polysaccharide deacetylase
  misc_feature (64)..(852): NCBI GI: 164429191 Blast Desc: NCU05212 [Neurospora crassa OR74A] gi|157072976|gb|EAA32975.2| NCU05212 [Neurospora crassa OR74A]
  misc_feature (64)..(852): NCBI GI: 171683585 Blast Desc: protein product [Podospora anserina] gi|170941752|emb|CAP67406.1| protein product [Podospora anserina]
  misc_feature (33)..(852): NCBI GI: 189207525 Blast Desc: glycosyl hydrolase [Pyrenophora tritici-repentis Pt-1C-BFP] gi|187976189|gb|EDU42815.1| glycosyl hydrolase [Pyrenophora tritici-repentis Pt-1C-BFP]
  misc_feature (33)..(852): NCBI GI: 39944322 Blast Desc: MGG_04172 [Magnaporthe grisea 70-15] gi|145014908|gb|EDJ99476.1| MGG_04172 [Magnaporthe grisea 70-15]
  misc_feature (35)..(852): NCBI GI: 156055094 Blast Desc: SS1G_04898 [Sclerotinia sclerotiorum 1980] gi|154702683|gb|EDO02422.1| SS1G_04898 [Sclerotinia sclerotiorum 1980]
  misc_feature (289)..(852): NCBI GI: 154304541 Blast Desc: BC1G_09146 [Botryotinia fuckeliana B05.10] gi|150854126|gb|EDN29318.1| BC1G_09146 [Botryotinia fuckeliana B05.10]
  misc_feature (278)..(769): NCBI GI: 169625642 Blast Desc: SNOG_16096 [Phaeosphaeria nodorum SN15] gi|160705697|gb|EAT76468.2| SNOG_16096 [Phaeosphaeria nodorum SN15]
  misc_feature (466)..(852): NCBI GI: 258573417 Blast Desc: conserved [Uncinocarpus reesii 1704] gi|237901156|gb|EEP75557.1| conserved [Uncinocarpus reesii 1704]
  misc_feature (475)..(852): NCBI GI: 119191922 Blast Desc: CIMG_00338 [Coccidioides immitis RS]
  misc_feature (475)..(852): NCBI GI: 240106294 Blast Desc: Polysaccharide deacetylase family protein [Coccidioides posadasii C735 delta SOWgp]
  misc_feature: Useful for introducing or modulating the production of volatile compounds
MSLFHILGFLTVLLADGVQANSYFQKRQNIPTARCTSHLMVDNFVGWSNGVNLLQGATSDDATMTATSTDDGSLTFTPNNTGSSYIYEQFDCVDATTLGYDSISFEIKGPEAASVSLELQTKANCSATDLQSTYYTVNDLSGSLQTINVPLTSFDGANLQSIVGVLWYGFSAGLTGNDTQWKLVNLQFLCAGVPAPTDPAPTSTPTSPGGITSTVTVTVTATPSTTARPTTTTKTTTTRRTTTRRPTPTPTPCWDPWDDDCDGDDDPGWGWGKRDEKAAVPSGSDAPTCQNALIDDWVSQSRLTFLGYNSMLQASSDDGTMKSVVVDQNKVTFTPQNSESYFYSQFGCFQAKDYGGIALRIKAAKGSSFSVQLSSSKNGACDGSSTKDVTQSTSDLGWKFDGTEQLYSIPFTKYTGLDYTKLTQIVISGLKSAVTLGPVDIYCGTTPSEYKVPAIAEPTEATATQSAPTSKATTLLIDNFANKETNALGQWHGTDDETLKTTFSRNTMTLKTNDSDLQWETQVAEKCRDLTEFDGSYLHIAYTGSNRFSIALQQHNDACNNDIAPYPATWDSLEAARYATDTDIYIPMIHFNVDRTKSIGFSVKGFYTLDSTTFSKIEIVPSIPQGVTIPVKLPSGTFVMACKRPNSFAFAIDDGNPEFAQQVMRTVEKNNIKVTFFTVGLPLLDSTTNLSSVYKDMEARGHQIALHSYTHPPLEGLSDEASIDWEYNNDFNAVSTVFGAAKAQKYFKYFRPPFGTEGARMRQRYAAHVENPYIMQWSVDVEDWMWAESSTPEKQLAAFKRDVAAGGSITVMHYLYNSTVSYLQDFIDIAKASGKQLMRVDQCMMDPDAPPL

SEQ ID NO: 6406 - DNA, 2932 bp, Muscodor strobelii
  misc_feature: SGI EST ID NO. CUFF.16569.1
  misc_feature: Variant of the nucleotide sequence at SEQ ID NO 6404
cttttaccccggattactttgcagtatgcatcccatttacttgcaagcatctaggccggattatcggcactcgaagaatgcaaacatccgtgcctcaatgacttatattcactttaggtcgtcatgcctcaggcattacctccgtcccgcggttctttgtcgaagaacgaagtaacgatagcaggcgttgcttatcgaagccatgtctctcttccacatcttggggttcttgaccgtcttgctcgccgatggcgtgcaggcaaatagctatttccaaaagagacaaaacataccgacggcacgatgtacgagtcatttgatggtcgacaactttgttgggtggtcgaatggggtcaatctcctccaaggtgctacaagcgatgatgctactatgacggcaacgagtactgacgacggatcactcacattcacacccaacaacacaggtagctcgtatatctacgagcagttcgattgtgttgacgccactacgcttggatacgacagcatatcctttgagatcaagggcccagaggctgcgtcagtcagtctcgagctgcaaactaaagccaactgctcggcaacagacctccagagcacttattacactgtcaacgacttgagcggctctctacagacaatcaacgttcctctaaccagcttcgatggggcaaatttacaaagcatcgttggtgtcctctggtatggcttctcggctggtctaactggaaatgacacccaatggaagctggtcaatctacagtttctctgcgctggcgttccggcccctactgatcctgcgccgacctcaacgcccacgtctcctggcggtataacctcaaccgtaacagtaaccgttactgcgacgcccagtacaacagctcggccgacaaccacgacgaagacaacaactacccgacggacaacaacgcggcgtccgaccccaactccaacaccatgttgggacccctgggatgatgattgcgatggtgatgacgaccctggatggggttggggcaagcgggatgaaaaagcagccgtcccctccggctcagacgccccaacatgccagaacgctctgatagatgactgggtgtcacaatctagactgacatttctcggttacaactccatgctccaagcatctagcgacgacggcacgatgaagtctgttgtcgtggaccagaacaaagtgacattcacgccacagaattcagagtcgtatttctactcgcaatttggatgtttccaggccaaggactacggcggcattgctctacggattaaggccgccaagggctcgtctttcagtgtccaactatcatcaagcaagaatggtgcctgtgatggctcttctacgaaggatgttacgcagagtacgagtgatctcggatggaaatttgatggcacggagcagctctactccatcccgttcactaaatatacaggcttagactacactaagctcacacagatcgtcatctcaggcttgaaatcagcagtcactctgggacctgtggacatatactgcggtacaaccccatctgagtacaaagtaccagctatcgcagagcccacagaagcaacagcaactcagagtgcaccaacctctaaggccaccactctcctaatcgacaacttcgcgaacaaagagacaaacgccctcggccaatggcacggcacagacgacgaaaccctgaagacgacattcagccgcaacaccatgacgctcaagaccaacgactcagatctccaatgggaaacccaagtcgccgaaaaatgcagagatctgactgagttcgacggttcctacctgcacatcgcctacacagggagcaacagattctcaatcgccctacaacagcacaacgacgcctgcaacaacgacatcgcgccatacccagcaacatgggactcactcgaagccgcgcgatacgccacagacaccgatatatacatcccgatgatacacttcaacgtcgaccgcacaaaatccatcggtttctccgtaaagggcttctacacactcgacagcacaacattctccaagatcgaaatcgtgccctcgatcccgcagggagtcaccatcccagtaaaactcccctcaggcacattcgtgatggcgtgcaagcgaccaaactccttcgccttcgcaatcgacgacggaaacccagagttcgcacaacaagtcatgcgaaccgtcgagaagaacaacataaaagtaacattcttcaccgtcggtctcccgctcctcgactctacaacaaatctctcctcagtatacaaagacatggaagcccgcggtcatcaaatcgcgctgcactcttacacgcacccaccactcgaaggtctatcagacgaagcgtccatagactgggagtacaacaacgacttcaatgcggtatccaccgtcttcggtgcagcgaaagcacagaaatacttcaagtatttccgcccacccttcggcaccgaaggcgcgcgtatgcgccagcgctacgcggcacatgtggagaacccgtatatcatgcagtggagcgttgacgtcgaggactggatgtgggctgagagttcaacccctgaaaaacaactcgcggctttcaaacgagatgttgcggcgggtggtagtatcactgttatgcattatctgtataatagtacggttagctatctccaggatttcatcgatattgcgaaggcgagtgggaagcagcttatgcgtgttgatcagtgtatgatggatcctgatgcgccgcctctatgagatggaaactagggggcggcttgtgatggatggaagagaggcagggaggaaccaaaggcgtgctagagtgttgggtttgttggagagatgaggattccatagcattttggcatgatggaaatagttggcttcgcgcgaacgaatagtaatgaagcatctcatttacctgat

SEQ ID NO: 6407 - DNA, 351 bp, Muscodor strobelii
  misc_feature: SGI cDNA ID NO. 561876
  misc_feature: Elevated expression when VOC is produced
  misc_feature: Encodes the peptide sequence at SEQ ID NO 6408
atggctgccatacttgttgctgcctaccccgtgggctctgagatcgacaaggagtactacatcaacaagcacatcccaagagcccagaagcactacgatggtatgattagctggtcttgctgtgatggacttgctctaccaggcataccttcgccttacgaattcatgtgtttcatggagtaccccagcatggagcatcttggtacacagatggcgaaagctacaccggaatccaaccaagctatgatagaagacgtcaagaactactcgaagaaggacgccgttgtatgggtacagattaagactgaagtaggagaaaactctataggatccgcgcaagacaacatataa

SEQ ID NO: 6408 - protein, 116 aa, Muscodor strobelii
  misc_feature: SGI Peptide ID NO. 561876
  misc_feature (1)..(106): Pfam Id: PF07110 Pfam Desc: EthD protein
  misc_feature (1)..(94): NCBI GI: 46139787 Blast Desc: FG11408.1 [Gibberella zeae PH-1]
  misc_feature (1)..(95): NCBI GI: 256723440 Blast Desc: NECHADRAFT_81027 [Nectria haematococca mpVI 77-13-4]
  misc_feature (1)..(95): NCBI GI: 256726468 Blast Desc: NECHADRAFT_79707 [Nectria haematococca mpVI 77-13-4]
  misc_feature (1)..(91): NCBI GI: 99078479 Blast Desc: ethyl tert-butyl ether degradation EthD [Ruegeria sp. TM1040] gi|99035617|gb|ABF62475.1| Ethyl tert-butyl ether degradation EthD [Ruegeria sp. TM1040]
  misc_feature (1)..(91): NCBI GI: 126740523 Blast Desc: RSK20926_04127 [Roseobacter sp. SK209-2-6] gi|126718324|gb|EBA15039.1| RSK20926_04127 [Roseobacter sp. SK209-2-6]
  misc_feature: Useful for introducing or modulating the production of volatile compounds
MAAILVAAYPVGSEIDKEYYINKHIPRAQKHYDGMISWSCCDGLALPGIPSPYEFMCFMEYPSMEHLGTQMAKATPESNQAMIEDVKNYSKKDAVVWVQIKTEVGENSIGSAQDNI

SEQ ID NO: 6409 - DNA, 981 bp, Muscodor strobelii
  misc_feature: SGI EST ID NO. CUFF.16012.0
  misc_feature: Variant of the nucleotide sequence at SEQ ID NO 6407
ctttcgtgaaccttgtctatatatccgattagttctctctcgtttttgcgttctttctctctgccaaacgatcgaacctcatcctatataaacattgttgaagcatatcaattgcattcatcattgtccgcctctccaaatcgaacatcagaaaatggctgccatacttgttgctgcctaccccgtgggctctgagatcgacaaggagtactacatcaacaagcacatcccaagagcccagaagcactacgatggtatgattagctggtcttgctgtgatggacttgctctaccaggcataccttcgccttacgaattcatgtgtttcatggagtaccccagcatggagcatcttggtacacagatggcgaaagctacaccggaatccaaccaagctatgatagaagacgtcaagaactactcgaagaaggacgccgttgtatgggtacagattaagactgaagagaaaactctataggatccgcgcaagacaacatataaatatcatcaatagtttttcctcattagactaagccagcgacattgcagcttttgaattgcaacatagatattctattctcatcttcaacaaatgattcgtgacaaacccgtgtcgaagcttaggcaggactgtgcaatccttggagcaaatgaagttgacttgctgattcagcatgaaggatttcgtcgctctcccctcggatgcgcacctcacacatcaggctccgaaatcgatgcccctgtaccccgtgcgctttaggagtattctaagtaaacactgtctcttacttgggagcttaaagtttagaattgctaagcgcacaaatcgccgtcaggacagagacatctttcctccaaacacgtttcagtcaacgttgttccgctcaactgctgaattccttttcagccatcaactagacagtatgcatgtacggcatgagactgctatgagaagatgattttttgccaagtatgcgacag

SEQ ID NO: 6410 - DNA, 975 bp, Muscodor strobelii
  misc_feature: SGI cDNA ID NO. 561877
  misc_feature: Encodes the peptide sequence at SEQ ID NO 6411
atgcccgccgacctctccaaatacctagcagagaactacctagtagccgactccaagccctctaaaaaacggaagcggaaacaagccacctcaggtctgataatagccgacgacgacgaaaccggctggcgcgcgtcgcaccagaactccgacgatgaagacacgcccatgacctcggtagcagggacatcagccgagttccgcaaagccaaaaaatcaggatggaagaccctcggcggctcttccaccaccccaacaacccagccccaaacacaaaccgatgaatccacagccgcagaccaaatcctcgcctccgccgcccttgaatccacagcaaacgcagacggcgacgaagccccagtaatgatgtcagacgggacctacgccggtctacaaaccggcgccaccgtatccgcgcaactcgcggcgcgccgggctgccgaaaaagcagaatacgagcgacactccggctcccaagcccgcgaagccgaaacaatttaccgcgacgcaacaggtcgtcgcgtagacgtatccatgaagcgggccgagctgcgccgcgaggcagaagaagcagccaagaaaaaggaagacgccgtcctcgctctccgcggcgatgtacaaatcgaggacctacaaaagcggagagagatgctggatgatgcgaaactcatgactgtagcacgccatgcggatgatgaggagattaatagggagatgaagagccaggtgcgctggggcgatactatggcgcagtttgttacgcccaaggagactacggggacaaaaggaggggggagggtgaaggggaggccgacgtataaggggacttgggccccgaatcggtaccagataccgccgggttataggtgggatggtgtggatagggggaatgggtttgagacggagcggttcaaggctattaatcggcgagagaggaataaggggcttgagtactcgtggcagatggatgagtag

SEQ ID NO: 6411 - protein, 324 aa, Muscodor strobelii
  misc_feature: SGI Peptide ID NO. 561877
  misc_feature (1)..(324): NCBI GI: 46116846 Blast Desc: FG04265.1 [Gibberella zeae PH-1]
  misc_feature (1)..(324): NCBI GI: 256725559 Blast Desc: [Nectria haematococca mpVI 77-13-4]
  misc_feature (1)..(324): NCBI GI: 39952367 Blast Desc: MGG_01826 [Magnaporthe grisea 70-15] gi|74653774|sp|Q52F10.1|CWC26_MAGGR RecName: Full=Pre-mRNA-splicing factor CWC26 gi|145020314|gb|EDK04443.1|
  misc_feature (5)..(323): NCBI GI: 154323672 Blast Desc: BC1G_00235 [Botryotinia fuckeliana B05.10] gi|150842464|gb|EDN17657.1| BC1G_00235 [Botryotinia fuckeliana B05.10]
  misc_feature (1)..(324): NCBI GI: 85078249 Blast Desc: NCU04362 [Neurospora crassa OR74A] gi|74613650|sp|Q7RWR8.1|CWC26_NEUCR RecName: Full=Pre-mRNA-splicing factor cwc-26 gi|28917184|gb|EAA26899.1|
  misc_feature (6)..(324): NCBI GI: 67542041 Blast Desc: AN7184.2 [Aspergillus nidulans FGSC A4] gi|74593816|sp|Q5AWZ6.1|CWC26_EMENI RecName: Full=Pre-mRNA-splicing factor cwc26 gi|40742246|gb|EAA61436.1|
  misc_feature (5)..(323): NCBI GI: 156056963 Blast Desc: SS1G_04212 [Sclerotinia sclerotiorum 1980] gi|154701998|gb|EDO01737.1| SS1G_04212 [Sclerotinia sclerotiorum 1980]
  misc_feature (1)..(324): NCBI GI: 119487403 Blast Desc: NFIA_030300 [Neosartorya fischeri NRRL 181] gi|119410651|gb|EAW20597.1| NFIA_030300 [Neosartorya fischeri NRRL 181]
  misc_feature (2)..(324): NCBI GI: 70981947 Blast Desc: cell cycle control protein (Cwf26) [Aspergillus fumigatus Af293] gi|74666361|sp|Q4W9Z9.1|CWC26_ASPFU RecName: Full=Pre-mRNA-splicing factor cwc26 gi|66844125|gb|EAL84464.1|
  misc_feature (1)..(324): NCBI GI: 238492281 Blast Desc: cell cycle control protein (Cwf26), [Aspergillus flavus NRRL3357] gi|220695871|gb|EED52213.1| cell cycle control protein (Cwf26), [Aspergillus flavus NRRL3357]
MPADLSKYLAENYLVADSKPSKKRKRKQATSGLIIADDDETGWRASHQNSDDEDTPMTSVAGTSAEFRKAKKSGWKTLGGSSTTPTTQPQTQTDESTAADQILASAALESTANADGDEAPVMMSDGTYAGLQTGATVSAQLAARRAAEKAEYERHSGSQAREAETIYRDATGRRVDVSMKRAELRREAEEAAKKKEDAVLALRGDVQIEDLQKRREMLDDAKLMTVARHADDEEINREMKSQVRWGDTMAQFVTPKETTGTKGGGRVKGRPTYKGTWAPNRYQIPPGYRWDGVDRGNGFETERFKAINRRERNKGLEYSWQMDE

SEQ ID NO: 6412 - DNA, 4421 bp, Muscodor strobelii
  misc_feature: SGI EST ID NO. CUFF.16199.0
  misc_feature: Variant of the nucleotide sequence at SEQ ID NO 6410
tcagaactgataaggacctcaatttcttatcgcaatggtagctgccattgcatcactcattgtttctcatacaacagcaagatcctccaggcttcaggcaaccagatctcacagcagcaaccttcattacatacaatctcacacgacttgcatctctttacatgcgcccagtaatcgcgaactcctagcctcctcaggcgcgaaaaatcaccactagctatctttccaagctacgaccgccactctcacttcaccacctcacacccactcttcctgccacaatgcccgccgacctctccaaatacctagcagagaactacctagtagccgactccaagccctctaaaaaacggaagcggaaacaagccacctcaggtctgataatagccgacgacgacgaaaccggctggcgcgcgtcgcaccagaactccgacgatgaagacacgcccatgacctcggtagcagggacatcagccgagttccgcaaagccaaaaaatcaggatggaagaccctcggcggctcttccaccaccccaacaacccagccccaaacacaaaccgatgaatccacagccgcagaccaaatcctcgcctccgccgcccttgaatccacagcaaacgcagacggcgacgaagccccagtaatgatgtcagacgggacctacgccggtctacaaaccggcgccaccgtatccgcgcaactcgcggcgcgccgggctgccgaaaaagcagaatacgagcgacactccggctcccaagcccgcgaagccgaaacaatttaccgcgacgcaacaggtcgtcgcgtagacgtatccatgaagcgggccgagctgcgccgcgaggcagaagaagcagccaagaaaaaggaagacgccgtcctcgctctccgcggcgatgtacaaatcgaggacctacaaaagcggagagagatgctggatgatgcgaaactcatgactgtagcacgccatgcggatgatgaggagattaatagggagatgaagagccaggtgcgctggggcgatactatggcgcagtttgttacgcccaaggagactacggggacaaaaggaggggggagggtgaaggggaggccgacgtataaggggacttgggccccgaatcggtaccagataccgccgggttataggtgggatggtgtggatagggggaatgggtttgagacggagcggttcaaggctattaatcggcgagagaggaataaggggcttgagtactcgtggcagatggatgagtagatggcggactggggatatggaggggagagagaggatgagagataccctttgcgttggttacggcttatgaatatatcatgaagaattacttctatgtggttcagttgcgcttgatgtgacaagagtgtagcctagcatgtcacaatttcaagacgagaaagcgtctacattattcatgattctcgtatattgtaacgcaacaatgggctactcatctaagtgccgatggtcatgggctcatgctctagcaagccacgcctctaacctgcaccatgatcatcccgaaacaatcgctataagctcggtgagcgcggcgaacaagcacgccaccgttgaagtgctacgtacacatcctatgtagctcctagagctctgatctgaaagcccacggccctctcggccagaatatacaatacaactcatctctctaaagcccagaaatctcgtctcacttaaccagaagtttgctgtggcagggatttctaacccttgcggcgcagcagcttggtagacggttcaaacgaggaattttccttgaccatctggatccactccttcttagtaagctggcccgggccatcgagacgattcttgaagatcctcagcaggcctccaatagagaccccttccgctggtagagcttcaatgatgtccattacagtgaccttcgtgccctggccagaggttgatgcctcaggggaggctaccagtggtcgagatgggatggggctgccagccctcgagccagcaggtgtgcctttggcagagacgccaagcttctccttgcgtttcttgatcttgcctccagcgccatcggacatctcgcctgcagtagcttcgccgtcgcttccagatccagcacctcggccggggataggtgtgcctccacgactgccagcaagagagcccgctggaccaagtttcttcttcttgttgcgagtcgactcattaccactcgagtcagagttcaggggagagccaggtctcttaagcgatttgcctttcttggcggcatcagcagcagtcttcttgccttggggggtattggcacccttggtagacgctcccgaagcaccgttgggatccttgtcagctttctcctcttcctcctcgtccgagtcggaatcagagtcgctctgtgtccacaatgattagttttgcatagatgttgatgttaataaataatgccttacctcggacgacgcaaaaggatctctgtcgttagatgaatcgctgtcgtactggaactgcttgtctcgcttcttcagggctttcttgagactcttgccgaggagttttcgtgcttcctcctctttcttcacggcggcttcctcatcttcaacttccttctcgtctgcatcaccgaagagattggcacccagctgctcgcgacgaactctgtccttggcatctttagtatcgtcatctttctcgggctcgaagccggccgtctcatcgtcatcctgaaattcgtccccagagacatcaatgtcgtcatgctccatcttctctccacgcgaagcttgggcaaaggttgaactctcctgcttgacagccgtggggccgtacatgattcttcgggattcctccatcgccttggccgccttgtctcggtcagagtctcttatggcccaacgcgtgggggcggccttcttgttcatgatcttctcggcctcttcgatagacaagtgctggaatgctccccgctttggagcgaacttgtaccacttctcaaggggcaacatgcgatatccaccagcctcggggtgggggatcagggcaaccttcatatcagacaagggggcctcgtactgtccgacccagacattcttgccatcagcatcttccaagtgccagggtagagcttcctcgtatctgatctcggcctccttcttctgcttctccgttcggggctggtagtggacctgggtagcactcttgcgctcctctttgttcttctgctgtaagcgcttgcgctcgacctccttcatcacgggggctttctgggcatcatccaaggcacgctgggcgtctctctgggccttcagctgcgctagtcgctccgtctcctcgttgttcacggcggggcctcgacaacttcctccttgacttcgcggccggcggggggctgtcgtggatcgcggcgctgaagcgtgacaggccgggggaagtgttcctggtcggtgggatcgatctctgactgcttcacacctcggatctgaggagcgaagcgcatgacgtggaagcgctggccctccttcaaggacttcttgctgacaaagagagggaactcttgacctccggggggcatgggtgtcgaccaaccaccattctgagatcgcagggcgttgaagttgggcggaggcttgttgatcgggggagtctgtctgacgttgagaccgggtctgtttggaccattgggaccgccaggtctgggagggggagcgccgcctcgaccaggtcggctcggggctctcatggggttgccgttggcgggaggtctgcgaataggtcggagaggattggccgaggaagaaggagggggacgcctcggggcgccattgggcgcgttgggaggtggtgcgctcatgttggatggatgaatagaaactctgtgtatatatggcaatggttcctggtaagaaggcgatggtgaaagagatcaaatccgtcctgcgactaccagtctttgacgcgattgataatgaacagcattgagtgagatgtatgtcaatgcagaaacaagcgacagatcagaggatacaatagggcagattgcgcgagttgaagtgctctcgagtggagggtcgtcgcgtttctttgacctgcgataggcagattggggttgacttgtcgaggcaggcgtggacaaggtgcgaccttgcgacccgagcaagagtcgggcaaagggagaccctctgcaaaatgcacgcgcaggactatctatgcgatagagctgcttgaaggatcaaagggacatgcagtgctatgatgggcgccgtactaggcagacgaggtagggatagagatgagagatgcgagatgcaagagatgatgtcgaaagcggtgactttcccacagccagtggtacgggagtacaaagtgacgagggatgacaaagagtgctgccactggcgtttaggctgctggagctgcagattccag

SEQ ID NO: 6413 - DNA, 1992 bp, Muscodor strobelii
  misc_feature: SGI cDNA ID NO. 561878
  misc_feature: Reduced expression when VOC is produced
  misc_feature: Encodes the peptide sequence at SEQ ID NO 6414
atgagcgcaccacctcccaacgcgcccaatggcgccccgaggcgtccccctccttcttcctcggccaatcctctccgacctattcgcagacctcccgccaacggcaaccccatgagagccccgagccgacctggtcgaggcggcgctccccctcccagacctggcggtcccaatggtccaaacagacccggtctcaacgtcagacagactcccccgatcaacaagcctccgcccaacttcaacgccctgcgatctcagaatggtggttggtcgacacccatgccccccggaggtcaagagttccctctctttgtcagcaagaagtccttgaaggagggccagcgcttccacgtcatgcgcttcgctcctcagatccgaggtgtgaagcagtcagagatcgatcccaccgaccaggaacacttcccccggcctgtcacgcttcagcgccgcgatccacgacagccccccgccggccgcgaagtcaaggaggaagttagagacgcccagcgtgccttggatgatgcccagaaagcccccgtgatgaaggaggtcgagcgcaagcgcttacagcagaagaacaaagaggagcgcaagagtgctacccaggtccactaccagccccgaacggagaagcagaagaaggaggccgagatcagatacgaggaagctctaccctggcacttggaagatgctgatggcaagaatgtctgggtcggacagtacgaggcccccttgtctgatatgaaggttgccctgatcccccaccccgaggctggtggatatcgcatgttgccccttgagaagtggtacaagttcgctccaaagcggggagcattccagcacttgtctatcgaagaggccgagaagatcatgaacaagaaggccgcccccacgcgttgggccataagagactctgaccgagacaaggcggccaaggcgatggaggaatcccgaagaatcatgtacggccccacggctgtcaagcaggagagttcaacctttgcccaagcttcgcgtggagagaagatggagcatgacgacattgatgtctctggggacgaatttcaggatgacgatgagacggccggcttcgagcccgagaaagatgacgatactaaagatgccaaggacagagttcgtcgcgagcagctgggtgccaatctcttcggtgatgcagacgagaaggaagttgaagatgaggaagccgccgtgaagaaagaggaggaagcacgaaaactcctcggcaagagtctcaagaaagccctgaagaagcgagacaagcagttccagtacgacagcgattcatctaacgacagagatccttttgcgtcgtccgagagcgactctgattccgactcggacgaggaggaagaggagaaagctgacaaggatcccaacggtgcttcgggagcgtctaccaagggtgccaataccccccaaggcaagaagactgctgctgatgccgccaagaaaggcaaatcgcttaagagacctggctctcccctgaactctgactcgagtggtaatgagtcgactcgcaacaagaagaagaaacttggtccagcgggctctcttgctggcagtcgtggaggcacacctatccccggccgaggtgctggatctggaagcgacggcgaagctactgcaggcgagatgtccgatggcgctggaggcaagatcaagaaacgcaaggagaagcttggcgtctctgccaaaggcacacctgctggctcgagggctggcagccccatcccatctcgaccactggtagcctcccctgaggcatcaacctctggccagggcacgaaggtcactgtaatggacatcattgaagctctaccagcggaaggggtctctattggaggcctgctgaggatcttcaagaatcgtctcgatggcccgggccagcttactaagaaggagtggatccagatggtcaaggaaaattcctcgtttgaaccgtctaccaagctgctgcgccgcaagggttag

SEQ ID NO: 6414 - protein, 663 aa, Muscodor strobelii
  misc_feature: SGI Peptide ID NO. 561878
  misc_feature (1)..(661): NCBI GI: 256725960 Blast Desc: NECHADRAFT_104675 [Nectria haematococca mpVI 77-13-4]
  misc_feature (9)..(661): NCBI GI: 46116844 Blast Desc: FG04264.1 [Gibberella zeae PH-1]
  misc_feature (1)..(579): NCBI GI: 261359781 Blast Desc: transcription initiation factor IIF subunit alpha [Verticillium albo-atrum VaMs.102]
  misc_feature (24)..(662): NCBI GI: 145613177 Blast Desc: MGG_11130 [Magnaporthe grisea 70-15] gi|145020313|gb|EDK04442.1| MGG_11130 [Magnaporthe grisea 70-15]
  misc_feature (1)..(662): NCBI GI: 156056961 Blast Desc: SS1G_04211 [Sclerotinia sclerotiorum 1980] gi|154701997|gb|EDO01736.1| SS1G_04211 [Sclerotinia sclerotiorum 1980]
  misc_feature (1)..(662): NCBI GI: 154323674 Blast Desc: BC1G_00236 [Botryotinia fuckeliana B05.10] gi|150842465|gb|EDN17658.1| BC1G_00236 [Botryotinia fuckeliana B05.10]
  misc_feature (17)..(662): NCBI GI: 116196372 Blast Desc: CHGG_04784 [Chaetomium globosum CBS 148.51] gi|88180697|gb|EAQ88165.1| CHGG_04784 [Chaetomium globosum CBS 148.51]
  misc_feature (84)..(605): NCBI GI: 171688620 Blast Desc: protein product [Podospora anserina] gi|170944272|emb|CAP70382.1| protein product [Podospora anserina]
  misc_feature (84)..(662): NCBI GI: 85078253 Blast Desc: NCU04363 [Neurospora crassa OR74A] gi|28917185|gb|EAA26900.1| [Neurospora crassa OR74A] gi|40882261|emb|CAF06086.1| related to transcription initiation
  misc_feature (69)..(660): NCBI GI: 242814756 Blast Desc: transcription initiation factor IIF subunit alpha, [Talaromyces stipitatus ATCC 10500] gi|218714773|gb|EED14196.1| transcription initiation factor IIF subunit alpha, [Talaromyces
  misc_feature: Useful for introducing or modulating the production of volatile compounds
MSAPPPNAPNGAPRRPPPSSSANPLRPIRRPPANGNPMRAPSRPGRGGAPPPRPGGPNGPNRPGLNVRQTPPINKPPPNFNALRSQNGGWSTPMPPGGQEFPLFVSKKSLKEGQRFHVMRFAPQIRGVKQSEIDPTDQEHFPRPVTLQRRDPRQPPAGREVKEEVRDAQRALDDAQKAPVMKEVERKRLQQKNKEERKSATQVHYQPRTEKQKKEAEIRYEEALPWHLEDADGKNVWVGQYEAPLSDMKVALIPHPEAGGYRMLPLEKWYKFAPKRGAFQHLSIEEAEKIMNKKAAPTRWAIRDSDRDKAAKAMEESRRIMYGPTAVKQESSTFAQASRGEKMEHDDIDVSGDEFQDDDETAGFEPEKDDDTKDAKDRVRREQLGANLFGDADEKEVEDEEAAVKKEEEARKLLGKSLKKALKKRDKQFQYDSDSSNDRDPFASSESDSDSDSDEEEEEKADKDPNGASGASTKGANTPQGKKTAADAAKKGKSLKRPGSPLNSDSSGNESTRNKKKKLGPAGSLAGSRGGTPIPGRGAGSGSDGEATAGEMSDGAGGKIKKRKEKLGVSAKGTPAGSRAGSPIPSRPLVASPEASTSGQGTKVTVMDIIEALPAEGVSIGGLLRIFKNRLDGPGQLTKKEWIQMVKENSSFEPSTKLLRRKG

SEQ ID NO: 6415 - DNA, 4364 bp, Muscodor strobelii
  misc_feature: SGI EST ID NO. CUFF.16200.1
  misc_feature: Variant of the nucleotide sequence at SEQ ID NO 6413
ctggaatctgcagctccagcagcctaaacgccagtggcagcactctttgtcatccctcgtcactttgtactcccgtaccactggctgtgggaaagtcaccgctttcgacatcatctcttgcatctcgcatctctcatctctatccctacctcgtctgcctagtacggcgcccatcatagcactgcatgtccctttgatccttcaagcagctctatcgcatagatagtcctgcgcgtgcattttgcagagggtctccctttgcccgactcttgctcgggtcgcaaggtcgcaccttgtccacgcctgcctcgacaagtcaaccccaatctgcctatcgcaggtcaaagaaacgcgacgaccctccactcgagagcacttcaactcgcgcaatctgccctattgtatcctctgatctgtcgcttgtttctgcattgacatacatctcactcaatgctgttcattatcaatcgcgtcaaagactggtagtcgcaggacggatttgatctctttcaccatcgccttcttaccaggaaccattgccatatatacacagagtttctattcatccatccaacatgagcgcaccacctcccaacgcgcccaatggcgccccgaggcgtccccctccttcttcctcggccaatcctctccgacctattcgcagacctcccgccaacggcaaccccatgagagccccgagccgacctggtcgaggcggcgctccccctcccagacctggcggtcccaatggtccaaacagacccggtctcaacgtcagacagactcccccgatcaacaagcctccgcccaacttcaacgccctgcgatctcagaatggtggttggtcgacacccatgccccccggaggtcaagagttccctctctttgtcagcaagaagtccttgaaggagggccagcgcttccacgtcatgcgcttcgctcctcagatccgaggtgtgaagcagtcagagatcgatcccaccgaccaggaacacttcccccggcctgtcacgcttcagcgccgcgatccacgacagccccccgccggccgcgaagtcaaggaggaagttgtcgaggccccgccgtgaacaacgaggagacggagcgactagcgcagctgaaggcccagagagacgcccagcgtgccttggatgatgcccagaaagcccccgtgatgaaggaggtcgagcgcaagcgcttacagcagaagaacaaagaggagcgcaagagtgctacccaggtccactaccagccccgaacggagaagcagaagaaggaggccgagatcagatacgaggaagctctaccctggcacttggaagatgctgatggcaagaatgtctgggtcggacagtacgaggcccccttgtctgatatgaaggttgccctgatcccccaccccgaggctggtggatatcgcatgttgccccttgagaagtggtacaagttcgctccaaagcggggagcattccagcacttgtctatcgaagaggccgagaagatcatgaacaagaaggccgcccccacgcgttgggccataagagactctgaccgagacaaggcggccaaggcgatggaggaatcccgaagaatcatgtacggccccacggctgtcaagcaggagagttcaacctttgcccaagcttcgcgtggagagaagatggagcatgacgacattgatgtctctggggacgaatttcaggatgacgatgagacggccggcttcgagcccgagaaagatgacgatactaaagatgccaaggacagagttcgtcgcgagcagctgggtgccaatctcttcggtgatgcagacgagaaggaagttgaagatgaggaagccgccgtgaagaaagaggaggaagcacgaaaactcctcggcaagagtctcaagaaagccctgaagaagcgagacaagcagttccagtacgacagcgattcatctaacgacagagatccttttgcgtcgtccgagagcgactctgattccgactcggacgaggaggaagaggagaaagctgacaaggatcccaacggtgcttcgggagcgtctaccaagggtgccaataccccccaaggcaagaagactgctgctgatgccgccaagaaaggcaaatcgcttaagagacctggctctcccctgaactctgactcgagtggtaatgagtcgactcgcaacaagaagaagaaacttggtccagcgggctctcttgctggcagtcgtggaggcacacctatccccggccgaggtgctggatctggaagcgacggcgaagctactgcaggcgagatgtccgatggcgctggaggcaagatcaagaaacgcaaggagaagcttggcgtctctgccaaaggcacacctgctggctcgagggctggcagccccatcccatctcgaccactggtagcctcccctgaggcatcaacctctggccagggcacgaaggtcactgtaatggacatcattgaagctctaccagcggaaggggtctctattggaggcctgctgaggatcttcaagaatcgtctcgatggcccgggccagcttactaagaaggagtggatccagatggtcaaggaaaattcctcgtttgaaccgtctaccaagctgctgcgccgcaagggttagaaatccctgccacagcaaacttctggttaagtgagacgagatttctgggctttagagagatgagttgtattgtatattctggccgagagggccgtgggctttcagatcagagctctaggagctacataggatgtgtacgtagcacttcaacggtggcgtgcttgttcgccgcgctcaccgagcttatagcgattgtttcgggatgatcatggtgcaggttagaggcgtggcttgctagagcatgagcccatgaccatcggcacttagatgagtagcccattgttgcgttacaatatacgagaatcatgaataatgtagacgctttctcgtcttgaaattgtgacatgctaggctacactcttgtcacatcaagcgcaactgaaccacatagaagtaattcttcatgatatattcataagccgtaaccaacgcaaagggtatctctcatcctctctctcccctccatatccccagtccgccatctactcatccatctgccacgagtactcaagccccttattcctctctcgccgattaatagccttgaaccgctccgtctcaaacccattccccctatccacaccatcccacctataacccggcggtatctggtaccgattcggggcccaagtccccttatacgtcggcctccccttcaccctcccccctccttttgtccccgtagtctccttgggcgtaacaaactgcgccatagtatcgccccagcgcacctggctcttcatctccctattaatctcctcatcatccgcatggcgtgctacagtcatgagtttcgcatcatccagcatctctctccgcttttgtaggtcctcgatttgtacatcgccgcggagagcgaggacggcgtcttcctttttcttggctgcttcttctgcctcgcggcgcagctcggcccgcttcatggatacgtctacgcgacgacctgttgcgtcgcggtaaattgtttcggcttcgcgggcttgggagccggagtgtcgctcgtattctgctttttcggcagcccggcgcgccgcgagttgcgcggatacggtggcgccggtttgtagaccggcgtaggtcccgtctgacatcattactggggcttcgtcgccgtctgcgtttgctgtggattcaagggcggcggaggcgaggatttggtctgcggctgtggattcatcggtttgtgtttggggctgggttgttggggtggtggaagagccgccgagggtcttccatcctgattttttggctttgcggaactcggctgatgtccctgctaccgaggtcatgggcgtgtcttcatcgtcggagttctggtgcgacgcgcgccagccggtttcgtcgtcgtcggctattatcagacctgaggtggcttgtttccgcttccgttttttagagggcttggagtcggctactaggtagttctctgctaggtatttggagaggtcggcgggcattgtggcaggaagagtgggtgtgaggtggtgaagtgagagtggcggtcgtagcttggaaagatagctagtggtgatttttcgcgcctgaggaggctaggagttcgcgattactgggcgcatgtaaagagatgcaagtcgtgtgagattgtatgtaatgaaggttgctgctgtgagatctggttgcctgaagcctggaggatcttgctgttgtatgagaaacaatgagtgatgcaatggcagctaccattgcgataagaaattgaggtccttatcagttctga

SEQ ID NO: 6416 - DNA, 2769 bp, Muscodor strobelii
  misc_feature: SGI cDNA ID NO. 561879
  misc_feature: Encodes the peptide sequence at SEQ ID NO 6417
atgaatagaggcaccgtaatcacggataccttctcttcacgcggcgagcagcacttacagcagcctcaccctaatgctttgtataagcctcaaggctatagacaaataagcttcagccctgagcaaattgcaaatcaagctgggcttcttgacgagatctgccaccgtataatcatcggtactgagatctcgccgtcagagatttctgaaaaagagcagtttcgagagcgagtcgagtacatttgtcgaactgttgttaatagttacgtatatgagcacgataatcatacagtctaccgtgaagacggtgtattttcttccgaactcgtacagttgaggtgcttcggcagtctggcttcgggatttgcaaccaaagctgcagacatggaccttggcctactgtgtcctgggttggatgtgtccccagattcaccaaattcttctatcccacgcctcatcgaaaaggccctcctagactccggatttggagcacgccttctcacgaaaactcgcgttccaataatcaagctttgtgagaagcctaatgaaaagctccgtcagagcctactggacgcaagaatgaagtgggagaagggcattgatgaagacgatcgagatgcagaagatgatcctgacgccacaaacgagcccgatccccaagtgagcgccggtcctctcccagaggggacttctaccccagccctgacagttcacacttctctggagacaccatcctccacgaagcctatatcagcacatgaaggtcaattacctactctaagacagaccaaagatcagtcattagctggttactacggtagcgcgaatcgcctcttgcgccgtctgaagggccatgatgtcacgcagtcaaactcgcaagactttaccgaagctgaatatggcctacttgataatgtgacccaagcatttcttaatgggctgcgcgatgaagatcttcagagtcgcatcttagcgtatccttcattgcgtgtcggtacagcagggtcgccaaatttccgctcactccttggcgcttacaccatggtagaaggcgagagggtaatagttttgtgggagaccaaggaccttatcccaagtaacccgagactgcgcgaggaatttgataggaggattcagcgctggaaagacctacagtacgcaaagagctttggcactaatcctgtctggttcaacaaggagctgcagctgtctctcgatagtctccgcaaaataccatcaatacagctgatttgtcttcaacaagatcagaacgaacttccaagagcttaccacttgcgcgcacatgccatcgcaactactctcttggacggtaccctgttacccagtcccggtattcagtcaaaaatcatcgagtcctacgtaaatggagttcgggacgagaagattaaggaagaggttcatgcattcgccgacttgactaaaacgcaaaatctcaggaccgttgcgagaagacacaaggctcttcacctcgcctctgagtaccagagggctcttgagaaagtggcttacggagacgaacacgttccattgattgccaattatatcaccattctacggcgatttcctatccgcccaggaatcgcacacccttcatcgacggactttgagtacatggttcctctcttacaagatgaaacaaccttagttgagagcatcaaatatctacctgatccatctacgctcggccccaacaagccaaaagatagatactgtgacagccttgaattccctaagagtggtgtaggcgtccagtgcgatatcaatttctctgctcatctcgccatgcacaacactacgctgctaagatgctattcgttcactgatccacgtgtgcgacctttggtgcttttcgtcaagcattgggcaaaagcgagaggtatcaacacgccgtaccgtggaaccctaagtagttatggctatgtcctaatgatgttacactacttggtcaacgttgtagaaccgtttgtctgtcctaatctgcagcagctcgcaccccctgacccaccaaatttaccgcctgaggctttggaaggaatttccacttgtcaaggaagaaacatacgtttttggaaggatgaacaggccattcaaggtctagcacagcagggccgactgaaccaaaactccgactcgttaggtacacttcttcgtgggttctttgagtactatgctcagaacaacatgatgagcactgtttcaaaaagagggtttgactggggtcgagatgtgctcagcattcgtacgcacggaggattattaaccaaagcggcattgggctggactggtgcgaagaccgtcatgcaaccgcagactggaacagcggctcccgcgccactggagctcgatgcaacaatctcgtcgtctccatccatgactaaccacaaggaaaccaatcaattagatcccgaacagccattgtctccaactccacaggctatatcggaacaagccgtcaaagcgaaagatgtcaaagagatacgacaccgctacctcttcgccatagaggatcccttcgagcttgatcacaatgttgctcgtaccgtcacgcacaacggtatcgttgccatccgagacgaattccgccgtgcttggaagcttatcaaagctgcgggaatgacagggcgtgtagctgaggatttgttggaagatgtgaaaacagagaaggaacagcagggcacgaaagagtttctgtccctcttgcatgagattcatggagatatgttcttttcgagtctgccttcgaactga

SEQ ID NO: 6417 - protein, 922 aa, Muscodor strobelii
  misc_feature: SGI Peptide ID NO. 561879
  misc_feature (718)..(849): Pfam Id: PF03828 Pfam Desc: Poly(A) polymerase
  misc_feature (718)..(768): Pfam Id: PF03828 Pfam Desc: Poly(A) polymerase
  misc_feature (14)..(912): NCBI GI: 46116842 Blast Desc: FG04263.1 [Gibberella zeae PH-1]
  misc_feature (13)..(878): NCBI GI: 256725560 Blast Desc: NECHADRAFT_10717 [Nectria haematococca mpVI 77-13-4]
  misc_feature (34)..(911): NCBI GI: 116196370 Blast Desc: CHGG_04783 [Chaetomium globosum CBS 148.51] gi|88180696|gb|EAQ88164.1| CHGG_04783 [Chaetomium globosum CBS 148.51]
  misc_feature (25)..(912): NCBI GI: 261359780 Blast Desc: caffeine-induced death protein [Verticillium albo-atrum VaMs.102]
  misc_feature (20)..(903): NCBI GI: 171688616 Blast Desc: protein product [Podospora anserina] gi|170944270|emb|CAP70380.1| protein product [Podospora anserina]
  misc_feature (43)..(912): NCBI GI: 156056957 Blast Desc: SS1G_04209 [Sclerotinia sclerotiorum 1980] gi|154701995|gb|EDO01734.1| SS1G_04209 [Sclerotinia sclerotiorum 1980]
  misc_feature (26)..(782): NCBI GI: 85078256 Blast Desc: NCU04364 [Neurospora crassa OR74A] gi|28917186|gb|EAA26901.1| [Neurospora crassa OR74A] gi|40882260|emb|CAF06085.1| related to caffeine-induced death 1
  misc_feature (1)..(771): NCBI GI: 154323676 Blast Desc: BC1G_00237 [Botryotinia fuckeliana B05.10] gi|150842466|gb|EDN17659.1| BC1G_00237 [Botryotinia fuckeliana B05.10]
  misc_feature (419)..(912): NCBI GI: 145613175 Blast Desc: MGG_11129 [Magnaporthe grisea 70-15] gi|145020312|gb|EDK04441.1| MGG_11129 [Magnaporthe grisea 70-15]
  misc_feature (574)..(897): NCBI GI: 169610601 Blast Desc: SNOG_08406 [Phaeosphaeria nodorum SN15] gi|160702106|gb|EAT84682.2| SNOG_08406 [Phaeosphaeria nodorum SN15]
MNRGTVITDTFSSRGEQHLQQPHPNALYKPQGYRQISFSPEQIANQAGLLDEICHRIIIGTEISPSEISEKEQFRERVEYICRTVVNSYVYEHDNHTVYREDGVFSSELVQLRCFGSLASGFATKAADMDLGLLCPGLDVSPDSPNSSIPRLIEKALLDSGFGARLLTKTRVPIIKLCEKPNEKLRQSLLDARMKWEKGIDEDDRDAEDDPDATNEPDPQVSAGPLPEGTSTPALTVHTSLETPSSTKPISAHEGQLPTLRQTKDQSLAGYYGSANRLLRRLKGHDVTQSNSQDFTEAEYGLLDNVTQAFLNGLRDEDLQSRILAYPSLRVGTAGSPNFRSLLGAYTMVEGERVIVLWETKDLIPSNPRLREEFDRRIQRWKDLQYAKSFGTNPVWFNKELQLSLDSLRKIPSIQLICLQQDQNELPRAYHLRAHAIATTLLDGTLLPSPGIQSKIIESYVNGVRDEKIKEEVHAFADLTKTQNLRTVARRHKALHLASEYQRALEKVAYGDEHVPLIANYITILRRFPIRPGIAHPSSTDFEYMVPLLQDETTLVESIKYLPDPSTLGPNKPKDRYCDSLEFPKSGVGVQCDINFSAHLAMHNTTLLRCYSFTDPRVRPLVLFVKHWAKARGINTPYRGTLSSYGYVLMMLHYLVNVVEPFVCPNLQQLAPPDPPNLPPEALEGISTCQGRNIRFWKDEQAIQGLAQQGRLNQNSDSLGTLLRGFFEYYAQNNMMSTVSKRGFDWGRDVLSIRTHGGLLTKAALGWTGAKTVMQPQTGTAAPAPLELDATISSSPSMTNHKETNQLDPEQPLSPTPQAISEQAVKAKDVKEIRHRYLFAIEDPFELDHNVARTVTHNGIVAIRDEFRRAWKLIKAAGMTGRVAEDLLEDVKTEKEQQGTKEFLSLLHEIHGDMFFSSLPSN

SEQ ID NO: 6418 - DNA, 4279 bp, Muscodor strobelii
  misc_feature: SGI EST ID NO. CUFF.16021.0
  misc_feature: Variant of the nucleotide sequence at SEQ ID NO 6416
cagcaagcaacaccatctggatggtatatcttgttcgccgcatagttccctctcacaaccaatcattgcacatcccataagctatccttgaacagctctatttgagccgcataacacctttcatcccgctgagttgcgcggcttaggttgttattggctatcgattcgactacacaccagcataatcgccaccatcccctcaatccttttgacatacctctgttgcatactatttccttcacgggtagtagcgactcaccaggccctgccgagatactgttgagatactgtaacattgacggccttgtgctgaaattcacctcatgttacggcagtctcaagacagtatgcttgtaatcctaagtttgatacgatagctatcttgtgtgaacacgtctcgttctcattacttacaccctcttcgttcttgagaccatggccatcgtgttctaagtcaacccaaaagtcacgcttttatcatgcaggcttctcaagccggagacggccctctcgaggatcgtcttcgcaatctcatactcacaagctccagccaagagaccagacatgatatcgacacttctcactctcagccgctcataaatggagaaagtgttcagcaggatgaatcactatctgctccagcacaaagaccggcgaagacttccagaaaacgtcctaaccaagcacagcgacgccagatgaatgcagagctggttattcccctcgatactaggccatcagttcaaccctcttactcaactcctcaacatttcaatagcaatcatcgcactcataatcataatgcacaaaatggcaggttccaggctcaaacagacacttatcccgccaattctcgaggccggggttttgccagaggaaaccactcgcagtttggtcggggccatactcatcagggcttcacacagtcatccacagcttcttcccgtcagcagtcgacttgggtgcgccagcagcccggcgccgttgacagcatgaatagaggcaccgtaatcacggataccttctcttcacgcggcgagcagcacttacagcagcctcaccctaatgctttgtataagcctcaaggctatagacaaataagcttcagccctgagcaaattgcaaatcaagctgggcttcttgacgagatctgccaccgtataatcatcggtactgagatctcgccgtcagagatttctgaaaaagagcagtttcgagagcgagtcgagtacatttgtcgaactgttgttaatagttacgtatatgagcacgataatcatacagtctaccgtgaagacggtgtattttcttccgaactcgtacagttgaggtgcttcggcagtctggcttcgggatttgcaaccaaagctgcagacatggaccttggcctactgtgtcctgggttggatgtgtccccagattcaccaaattcttctatcccacgcctcatcgaaaaggccctcctagactccggatttggagcacgccttctcacgaaaactcgcgttccaataatcaagctttgtgagaagcctaatgaaaagctccgtcagagcctactggacgcaagaatgaagtgggagaagggcattgatgaagacgatcgagatgcagaagatgatcctgacgccacaaacgagcccgatccccaagtgagcgccggtcctctcccagaggggacttctaccccagccctgacagttcacacttctctggagacaccatcctccacgaagcctatatcagcacatgaaggtcaattacctactctaagacagaccaaagatcagtcattagctggttactacggtagcgcgaatcgcctcttgcgccgtctgaagggccatgatgtcacgcagtcaaactcgcaagactttaccgaagctgaatatggcctacttgataatgtgacccaagcatttcttaatgggctgcgcgatgaagatcttcagagtcgcatcttagcgtatccttcattgcgtgtcggtacagcagggtcgccaaatttccgctcactccttggcgcttacaccatggtagaaggcgagagggtaatagttttgtgggagaccaaggaccttatcccaagtaacccgagactgcgcgaggaatttgataggaggattcagcgctggaaagacctacagtacgcaaagagctttggcactaatcctgtctggttcaacaaggagctgcagctgtctctcgatagtctccgcaaaataccatcaatacagctgatttgtcttcaacaagatcagaacgaacttccaagagcttaccacttgcgcgcacatgccatcgcaactactctcttggacggtaccctgttacccagtcccggtattcagtcaaaaatcatcgagtcctacgtaaatggagttcgggacgagaagattaaggaagaggttcatgcattcgccgacttgactaaaacgcaaaatctcaggaccgttgcgagaagacacaaggctcttcacctcgcctctgagtaccagagggctcttgagaaagtggcttacggagacgaacacgttccattgattgccaattatatcaccattctacggcgatttcctatccgcccaggaatcgcacacccttcatcgacggactttgagtacatggttcctctcttacaagatgaaacaaccttagttgagagcatcaaatatctacctgatccatctacgctcggccccaacaagccaaaagatagatactgtgacagccttgaattccctaagagtggtgtaggcgtccagtgcgatatcaatttctctgctcatctcgccatgcacaacactacgctgctaagatgctattcgttcactgatccacgtgtgcgacctttggtgcttttcgtcaagcattgggcaaaagcgagaggtatcaacacgccgtaccgtggaaccctaagtagttatggctatgtcctaatgatgttacactacttggtcaacgttgtagaaccgtttgtctgtcctaatctgcagcagctcgcaccccctgacccaccaaatttaccgcctgaggctttggaaggaatttccacttgtcaaggaagaaacatacgtttttggaaggatgaacaggccattcaaggtctagcacagcagggccgactgaaccaaaactccgactcgttaggtacacttcttcgtgggttctttgagtactatgctcagaacaacatgatgagcactgtttcaaaaagagggtttgactggggtcgagatgtgctcagcattcgtacgcacggaggattattaaccaaagcggcattgggctggactggtgcgaagaccgtcatgcaaccgcagactggaacagcggctcccgcgccactggagctcgatgcaacaatctcgtcgtctccatccatgactaaccacaaggaaaccaatcaattagatcccgaacagccattgtctccaactccacaggctatatcggaacaagccgtcaaagcgaaagatgtcaaagagatacgacaccgctacctcttcgccatagaggatcccttcgagcttgatcacaatgttgctcgtaccgtcacgcacaacggtatcgttgccatccgagacgaattccgccgtgcttggaagcttatcaaagctgcgggaatgacagggcgtgtagctgaggatttgttggaagatgtgaaaacagagaaggaacagcagggcacgaaagagtttctgtccctcttgcatgagattcatggagatatgttcttttcgagtctgccttcgaactgatgaaagaaaactggcatcgtgggacttaattaggtggactaggtgtgcacttggctgattatttggcttgttggagtttgatgtgttatgacgtgatgagtcatgtgctgttgagctgagaaggggcacgtgtaatgttgtgatgaggaatgaagtggtctgcttaaaaatggacggtgggagacgtgtgcggtaaaggggatggccccactcctatgcgagaagcactgacggctgcaactggttggtaattgtcgtgacgtatctggtgaaagggtgcctaatctagaatgaggcgttaggctacttcgtagttgttaatgctaggtctgcatacctacgctcatgttcacgttgtgaaattccggctgtggctgtctattgtagtctactttctgtatcctggattcgacaggtcttctctagtgacgcctccagctgcacgatgccaagtcacaggcaggcccggcgtattctagtcccttataatgcttagtttcttgtacaactcacatccc

SEQ ID NO: 6419 - DNA, 1848 bp, Muscodor strobelii
  misc_feature: SGI cDNA ID NO. 561880
  misc_feature: Encodes the peptide sequence at SEQ ID NO 6420
atgggcatttggggtctagccacgggcattcgtcgctatggcgctgccactcccatgactggcgacactgtggtcattgatggacccgcacttgtacatagaatcttctatgcgcgtcccccaccgccgcccgcttgtttcatgagctatccttcctacgctgtatttggcgaggccgtcattcagtggcttgatgagttgcatagcaaaaatgtgaacgtacgaagcatttatttcgatggctacctgcctccgagtaaatgggatgtcaggagaaacagatatcacgtgcaatataagaggataaaggatgtagctcgttcccaacctgatggatcccgcagacttcctcaagctcatctgcatcctagccgtaatggccttgctttgacctccatcggtgagaatacagcaaaccgcctgctaccgcagctacctttccttgtcccggctgttcttgatatactgaaaaaatcagcgacgtggtggccactttgccgcattgtacctggagaggcggacgtatattgtgctgaggatgtaaaactgaatggtgggacagtcttaacaaccgattcagatctcgcaatatcggatttgggtccgaatggcagcatgtctttcattgatgatatcagaaccaacaatgttgacgataagaatttgattacgaacaagttcacgccaaaagccataagtgataagtttggtctagggcaatttggaggcatagcacgcgtcgcttttgaaatgaaaaaagaaaagaccagctttgacaaggctgtgggaatcgtaaggcactcccagggctatgattttacctctaactcaatcatctttgaagagttcctacaggaacactctacgaaacactatttgccgaaagatcacgctgtcgacaatgttctaggacaaatcgaccccagagtgtcggagatggtagtgcagtcattgctcgtagacgaaggaggcggcgtttcccatgaaagactcactccgttctctgaggaccgtggttccgaactcctctccatgttcctgccagtgatggtggaaaatcgctatcggaaaagcgcctggacaatgagcaccgaggttcgaagaattgcctacggcatttcgcagagctttgcccgccacgtttcaccgtccatcatcgagtatcgattgatcaatgatattaaaaccaaggcaggcagacagatcagcataccaagtttaagagagactcttgatcaatgccagctcttagtagagactatgaatcagcttgccaagacgctgcctgataaaaatctacagtggcttgcctttgcgatttatcaagatatcgtgttcgcagtatcggaagacaagccctctctttgcgcttcgctctatgcaggggtgggatcgactcagtcggatgattattcctgggacttgatacattttaccgctcaggtacaagcttcgttttactcgctgaggatggtcaagcagatcatcgacgtctccgcacacttgacgcaagatcttcgacagccagtgcgagatatgcgcgagttactaagcacactgtcggacatcacagaatggcccacggtggacgacatgtcggaaacgctagcaaaggctcaaatatctggcattcttgatattgtcacagatttactggatgttacccctgtagtggaaccaaaatacctaggaacgaggaaactgaaacctacaggacgtcggaaggatggatcttctcgtgtcttgaagagcacaaacagttcccaacggtctgcgtcactcaatccttacgctgtgctcagccaggcatctagacatgaagaggacgaagactttcccatgccctga

SEQ ID NO: 6420 - protein, 615 aa, Muscodor strobelii
  misc_feature: SGI Peptide ID NO. 561880
  misc_feature (1)..(601): NCBI GI: 46116840 Blast Desc: FG04262.1 [Gibberella zeae PH-1]
  misc_feature (1)..(602): NCBI GI: 256725961 Blast Desc: NECHADRAFT_94235 [Nectria haematococca mpVI 77-13-4]
  misc_feature (1)..(601): NCBI GI: 171688632 Blast Desc: protein product [Podospora anserina] gi|170944278|emb|CAP70388.1| protein product [Podospora anserina]
  misc_feature (52)..(600): NCBI GI: 85104702 Blast Desc: NCU05253 [Neurospora crassa OR74A] gi|28923364|gb|EAA32554.1| [Neurospora crassa OR74A]
  misc_feature (76)..(551): NCBI GI: 116196362 Blast Desc: CHGG_04779 [Chaetomium globosum CBS 148.51] gi|88180692|gb|EAQ88160.1| CHGG_04779 [Chaetomium globosum CBS 148.51]
  misc_feature (23)..(524): NCBI GI: 240110128 Blast Desc: CPC735_061600 [Coccidioides posadasii C735 delta SOWgp]
  misc_feature (20)..(520): NCBI GI: 242814726 Blast Desc: conserved [Talaromyces stipitatus ATCC 10500] gi|218714766|gb|EED14189.1| conserved [Talaromyces stipitatus ATCC 10500]
  misc_feature (1)..(569): NCBI GI: 145613169 Blast Desc: MGG_01829 [Magnaporthe grisea 70-15] gi|145020308|gb|EDK04437.1| MGG_01829 [Magnaporthe grisea 70-15]
  misc_feature (142)..(600): NCBI GI: 154321794 Blast Desc: BC1G_01044 [Botryotinia fuckeliana B05.10] gi|150850291|gb|EDN25484.1| BC1G_01044 [Botryotinia fuckeliana B05.10]
  misc_feature (41)..(499): NCBI GI: 119179500 Blast Desc: CIMG_08495 [Coccidioides immitis RS]
MGIWGLATGIRRYGAATPMTGDTVVIDGPALVHRIFYARPPPPPACFMSYPSYAVFGEAVIQWLDELHSKNVNVRSIYFDGYLPPSKWDVRRNRYHVQYKRIKDVARSQPDGSRRLPQAHLHPSRNGLALTSIGENTANRLLPQLPFLVPAVLDILKKSATWWPLCRIVPGEADVYCAEDVKLNGGTVLTTDSDLAISDLGPNGSMSFIDDIRTNNVDDKNLITNKFTPKAISDKFGLGQFGGIARVAFEMKKEKTSFDKAVGIVRHSQGYDFTSNSIIFEEFLQEHSTKHYLPKDHAVDNVLGQIDPRVSEMVVQSLLVDEGGGVSHERLTPFSEDRGSELLSMFLPVMVENRYRKSAWTMSTEVRRIAYGISQSFARHVSPSIIEYRLINDIKTKAGRQISIPSLRETLDQCQLLVETMNQLAKTLPDKNLQWLAFAIYQDIVFAVSEDKPSLCASLYAGVGSTQSDDYSWDLIHFTAQVQASFYSLRMVKQIIDVSAHLTQDLRQPVRDMRELLSTLSDITEWPTVDDMSETLAKAQISGILDIVTDLLDVTPVVEPKYLGTRKLKPTGRRKDGSSRVLKSTNSSQRSASLNPYAVLSQASRHEEDEDFPMP

SEQ ID NO: 6421 - DNA, 2350 bp, Muscodor strobelii
  misc_feature: SGI EST ID NO. CUFF.16028.0
  misc_feature: Variant of the nucleotide sequence at SEQ ID NO 6419
gcctggcgagcatttcaagtattcttcaatttctacctagtgaagtactgtatcggtcctatcttcatcttctatacgtcattctgcaatgcttgggctttctctctcatctgacttgcagttgttgcatatttgttatagcctatcgctttctcatcataccattcattcatccatgtgaagctccatgagttagtcctattcacagtacaattggctgccccaactgtccatctatactctgactagtcccctgcccgagaaatactctattgcattgttgaagcttgaatgagctgagtcgtcttttttgacaagcctattatgggcatttggggtctagccacgggcattcgtcgctatggcgctgccactcccatgactggcgacactgtggtcattgatggacccgcacttgtacatagaatcttctatgcgcgtcccccaccgccgcccgcttgtttcatgagctatccttcctacgctgtatttggcgaggccgtcattcagtggcttgatgagttgcatagcaaaaatgtgaacgtacgaagcatttatttcgatggctacctgcctccgagtaaatgggatgtcaggagaaacagatatcacgtgcaatataagaggataaaggatgtagctcgttcccaacctgatggatcccgcagacttcctcaagctcatctgcatcctagccgtaatggccttgctttgacctccatcggtgagaatacagcaaaccgcctgctaccgcagctacctttccttgtcccggctgttcttgatatactgaaaaaatcagcgacgtggtggccactttgccgcattgtacctggagaggcggacgtatattgtgctgaggatgtaaaactgaatggtgggacagtcttaacaaccgattcagatctcgcaatatcggatttgggtccgaatggcagcatgtctttcattgatgatatcagaaccaacaatgttgacgataagaatttgattacgaacaagttcacgccaaaagccataagtgataagtttggtctagggcaatttggaggcatagcacgcgtcgcttttgaaatgaaaaaagaaaagaccagctttgacaaggctgtgggaatcgtaaggcactcccagggctatgattttacctctaactcaatcatctttgaagagttcctacaggaacactctacgaaacactatttgccgaaagatcacgctgtcgacaatgttctaggacaaatcgaccccagagtgtcggagatggtagtgcagtcattgctcgtagacgaaggaggcggcgtttcccatgaaagactcactccgttctctgaggaccgtggttccgaactcctctccatgttcctgccagtgatggtggaaaatcgctatcggaaaagcgcctggacaatgagcaccgaggttcgaagaattgcctacggcatttcgcagagctttgcccgccacgtttcaccgtccatcatcgagtatcgattgatcaatgatattaaaaccaaggcaggcagacagatcagcataccaagtttaagagagactcttgatcaatgccagctcttagtagagactatgaatcagcttgccaagacgctgcctgataaaaatctacagtggcttgcctttgcgatttatcaagatatcgtgttcgcagtatcggaagacaagccctctctttgcgcttcgctctatgcaggggtgggatcgactcagtcggatgattattcctgggacttgatacattttaccgctcaggtacaagcttcgttttactcgctgaggatggtcaagcagatcatcgacgtctccgcacacttgacgcaagatcttcgacagccagtgcgagatatgcgcgagttactaagcacactgtcggacatcacagaatggcccacggtggacgacatgtcggaaacgctagcaaaggctcaaatatctggcattcttgatattgtcacagatttactggatgttacccctgtagtggaaccaaaatacctaggaacgaggaaactgaaacctacaggacgtcggaaggatggatcttctcgtgtcttgaagagcacaaacagttcccaacggtctgcgtcactcaatccttacgctgtgctcagccaggcatctagacatgaagaggacgaagactttcccatgccctgagtcggcaggaaggctcatgtactacctcttgtatcaatagatatgattcctgtgcgtttgaatagctagtctgttgtgcaggatgtacaataataccgtatagatcggatatctataggacagcgtatactcaagaattcagcatgtagagaggctgctttgatttgtaagatgttag

SEQ ID NO: 6422 - DNA, 1518 bp, Muscodor strobelii
  misc_feature: SGI cDNA ID NO. 561881
  misc_feature: Encodes the peptide sequence at SEQ ID NO 6423
atgagaggcacgctggtattctcgggcacctcgtgtcccgccctgaccggcaagatatgtgagaacctgggcatgacaccggctcaggccgacctgtctcaattctcaaatggcgagacgagcgtccgtatcctgaccagtgtccgtgagaaagatgtctttgtcgtgcagtcgggcagtcccaatatcaatgacaccatcatggagcttctaattatgatctctgcttgcaaaggtggttctgccaataagattactgctgtactgccctactttccctacagtagacagtctaagaagaagtcgcatcgcggtgccattaccgctcgcatgttggccaacctgctccacgtcgcgggcgtcaagcatgtcgtcactgtcgacctgcatgcctcgcagatgcaaggcttcttccgatgccccgtcgacaatctccacgcagagccactcatcgcccgttgggtgcgcatgaatgtccccaactggaaggaggccgtcgtcgtgtccaagaacgcaggcggtacaaagagggtcacgtcgcttgctgacgctctgaagctgaacttcggccttgtcacaacggacagaaaacgggccaccaatatgactgcgagtatgataatgcgacaacttgacaattgggacaatgctcctacctacgtcagcggagtgcgccgggttccaagctccaccaattccgaggaacgcgcccctgagacaaatggctcgaccaatggctcaacaccgtcttcacgtgttatggcagactcacaaggctcgcctagacgtgtacaagttccaccactacgcactaatattgcgaaccgtactctacgcaacttccatacctcttctcaggcgtcccctattgaggaattgcgtgatgaggaggagcaggaagaggcgctggagtacaatgacgaacgcgctcaagaagttacccaagtgcggcttgtccagggccacgtggttccagatgacttcccgtctccatctcaatctgacgatggcagccagtcctacaatgcagatgaagaccccatggcccagtcgcgtgcgtcttccttcttcgctggtgacccccatgcattgggaggctcaggtgatgcaggagactcatcagatgaagatgaagagaagcttcaagatccaaagatcgaacacatgattacattggttggcaatgttaaggaccgctctgtactaatcgtggatgacatgatcgacaaggcaggatcctggatagctgccgccgagacggtcgtcaagcgaggcaaagccaagaaggtgtactgcatggcaactcacggcgtcttcggagccgactgtctcgagcagctccaggcttgcgactgtatccaccagatcattgtgaccaacagctttccaatccccgacaagcgggccaagaatgctagtaaactggtgatcctggacctttcgtacctgctgtcagaggcgataaggcgcaaccactatggcgagtctatatcgcccttgtttcagcatatggactag

SEQ ID NO: 6423 - protein, 505 aa, Muscodor strobelii
  misc_feature: SGI Peptide ID NO. 561881
  misc_feature (139)..(456): Pfam Id: PF00156 Pfam Desc: Phosphoribosyl transferase domain
  misc_feature (392)..(456): Pfam Id: PF00156 Pfam Desc: Phosphoribosyl transferase domain
  misc_feature (1)..(504): NCBI GI: 171688630 Blast Desc: protein product [Podospora anserina] gi|170944277|emb|CAP70387.1| protein product [Podospora anserina]
  misc_feature (1)..(503): NCBI GI: 256725561 Blast Desc: [Nectria haematococca mpVI 77-13-4]
  misc_feature (1)..(498): NCBI GI: 116196368 Blast Desc: CHGG_04782 [Chaetomium globosum CBS 148.51] gi|88180695|gb|EAQ88163.1| CHGG_04782 [Chaetomium globosum CBS 148.51]
  misc_feature (1)..(503): NCBI GI: 46116838 Blast Desc: FG04261.1 [Gibberella zeae PH-1]
  misc_feature (1)..(504): NCBI GI: 85104705 Blast Desc: ribose-phosphate pyrophosphokinase [Neurospora crassa OR74A] gi|28923365|gb|EAA32555.1| ribose-phosphate pyrophosphokinase [Neurospora crassa OR74A]
  misc_feature (1)..(503): NCBI GI: 156045828 Blast Desc: SS1G_09190 [Sclerotinia sclerotiorum 1980] gi|154693586|gb|EDN93324.1| SS1G_09190 [Sclerotinia sclerotiorum 1980]
  misc_feature (68)..(504): NCBI GI: 145613171 Blast Desc: MGG_01828 [Magnaporthe grisea 70-15] gi|145020309|gb|EDK04438.1| MGG_01828 [Magnaporthe grisea 70-15]
  misc_feature (35)..(503): NCBI GI: 154321796 Blast Desc: BC1G_01045 [Botryotinia fuckeliana B05.10] gi|150850292|gb|EDN25485.1| BC1G_01045 [Botryotinia fuckeliana B05.10]
  misc_feature (1)..(505): NCBI GI: 240107328 Blast Desc: ribose-phosphate pyrophosphokinase, [Coccidioides posadasii C735 delta SOWgp]
  misc_feature (1)..(505): NCBI GI: 119190841 Blast Desc: CIMG_05468 [Coccidioides immitis RS]
MRGTLVFSGTSCPALTGKICENLGMTPAQADLSQFSNGETSVRILTSVREKDVFVVQSGSPNINDTIMELLIMISACKGGSANKITAVLPYFPYSRQSKKKSHRGAITARMLANLLHVAGVKHVVTVDLHASQMQGFFRCPVDNLHAEPLIARWVRMNVPNWKEAVVVSKNAGGTKRVTSLADALKLNFGLVTTDRKRATNMTASMIMRQLDNWDNAPTYVSGVRRVPSSTNSEERAPETNGSTNGSTPSSRVMADSQGSPRRVQVPPLRTNIANRTLRNFHTSSQASPIEELRDEEEQEEALEYNDERAQEVTQVRLVQGHVVPDDFPSPSQSDDGSQSYNADEDPMAQSRASSFFAGDPHALGGSGDAGDSSDEDEEKLQDPKIEHMITLVGNVKDRSVLIVDDMIDKAGSWIAAAETVVKRGKAKKVYCMATHGVFGADCLEQLQACDCIHQIIVTNSFPIPDKRAKNASKLVILDLSYLLSEAIRRNHYGESISPLFQHMD

SEQ ID NO: 6424 - DNA, 2274 bp, Muscodor strobelii
  misc_feature: SGI EST ID NO. CUFF.16082.1
  misc_feature: Variant of the nucleotide sequence at SEQ ID NO 6422
aaatttctcccctccatcgaaaccttctcttcctccgactcaaactcctgtcacgatgagaggcacgctggtattctcgggcacctcgtgtcccgccctgaccggcaagatatgtgagaacctgggcatgacaccggctcaggccgacctgtctcaattctcaaatggcgagacgagcgtccgtatcctgaccagtgtccgtgagaaagatgtctttgtcgtgcagtcgggcagtcccaatatcaatgacaccatcatggagcttctaattatgatctctgcttgcaaaggtggttctgccaataagattactgctgtactgccctactttccctacagtagacagtctaagaagaagtcgcatcgcggtgccattaccgctcgcatgttggccaacctgctccacgtcgcgggcgtcaagcatgtcgtcactgtcgacctgcatgcctcgcagatgcaaggcttcttccgatgccccgtcgacaatctccacgcagagccactcatcgcccgttgggtgcgcatgaatgtccccaactggaaggaggccgtcgtcgtgtccaagaacgcaggcggtacaaagagggtcacgtcgcttgctgacgctctgaagctgaacttcggccttgtcacaacggacagaaaacgggccaccaatatgactgcgagtatgataatgcgacaacttgacaattgggacaatgctcctacctacgtcagcggagtgcgccgggttccaagctccaccaattccgaggaacgcgcccctgagacaaatggctcgaccaatggctcaacaccgtcttcacgtgttatggcagactcacaaggctcgcctagacgtgtacaagttccaccactacgcactaatattgcgaaccgtactctacgcaacttccatacctcttctcaggcgtcccctattgaggaattgcgtgatgaggaggagcaggaagaggcgctggagtacaatgacgaacgcgctcaagaagttacccaagtgcggcttgtccagggccacgtggttccagatgacttcccgtctccatctcaatctgacgatggcagccagtcctacaatgcagatgaagaccccatggcccagtcgcgtgcgtcttccttcttcgctggtgacccccatgcattgggaggctcaggtgatgcaggagactcatcagatgaagatgaagagaagcttcaagatccaaagatcgaacacatgattacattggttggcaatgttaaggaccgctctgtactaatcgtggatgacatgatcgacaaggcaggatcctggatagctgccgccgagacggtcgtcaagcgaggcaaagccaagaaggtgtactgcatggcaactcacggcgtcttcggagccgactgtctcgagcagctccaggcttgcgactgtatccaccagatcattgtgaccaacagctttccaatccccgacaagcgggccaagaatgctagtaaactggtgatcctggacctttcgtacctgctgtcagaggcgataaggcgcaaccactatggcgagtctatatcgcccttgtttcagcatatggactagactggcacaaaacagtaagatattccaagagaatggctcggttgatctactgtgtatcattcggaattgtacatcacgagacatgagaacagttcctttccggctatcacactagcatggcgtttaggagggacttatggcaaagagcttcacggctttggctctgggaaatgaggatagattttgctcgagcgatctcgcttttcagatcagatatcacgcctcaaaatgatcaggtatgtttttatgattactcgagccataattgtgaactgtactgtgtatgaaatccccagcggtgctatcctcggatagccaggacttgaatccctctaggaccagccctgaacggaacgttggcagatcagacgggatcccttggggtcacaaacggagctagaaggccggacactcgggtctactctcgtagatcatgccttcgggcgggtgggtgtttggcaagagaaatcttcggacattatattatcgatgtgtcgatatgtattaggagtattgtgcatgccataatgcatacaatagtggtactgaaacacccagattcaataaaacatcatttcatcctgagaaaaatccatctttcttccttcagaataaacgtcggacgagatactatgtatgtactatgtatctaagagaccaacagtcttgattggcaacacacctgttctacccggcattag

SEQ ID NO: 6425 - DNA, 2802 bp, Muscodor strobelii
  misc_feature: SGI cDNA ID NO. 561882
  misc_feature: Encodes the peptide sequence at SEQ ID NO 6426
atgatgtcccctgcatccccccccgacaatacctcgcatcatagcgatttgatgtttgagcaacatcctcctgtcgaatccgttgaaggtacttccgacgccactcaaccagcttctgatgctgttcacagagcatccacgatggaaaccgacgctcatgtatctgacgctcagggagcaaagcgcgtgtgggatgcggcttttcctcaccttgagcctaccgaccctaataagcgcttccgctcagaatcgccagtcaagcctgccgttctcaacgagataactaaccagccatcgcgacctcgctcatactccatggtcaatttctccagagactctcctgccgcagagtcccctgtttatgcagacatataccaccaaatcctagctgacctcacgcatgacggcaggcgtgtcagtcagagtcgcgctcgcaaatcacaatcgctgagccccagcgaaactatatctctgttcggagaccccggtgaagtcaattcttcgggaatggagttggatgagctggaagactatgaagatgcgacggcccccgaggaatcgatgccttcccaggtggccgatgagactactgacagcgtcaactcgcaatttgacttctctaagatcgaagtctgccgtgatgtgatccagaaatccatccagaacatcaaaagcaatacacctcgtaaccaaattgatcgcgatactgctcagcttctggtccatgaggtcatggcctacatgaggatgaactatctggctactgctgaagatgtaatggcattagatgctattttctcggcttgcgcgatgagtatctcagataagccaagtcaaagctcagtctcattcttcactgcgactgaggatgctgcagaagccgttcctgatcgttctagcggagttttgccctcaacctttatcgctgaagacaatgcaggcgctggcgcgcagctgacacacaactccggttctcgagatccatatttgtcaaacatggaccaatggcaatggctggaggttattgagcctgcaattaaggctctgacgaacgatatggggtcagacattgggaccaagattgacaatttgagggatgaaattcatgctgagctcctctcgaagcagaacagtaacgatcccgctcgtgagaaatgcgcgactcaagcgacacagactgagccatctctctgtgtgggcgaagagagtgcaaaggtagatgcgaaggctcagcttgtcgttggcgatctagaacagtggcaacgcgatctcgaatcaatccgccgcgacaacccgcttgttgcagcaaaacctgttgaagttaccacactcttacgggtgcctgcaaagaaagtgcctgcagctgttcacggaaatctcggtgctggttcagcttctacacgtcgccgcctcacagacacctctcatactacagacacgagctcacctaagactactgctgttgttgatctgattgaaagttcagatgatgcgactttaccaaccggtcggagatctctccgagttggtggcggtggtggaaagcagggattattttctacaggtgatgctgacgactacgaagaacaacctggactttacgattatgtctcagacggtgaagaaaccgacattgacgagaatgtccagtacgccgaggaagctggaaatatcaaccttatattaggtaactcattccgtcatgacactgagactctttataaagatgatgattctgccggttcgccccatgaacatcaaactcgagacacaaacaatcggaacagtcatgttcgtgcatctgtgccaaattccaatgtctcccgccatgatacagatcaccgtgagtatggtcgtggatccgccaatcgtcgccgccgtcgccgcctccgagaaattgaagatgaagaacagcagactgccgattctcatcccgacaaggtcccatttgtatatggccagactagatacacgaaggatcagactatcgagagcccaagcacagcaatgcatcttatcagaattgagcctccttctttctatggttctgataatgatgtaccacggaaagtcaatatcgtactgagatatcaggaccgggtgaacaagatcggccatttcccggcgcccaccacaggcttacgtctgaagcttaacaaatatttctgggacaatgctggtcgcaaagagaccccagagcaagaaatcacggagattctccagacaacatctttcagcggagatacgcttgacgaggagcaagcgctccagaaatgttggctaccagacgagaacatgatactctacaagggatttcctctggttgaggaagtacaattcatagcagccggcaaccaccacgtccctaatggcgactgctactggcgtagcctttcatatgttctgcacggcagtcgagcccgttgggagcttgtcaaggccgaacatcttgagttcatgtttgtcgtcctctccgacaagcatcatccacgccacggcctatacgcaaaggagctgaatactaagttcttcgcgactcgtggctctgctggcgagcatgcggatttcaaggctaatctctggcagctgcttcacatgccgcatacctggaccccgggtgttatgcagcaagtcaccgcagacctctataacatccacctcatcacattcacactggacagaactcacatgtcctgcacagaggtcagcgttcgcggaggatacaacagtcgtcacgtcttcatgcttttcgtcgatggcaatcacttccagcccctcatgccgaacgagtacttgagctag

SEQ ID NO: 6426 - protein, 933 aa, Muscodor strobelii
  misc_feature: SGI Peptide ID NO. 561882
  misc_feature (642)..(931): NCBI GI: 39952369 Blast Desc: MGG_01827 [Magnaporthe grisea 70-15] gi|145020311|gb|EDK04440.1| MGG_01827 [Magnaporthe grisea 70-15]
  misc_feature (707)..(933): NCBI GI: 116179438 Blast Desc: CHGG_00347 [Chaetomium globosum CBS 148.51] gi|88184644|gb|EAQ92112.1| CHGG_00347 [Chaetomium globosum CBS 148.51]
  misc_feature (774)..(932): NCBI GI: 85093727 Blast Desc: NCU02324 [Neurospora crassa OR74A] gi|28921202|gb|EAA30514.1| [Neurospora crassa OR74A]
  misc_feature (790)..(928): NCBI GI: 156056887 Blast Desc: [Sclerotinia sclerotiorum 1980] gi|154701960|gb|EDO01699.1| [Sclerotinia sclerotiorum 1980]
  misc_feature (770)..(929): NCBI GI: 156056885 Blast Desc: [Sclerotinia sclerotiorum 1980] gi|154701959|gb|EDO01698.1| [Sclerotinia sclerotiorum 1980]
MMSPASPPDNTSHHSDLMFEQHPPVESVEGTSDATQPASDAVHRASTMETDAHVSDAQGAKRVWDAAFPHLEPTDPNKRFRSESPVKPAVLNEITNQPSRPRSYSMVNFSRDSPAAESPVYADIYHQILADLTHDGRRVSQSRARKSQSLSPSETISLFGDPGEVNSSGMELDELEDYEDATAPEESMPSQVADETTDSVNSQFDFSKIEVCRDVIQKSIQNIKSNTPRNQIDRDTAQLLVHEVMAYMRMNYLATAEDVMALDAIFSACAMSISDKPSQSSVSFFTATEDAAEAVPDRSSGVLPSTFIAEDNAGAGAQLTHNSGSRDPYLSNMDQWQWLEVIEPAIKALTNDMGSDIGTKIDNLRDEIHAELLSKQNSNDPAREKCATQATQTEPSLCVGEESAKVDAKAQLVVGDLEQWQRDLESIRRDNPLVAAKPVEVTTLLRVPAKKVPAAVHGNLGAGSASTRRRLTDTSHTTDTSSPKTTAVVDLIESSDDATLPTGRRSLRVGGGGGKQGLFSTGDADDYEEQPGLYDYVSDGEETDIDENVQYAEEAGNINLILGNSFRHDTETLYKDDDSAGSPHEHQTRDTNNRNSHVRASVPNSNVSRHDTDHREYGRGSANRRRRRRLREIEDEEQQTADSHPDKVPFVYGQTRYTKDQTIESPSTAMHLIRIEPPSFYGSDNDVPRKVNIVLRYQDRVNKIGHFPAPTTGLRLKLNKYFWDNAGRKETPEQEITEILQTTSFSGDTLDEEQALQKCWLPDENMILYKGFPLVEEVQFIAAGNHHVPNGDCYWRSLSYVLHGSRARWELVKAEHLEFMFVVLSDKHHPRHGLYAKELNTKFFATRGSAGEHADFKANLWQLLHMPHTWTPGVMQQVTADLYNIHLITFTLDRTHMSCTEVSVRGGYNSRHVFMLFVDGNHFQPLMPNEYLS

SEQ ID NO: 6427 - DNA, 1329 bp, Muscodor strobelii
  misc_feature: SGI EST ID NO. CUFF.16042.0
  misc_feature: Variant of the nucleotide sequence at SEQ ID NO 6425
gccagactagatacacgaaggatcagactatcgagagcccaagcacagcaatgcatcttatcagaattgagcctccttctttctatggttctgataatgatgtaccacggaaagtcaatatcgtactgagatatcaggaccgggtgaacaagatcggccatttcccggcgcccaccacaggcttacgtctgaagcttaacaaatatttctgggacaatgctggtcgcaaagagaccccagagcaagaaatcacggagattctccagacaacatctttcagcggagatacgcttgacgaggagcaagcgctccagaaatgttggctaccagacgagaacatgatactctacaagggatttcctctggttgaggaagtacaattcatagcagccggcaaccaccacgtccctaatggcgactgctactggcgtagcctttcatatgttctgcacggcagtcgagcccgttgggagcttgtcaaggccgaacatcttgagttcatgtttgtcgtcctctccgacaagcatcatccacgccacggcctatacgcaaaggagctgaatactaagttcttcgcgactcgtggctctgctggcgagcatgcggatttcaaggctaatctctggcagctgcttcacatgccgcatacctggaccccgggtgttatgcagcaagtcaccgcagacctctataacatccacctcatcacattcacactggacagaactcacatgtcctgcacagaggtcagcgttcgcggaggatacaacagtcgtcacgtcttcatgcttttcgtcgatggcaatcacttccagcccctcatgccgaacgagtacttgagctaggaattccagtacccgcgcgtgacggtggcgaacacagcaaagttctcccatgcgcccaaggcggattctaagaagaccagtcgtcagcacccctggcgaaatgactggactaaggaggttcctgctcctgtcccccgaaaccatggctgcgactttcataagttgcaggctttgatgagtcttgagtaggaatgcgtatgcgccatgactagctctttgagctggatgaggacagtgggaattgtggtttgtaagataagggagaaagtttgggtttgcttagagcagtgtatttgagcagtatgatgggtggacgcattgccgtattgacaatagtgggatgcagattgagattttcagaagtatgatgggaccataggtcgagcactcagacttcgataccgcgctgtcattttgtatgaatagcccaagaatcaggaaaattaggggagagaacaccatattcggaaataccaaaaaattg

SEQ ID NO: 6428 - DNA, 1461 bp, Muscodor strobelii
  misc_feature: SGI cDNA ID NO. 561883
  misc_feature: Reduced expression when VOC is produced
  misc_feature: Encodes the peptide sequence at SEQ ID NO 6429
atgaggacgactctcttcgccgccgggcttctgcccttgatcaatgccttgccggcacctcaaatgacctacgaggagaatactggtcctgttggtggtgtcgatgctcctttcccaaccttcactgctgccgctggtgatttgcgtggatccaccgacctccaaggcggtattgctaagcgcccatctgtatctggaggtgatgtcaaggaccccgagatcgtacccggacaggaggaggatggcgatttgggtgtctacctgaacttcaacgacgcttcatatcccaatggtccccaacctattcgaggaggccgcggaggcactgaccctggaccacgcacttatgagtatgaaaagctaaatcctgacttgtacgcctcacctgcaaccgataagggtgatgtggagaacgcgatgtggccccttggcttgagccataaccgtttgggtcttggcccagagtctggatggtcgcgccagcagaatgtagacgttttgcctgctgctacggcgatggctggcgttgacatgagattgtcacctggttcgttgcgtgaattgcattggcatacctccgctgagtgggctcttgtcttaaagggcagtgtccgcgttgcagctatgaatgaagacggtgcttccttcattgacgatgtcacagccggtgatgtgtggtttttccctcctggtattccgcactctcttcaaggtctggacgaaggatgtgaatttttacttgtcttcgatgatggcaagttttctgaggagtctacattccttgccactgaaatgcttttgcgttctcctaaggaggtttgggccaagaacttgcagactgatgtcaaggctcttgacaatatccccgatgatcagaaatttattttcaacgccacccttgctcctgcagatatcgagaagcagaatatcacaggctctgctggttctctctctggccccgaaggatatacctaccactggtcgcaacaggagttccacaataccactggtgggagtgtgaagatcttggaccctcagactttccctattgccgacatgttctctgccgctctggtcgtcctagagcctggcgcgatgcgcgaggtgcactggcacactactagcgatgagtggtcttacttcttgcaaggatctgctcgcattacagtgttcgcagctccggcaaactcgcgtactttcgatttcacggctggtgatgtcggatatattcccaaagcacagggccactacgttgagaacactggtactgaggacgttatcttcttggaagtgctgcagtcacacaaatttgctgatatcagtgcctcacaatggcttgcccttaccccgcgccaggtcgtgaaggatacgctgaacttgagcgacgaattgttggacaacctgcccaaggataagactttgatcaagccgggaaacactaacctgacggaagtcccttga

SEQ ID NO: 6429 - protein, 486 aa, Muscodor strobelii
  misc_feature: SGI Peptide ID NO. 561883
  misc_feature (324)..(466): Pfam Id: PF00190 Pfam Desc: Cupin
  misc_feature (143)..(286): Pfam Id: PF00190 Pfam Desc: Cupin
  misc_feature (357)..(432): Pfam Id: PF07883 Pfam Desc: Cupin domain
  misc_feature (176)..(249): Pfam Id: PF07883 Pfam Desc: Cupin domain
  misc_feature (348)..(438): Pfam Id: PF05899 Pfam Desc: Domain of function (DUF861)
  misc_feature (182)..(286): Pfam Id: PF00190 Pfam Desc: Cupin
  misc_feature (370)..(428): Pfam Id: PF05899 Pfam Desc: Domain of function (DUF861)
  misc_feature (23)..(485): NCBI GI: 145614991 Blast Desc: MGG_14061 [Magnaporthe grisea 70-15] gi|145021870|gb|EDK05947.1| MGG_14061 [Magnaporthe grisea 70-15]
  misc_feature (1)..(485): NCBI GI: 46124469 Blast Desc: FG06612.1 [Gibberella zeae PH-1]
  misc_feature (5)..(485): NCBI GI: 154316791 Blast Desc: BC1G_03813 [Botryotinia fuckeliana B05.10] gi|150845425|gb|EDN20618.1| BC1G_03813 [Botryotinia fuckeliana B05.10]
  misc_feature (1)..(485): NCBI GI: 156043585 Blast Desc: SS1G_10796 [Sclerotinia sclerotiorum 1980] gi|154695183|gb|EDN94921.1| SS1G_10796 [Sclerotinia sclerotiorum 1980]
  misc_feature (23)..(485): NCBI GI: 149209053 Blast Desc: MGCH7_ch7g22 [Magnaporthe grisea 70-15] gi|86195977|gb|EAQ70615.1| MGCH7_ch7g22 [Magnaporthe grisea 70-15]
  misc_feature (34)..(483): NCBI GI: 169621209 Blast Desc: SNOG_13812 [Phaeosphaeria nodorum SN15] gi|160704204|gb|EAT78836.2| SNOG_13812 [Phaeosphaeria nodorum SN15]
  misc_feature (48)..(476): NCBI GI: 255931041 Blast Desc: Pc12g01820 [Penicillium chrysogenum Wisconsin 54-1255] gi|211581696|emb|CAP79809.1| Pc12g01820 [Penicillium chrysogenum Wisconsin 54-1255]
  misc_feature (68)..(480): NCBI GI: 154302993 Blast Desc: BC1G_09240 [Botryotinia fuckeliana B05.10] gi|150855164|gb|EDN30356.1| BC1G_09240 [Botryotinia fuckeliana B05.10]
  misc_feature (68)..(480): NCBI GI: 156048166 Blast Desc: SS1G_08814 [Sclerotinia sclerotiorum 1980] gi|154693211|gb|EDN92949.1| SS1G_08814 [Sclerotinia sclerotiorum 1980]
  misc_feature (39)..(472): NCBI GI: 145250841 Blast Desc: An15g03980 [Aspergillus niger] gi|134082458|emb|CAK97266.1| protein product [Aspergillus niger]
  misc_feature (99)..(472): SWISSPROT Homolog: EC 4.1.1.2 Oxalate decarboxylase
  misc_feature: Useful for introducing or modulating the production of volatile compounds
MRTTLFAAGLLPLINALPAPQMTYEENTGPVGGVDAPFPTFTAAAGDLRGSTDLQGGIAKRPSVSGGDVKDPEIVPGQEEDGDLGVYLNFNDASYPNGPQPIRGGRGGTDPGPRTYEYEKLNPDLYASPATDKGDVENAMWPLGLSHNRLGLGPESGWSRQQNVDVLPAATAMAGVDMRLSPGSLRELHWHTSAEWALVLKGSVRVAAMNEDGASFIDDVTAGDVWFFPPGIPHSLQGLDEGCEFLLVFDDGKFSEESTFLATEMLLRSPKEVWAKNLQTDVKALDNIPDDQKFIFNATLAPADIEKQNITGSAGSLSGPEGYTYHWSQQEFHNTTGGSVKILDPQTFPIADMFSAALVVLEPGAMREVHWHTTSDEWSYFLQGSARITVFAAPANSRTFDFTAGDVGYIPKAQGHYVENTGTEDVIFLEVLQSHKFADISASQWLALTPRQVVKDTLNLSDELLDNLPKDKTLIKPGNTNLTEVP

SEQ ID NO: 6430 - DNA, 1794 bp, Muscodor strobelii
  misc_feature: SGI EST ID NO. CUFF.16061.0
  misc_feature: Variant of the nucleotide sequence at SEQ ID NO 6428
gctgtttgcctctgtgatatgactcccaattgaacgggtcaggagggaagcaattaggaattaagactaacacactaacacctttctctccaacagtctgctatagtcaaggaccccgagatcgtacccggacaggaggaggatggcgatttgggtgtctacctgaacttcaacgacgcttcatatcccaatggtccccaacctattcgaggaggccgcggaggcactgaccctggaccacgcacttatgagtatgaaaagctaaatcctgacttgtacgcctcacctgcaaccgataagggtgatgtggagaacgcgatgtggccccttggcttgagccataaccgtttgggtcttggcccagagtctggatggtcgcgccagcagaatgtagacgttttgcctgctgctacggcgatggctggcgttgacatgagattgtcacctggttcgttgcgtgaattgcattggcatacctccgctgagtgggctcttgtcttaaagggcagtgtccgcgttgcagctatgaatgaagacggtgcttccttcattgacgatgtcacagccggtgatgtgtggtttttccctcctggtattccgcactctcttcaaggtctggacgaaggatgtgaatttttacttgtcttcgatgatggcaagttttctgaggagtctacattccttgccactgaaatgcttttgcgttctcctaaggaggtttgggccaagaacttgcagactgatgtcaaggctcttgacaatatccccgatgatcagaaatttattttcaacgccacccttgctcctgcagatatcgagaagcagaatatcacaggctctgctggttctctctctggccccgaaggatatacctaccactggtcgcaacaggagttccacaataccactggtgggagtgtgaagatcttggaccctcagactttccctattgccgacatgttctctgccgctctggtcgtcctagagcctggcgcgatgcgcgaggtgcactggcacactactagcgatgagtggtcttacttcttgcaaggatctgctcgcattacagtgttcgcagctccggcaaactcgcgtactttcgatttcacggctggtgatgtcggatatattcccaaagcacagggccactacgttgagaacactggtactgaggacgttatcttcttggaagtgctgcagtcacacaaatttgctgatatcagtgcctcacaatggcttgcccttaccccgcgccaggtcgtgaaggatacgctgaacttgagcgacgaattgttggacaacctgcccaaggataagactttgatcaagccgggaaacactaacctgacggaagtcccttgaggctaacgtaacgtgtgcttatagcgacctgtacgagaggagcatacatgaggaacttttatgtagaccttcttgagataatcttcatattagaataatagtttcagctcatgagtctgcatacttatgtagtttcctagagctctgtgtcaaatagtatatcactcatagtatcggtgttcatcagtctacttagaaattggccactgcacgagggtcgtgggtcataagtgttgaaatccttaggaaatagatgcttagcgacaaggctatgtggtcaccaggagcctggaatcacctcaccaagttgtgacccctaagttcccgcagttatcactgtcagagacgctcatttcgagcagcatatacctagtagcgcctttatacagtttcaaaataccatgctccagatgactcaaaaaccagctcgag

SEQ ID NO: 6431 - DNA, 2859 bp, Muscodor strobelii
  misc_feature: SGI cDNA ID NO. 561884
  misc_feature: Encodes the peptide sequence at SEQ ID NO 6432
atggcgtctccggccgcagctgctgtgccgttgtcaacaacagccctcaacaacgccagcttccacgacaacctcacttcctcctggacacactatgctccttctctgcgggacctcatctttgcaggacccaggatgctcactcgtttaggctccatcatcagtttccctgaggccatcgacagctttggtcagcgaatcatccccgaccccacgggctctaacttgttcaccaccaccacctctaccaccgcctccgagatggccgcccagatatccgaggcggttgtcaacaccgcaaatgcactggaagacgatcaagatcctgccgccctggtgtctcgcttctcggtggaaagtagtgctaagggcttgggaagcgttttcagctatgcgacgagcaagtgggcattatgttgtattgctatggccatcatcctcaaccgcactcacatatttgccgcttcacgaagacgactacgcttgacttggcctattcgagtcgccctccgagtcgtgcctatccttctctttacctaccagtcccgacaacttctccaagccatacagtgccagacggcccccgactttgccgagatgcgctggggcaacgccaccaaaacctcagatctgatgtttgccgaaccaggaggatacctacatgggctcagttcaacactgctgctgggtgcaacggactacgacagctgccgcgccatcaacatgatacccacgacgagccatgatttctctaatgagctgcgtggctccctctcgcagttgtggcctctgtttgggaccctctgtctctcacatttcctggagactatctcctgtgcggtacaagggcgaccagtagctgtcgaaacgggcatgacccttttcgagcactcgcttgccttcgctgaagccgatgctgcgattagtaatcagttgggatggggccttttctcgagtagtagctcgtccaatgtcaccttccagcaggcatcaggtgctaatatcgccatatctcgatccatgattatgaagcgcgtcaacactcctcccgaggtcctcctcatcgctttcatctcgtcaatgagtcacatcactagccacatcctaggcatcttcggactacagaataagtaccgtttgttcagcacgggtttctgggccatgtgtttcatgggaagtctcattgtcgaagtcttcaacttttcgctggattctccttcaaatatcggcctcttccgctttcccacggtgtgcattatcggattcatcccacaccttatggtatttattggcattatgatttgtgccgcaatctacgtatttgccctaatactagctgccatggagcccccggacccggcgatggaaaatcagccactcacgtttcgacagcgcatccgtcgcgcccacgacaatatgcaggccaatatctccttggctgatattaggatatcacgtgccatggacttctacaccgcattacttagaacgggatttggggtaatcaccatggccagcgaagccgtgtatctcaacgaggaccagaatgtgagtctgaagcagagcacgtggcttgaggaagagcgataccgtgagctcgagactctccgcatgcaatgggctggagcgggcatgggagactcgcgttacgataatgtaggaactattggactggtccctattaaagacgacgaagtcggagccaccagtgggtacgcaagagaacgcgcagcacagaaagttcccaagggccgcctcggagatcgtcgagctagggatggcgtgggtgcagcagagcgtagttctaggtggctcttggctctggagttcctgatgaacattaacaggctcgtactccgctgggtggcactgattatgctcaagggacttgcgcgcataggggtcagacgccagccctgggtcctgctctacttgtcaagatggcccaaacgaaagaagtctgaagaaacaaaatcctcagagaagttaaaaggagttttcaagagtaggggccgcaaggttcattcgctcgctaatgatgagaccgccgatgtagaggcagaggtgcggagacgactgagaagggcacccgagacggtcgagatatctgaggacgaattggattctcgactctacgactcctggaaacatggcgagctctggggcggcatggatacgagtggggattgggcacctaatgacaacgatgatgattgggatactacgagtgtgattactacgtttacggagaatgagagagattcggacgatcagtgggaagatgacgatggttccgaagctgagggccagagaacgcctacgcagggcgcttttacattttcgcgcgagacgacaccgttcgacgaaccgattgcgatgagcgacttggcgcggttgttacacccgcaaaatcctgaggaacggaaggaagctcatacgcttgccgcgcatctcaccagtaatcgtatagtcacgcgctcccagtttgcgaagatgcagcacatgcaacggggtcggctcctactctctggtaatgcgcaaggtgtgaagaatcagggacgaggtaaattgacggatgatgagcaggcggatatgctggagcatctcctcattacgcgccgagcggaggcgagacgtcgggaggaagagagaattatggcgggtgaggatgaggatgatgctgactcgggcccggtttgtgtcgtttgtcatgcaagcccgaggaagatcatcgtctggccttgtaggtgtttgagtttgtgcgatgagtgcagagttacgcttgcgatgaataattatgataagtgtgtttgttgtaggagggaagttattagttttagccggatttacgtcccctga

SEQ ID NO: 6432 - protein, 952 aa, Muscodor strobelii
  misc_feature: SGI Peptide ID NO. 561884
  misc_feature (30)..(952): NCBI GI: 116195976 Blast Desc: CHGG_04586 [Chaetomium globosum CBS 148.51] gi|88180499|gb|EAQ87967.1| CHGG_04586 [Chaetomium globosum CBS 148.51]
  misc_feature (16)..(952): NCBI GI: 39979160 Blast Desc: [Neurospora crassa]
  misc_feature (16)..(928): NCBI GI: 85109009 Blast Desc: NCU08033 [Neurospora crassa OR74A] gi|28924314|gb|EAA33467.1| conserved [Neurospora crassa OR74A]
  misc_feature (30)..(935): NCBI GI: 145612365 Blast Desc: MGG_07083 [Magnaporthe grisea 70-15] gi|145019547|gb|EDK03775.1| MGG_07083 [Magnaporthe grisea 70-15]
  misc_feature (22)..(929): NCBI GI: 171690716 Blast Desc: protein product [Podospora anserina] gi|170945306|emb|CAP71418.1| protein product [Podospora anserina]
  misc_feature (14)..(952): NCBI GI: 154317643 Blast Desc: BC1G_03173 [Botryotinia fuckeliana B05.10] gi|150844347|gb|EDN19540.1| BC1G_03173 [Botryotinia fuckeliana B05.10]
  misc_feature (30)..(809): NCBI GI: 46116868 Blast Desc: FG04276.1 [Gibberella zeae PH-1]
  misc_feature (1)..(933): NCBI GI: 156049543 Blast Desc: SS1G_08478 [Sclerotinia sclerotiorum 1980] gi|154692877|gb|EDN92615.1| SS1G_08478 [Sclerotinia sclerotiorum 1980]
  misc_feature (1)..(775): NCBI GI: 256725554 Blast Desc: NECHADRAFT_94222 [Nectria haematococca mpVI 77-13-4]
  misc_feature (129)..(952): NCBI GI: 169772641 Blast Desc: [Aspergillus oryzae RIB40] gi|83768650|dbj|BAE58787.1| protein product [Aspergillus oryzae]
MASPAAAAVPLSTTALNNASFHDNLTSSWTHYAPSLRDLIFAGPRMLTRLGSIISFPEAIDSFGQRIIPDPTGSNLFTTTTSTTASEMAAQISEAVVNTANALEDDQDPAALVSRFSVESSAKGLGSVFSYATSKWALCCIAMAIILNRTHIFAASRRRLRLTWPIRVALRVVPILLFTYQSRQLLQAIQCQTAPDFAEMRWGNATKTSDLMFAEPGGYLHGLSSTLLLGATDYDSCRAINMIPTTSHDFSNELRGSLSQLWPLFGTLCLSHFLETISCAVQGRPVAVETGMTLFEHSLAFAEADAAISNQLGWGLFSSSSSSNVTFQQASGANIAISRSMIMKRVNTPPEVLLIAFISSMSHITSHILGIFGLQNKYRLFSTGFWAMCFMGSLIVEVFNFSLDSPSNIGLFRFPTVCIIGFIPHLMVFIGIMICAAIYVFALILAAMEPPDPAMENQPLTFRQRIRRAHDNMQANISLADIRISRAMDFYTALLRTGFGVITMASEAVYLNEDQNVSLKQSTWLEEERYRELETLRMQWAGAGMGDSRYDNVGTIGLVPIKDDEVGATSGYARERAAQKVPKGRLGDRRARDGVGAAERSSRWLLALEFLMNINRLVLRWVALIMLKGLARIGVRRQPWVLLYLSRWPKRKKSEETKSSEKLKGVFKSRGRKVHSLANDETADVEAEVRRRLRRAPETVEISEDELDSRLYDSWKHGELWGGMDTSGDWAPNDNDDDWDTTSVITTFTENERDSDDQWEDDDGSEAEGQRTPTQGAFTFSRETTPFDEPIAMSDLARLLHPQNPEERKEAHTLAAHLTSNRIVTRSQFAKMQHMQRGRLLLSGNAQGVKNQGRGKLTDDEQADMLEHLLITRRAEARRREEERIMAGEDEDDADSGPVCVVCHASPRKIIVWPCRCLSLCDECRVTLAMNNYDKCVCCRREVISFSRIYVP

SEQ ID NO: 6433 - DNA, 3560 bp, Muscodor strobelii
  misc_feature: SGI EST ID NO. CUFF.16137.1
  misc_feature: Variant of the nucleotide sequence at SEQ ID NO 6431
cctcacctgaacatttgctccctttctactttgcttcgaaacaaattgctttcttgaaatagtgggtgcagacaggcacgggtaagacaacaacctgtgcaacctatgatacatagatggcatggtaactcacggttattactacgcaccatgcacatgcgtcatcccatcttgcagcgcgttctaatcctccgagtcccgactcccaactagtccatccctccgtcgtttgaccaccaccaacgccggaacgggtggaaggctaccatccatctgatccaaagttcggtccggaccagatccgacgacaatattgtcatcgccatagacgaccacaacagcgggtccaaaggggacggcgttcccggcgcaatatggcgtctccggccgcagctgctgtgccgttgtcaacaacagccctcaacaacgccagcttccacgacaacctcacttcctcctggacacactatgctccttctctgcgggacctcatctttgcaggacccaggatgctcactcgtttaggctccatcatcagtttccctgaggccatcgacagctttggtcagcgaatcatccccgaccccacgggctctaacttgttcaccaccaccacctctaccaccgcctccgagatggccgcccagatatccgaggcggttgtcaacaccgcaaatgcactggaagacgatcaagatcctgccgccctggtgtctcgcttctcggtggaaagtagtgctaagggcttgggaagcgttttcagctatgcgacgagcaagtgggcattatgttgtattgctatggccatcatcctcaaccgcactcacatatttgccgcttcacgaagacgactacgcttgacttggcctattcgagtcgccctccgagtcgtgcctatccttctctttacctaccagtcccgacaacttctccaagccatacagtgccagacggcccccgactttgccgagatgcgctggggcaacgccaccaaaacctcagatctgatgtttgccgaaccaggaggatacctacatgggctcagttcaacactgctgctgggtgcaacggactacgacagctgccgcgccatcaacatgatacccacgacgagccatgatttctctaatgagctgcgtggctccctctcgcagttgtggcctctgtttgggaccctctgtctctcacatttcctggagactatctcctgtgcggtacaagggcgaccagtagctgtcgaaacgggcatgacccttttcgagcactcgcttgccttcgctgaagccgatgctgcgattagtaatcagttgggatggggccttttctcgagtagtagctcgtccaatgtcaccttccagcaggcatcaggtgctaatatcgccatatctcgatccatgattatgaagcgcgtcaacactcctcccgaggtcctcctcatcgctttcatctcgtcaatgagtcacatcactagccacatcctaggcatcttcggactacagaataagtaccgtttgttcagcacgggtttctgggccatgtgtttcatgggaagtctcattgtcgaagtcttcaacttttcgctggattctccttcaaatatcggcctcttccgctttcccacggtgtgcattatcggattcatcccacaccttatggtatttattggcattatgatttgtgccgcaatctacgtatttgccctaatactagctgccatggagcccccggacccggcgatggaaaatcagccactcacgtttcgacagcgcatccgtcgcgcccacgacaatatgcaggccaatatctccttggctgatattaggatatcacgtgccatggacttctacaccgcattacttagaacgggatttggggtaatcaccatggccagcgaagccgtgtatctcaacgaggaccagaatgtgagtctgaagcagagcacgtggcttgaggaagagcgataccgtgagctcgagactctccgcatgcaatgggctggagcgggcatgggagactcgcgttacgataatgtaggaactattggactggtccctattaaagacgacgaagtcggagccaccagtgggtacgcaagagaacgcgcagcacagaaagttcccaagggccgcctcggagatcgtcgagctagggatggcgtgggtgcagcagagcgtagttctaggtggctcttggctctggagttcctgatgaacattaacaggctcgtactccgctgggtggcactgattatgctcaagggacttgcgcgcataggggtcagacgccagccctgggtcctgctctacttgtcaagatggcccaaacgaaagaagtctgaagaaacaaaatcctcagagaagttaaaaggagttttcaagagtaggggccgcaaggttcattcgctcgctaatgatgagaccgccgatgtagaggcagaggtgcggagacgactgagaagggcacccgagacggtcgagatatctgaggacgaattggattctcgactctacgactcctggaaacatggcgagctctggggcggcatggatacgagtggggattgggcacctaatgacaacgatgatgattgggatactacgagtgtgattactacgtttacggagaatgagagagattcggacgatcagtgggaagatgacgatggttccgaagctgagggccagagaacgcctacgcagggcgcttttacattttcgcgcgagacgacaccgttcgacgaaccgattgcgatgagcgacttggcgcggttgttacacccgcaaaatcctgaggaacggaaggaagctcatacgcttgccgcgcatctcaccagtaatcgtatagtcacgcgctcccagtttgcgaagatgcagcacatgcaacggggtcggctcctactctctggtaatgcgcaaggtgtgaagaatcagggacgaggtaaattgacggatgatgagcaggcggatatgctggagcatctcctcattacgcgccgagcggaggcgagacgtcgggaggaagagagaattatggcgggtgaggatgaggatgatgctgactcgggcccggtttgtgtcgtttgtcatgcaagcccgaggaagatcatcgtctggccttgtaggtgtttgagtttgtgcgatgagtgcagagttacgcttgcgatgaataattatgataagtgtgtttgttgtaggagggaagttattagttttagccggatttacgtcccctgagttccctgagagggatggggagagagaaggggagagatactgaggcgctgcattgaggtgcattttactaagggagcgggcgtttgggtttatggtttacgggtgcgagcaagtttctgtgtacattatttcgagatggagatcgtcacggattgcatgatagtgcattgcttgagatatgatactggaaatacatattttgccaggttcttattccttgggggtaccgtgctagacgtgccggtgaagggacgtccccccttttatggcatagtgaaattgtatacagaaacgtcagaaataggacttaactagtaaggtgcggcg

SEQ ID NO: 6434 - DNA, 897 bp, Muscodor strobelii
  misc_feature: SGI cDNA ID NO. 561885
  misc_feature: Encodes the peptide sequence at SEQ ID NO 6435
atggcggaccgaaggaggatcaatggccccgtgggcacaactgtgcctcccgtttatgacagcccgccacctcctcagcgcaccaccaaaatcagtgacgacagacaggacgaggaggcgcaagaggagacgattcgcaagatcttcttgaagacaggcgtgactccatctgcctccggttctgcatacctcgagctcgaaaacccgggcgccaactccagcaatagcggtctgaagctcagctgcaccgtccatggtcctcgagcccttcctcgatcagcgcccttttctccccatatcatcctcacgacccatgttaaatacgctcctttcgccactaaacaacgaagaggctaccttcgagactccaccgagcgagatttgggcgtccgcctcgagacagcgctccgaggtgccatcatcgcagaccgatggcctaagagtggcgttgatatcattatcacaattattgagggtgatcaggatcgtcatgcgcctgagaatcatgccgatgacggctgggataccatgaacgtgctaagtggctgcatcaccgtcgcctcggctgccattgccgatgctggcatagactgtgtcgacattgttgctggaggtgtggcagcagtagtatctagggaggaagccagcagtccgtccattgtcatcgatcctaccatggccagctatcaccgaatccatgcagcctgctgcattgcctacctgcccgctcgagacgaagtcactaacatctggtacaaaggccaactgccgggcgacgaccataccgtactgtacaacgacctagttgagagcagtctcacagcctgccgcaatgcccaccgtgtcgtgactaagtcactcaaggaaacagtcaaacctggacaggatatctcgtga

SEQ ID NO: 6435 - protein, 298 aa, Muscodor strobelii
  misc_feature: SGI Peptide ID NO. 561885
  misc_feature (44)..(197): Pfam Id: PF01138 Pfam Desc: 3' exoribonuclease family, domain 1
  misc_feature (1)..(291): NCBI GI: 85108995 Blast Desc: NCU08026 [Neurospora crassa OR74A] gi|28924307|gb|EAA33460.1| conserved [Neurospora crassa OR74A] gi|39979134|emb|CAE85508.1| conserved [Neurospora crassa]
  misc_feature (1)..(292): NCBI GI: 39971537 Blast Desc: MGG_07084 [Magnaporthe grisea 70-15] gi|145019548|gb|EDK03776.1| MGG_07084 [Magnaporthe grisea 70-15]
  misc_feature (1)..(289): NCBI GI: 171690730 Blast Desc: protein product [Podospora anserina] gi|170945313|emb|CAP71425.1| protein product [Podospora anserina]
  misc_feature (1)..(292): NCBI GI: 116195962 Blast Desc: CHGG_04579 [Chaetomium globosum CBS 148.51] gi|88180492|gb|EAQ87960.1| CHGG_04579 [Chaetomium globosum CBS 148.51]
  misc_feature (1)..(291): NCBI GI: 46116870 Blast Desc: FG04277.1 [Gibberella zeae PH-1]
  misc_feature (1)..(294): NCBI GI: 256725553 Blast Desc: [Nectria haematococca mpVI 77-13-4]
  misc_feature (1)..(290): NCBI GI: 156049529 Blast Desc: SS1G_08471 [Sclerotinia sclerotiorum 1980] gi|154692870|gb|EDN92608.1| SS1G_08471 [Sclerotinia sclerotiorum 1980]
  misc_feature (1)..(292): NCBI GI: 169762716 Blast Desc: [Aspergillus oryzae RIB40] gi|83770286|dbj|BAE60419.1| protein product [Aspergillus oryzae]
  misc_feature (1)..(292): NCBI GI: 121716694 Blast Desc: 3' exoribonuclease family protein [Aspergillus clavatus NRRL 1] gi|119404040|gb|EAW14457.1| 3' exoribonuclease family protein [Aspergillus clavatus NRRL 1]
  misc_feature (1)..(292): NCBI GI: 145251293 Blast Desc: An15g06320 [Aspergillus niger] gi|134082691|emb|CAK42584.1| protein product [Aspergillus niger]
MADRRRINGPVGTTVPPVYDSPPPPQRTTKISDDRQDEEAQEETIRKIFLKTGVTPSASGSAYLELENPGANSSNSGLKLSCTVHGPRALPRSAPFSPHIILTTHVKYAPFATKQRRGYLRDSTERDLGVRLETALRGAIIADRWPKSGVDIIITIIEGDQDRHAPENHADDGWDTMNVLSGCITVASAAIADAGIDCVDIVAGGVAAVVSREEASSPSIVIDPTMASYHRIHAACCIAYLPARDEVTNIWYKGQLPGDDHTVLYNDLVESSLTACRNAHRVVTKSLKETVKPGQDIS

SEQ ID NO: 6436 - DNA, 1614 bp, Muscodor strobelii
  misc_feature: SGI EST ID NO. CUFF.16080.0
  misc_feature: Variant of the nucleotide sequence at SEQ ID NO 6434
caggtacatttccaccccgagctctaggtgggctgccagacattttgcaactgcgaggtcatcgtcaacttgacggcttctgcttcgttggagagtcgtaaaagtcctctatcatggcggaccgaaggaggatcaatggccccgtgggcacaactgtgcctcccgtttatgacagcccgccacctcctcagcgcaccaccaaaatcagtgacgacagacaggacgaggaggcgcaagaggagacgattcgcaagatcttcttgaagacaggcgtgactccatctgcctccggttctgcatacctcgagctcgaaaacccgggcgccaactccagcaatagcggtctgaagctcagctgcaccgtccatggtcctcgagcccttcctcgatcagcgcccttttctccccatatcatcctcacgacccatgttaaatacgctcctttcgccactaaacaacgaagaggctaccttcgagactccaccgagcgagatttgggcgtccgcctcgagacagcgctccgaggtgccatcatcgcagaccgatggcctaagagtggcgttgatatcattatcacaattattgagggtgatcaggatcgtcatgcgcctgagaatcatgccgatgacggctgggataccatgaacgtgctaagtggctgcatcaccgtcgcctcggctgccattgccgatgctggcatagactgtgtcgacattgttgctggaggtgtggcagcagtagtatctagggaggaagccagcagtccgtccattgtcatcgatcctaccatggccagctatcaccgaatccatgcagcctgctgcattgcctacctgcccgctcgagacgaagtcactaacatctggtacaaaggccaactgccgggcgacgaccataccgtactgtacaacgacctagttgagagcagtctcacagcctgccgcaatgcccaccgtgtcgtgactaagtcactcaaggaaacagtcaaacctggacaggatatctcgtgaaactgggctgcgagttagagcacaagatattggcgactcaaaagaggcacaagatgcatgatgctggccctgtgatgttgagctagactacagaccccatgcgacaaggcctcagagatcgaaatgtgcgggcatcgcatcacatcgagagattacctctttttcctgcaaacaagtaagaaggggagggcgagactgaagaagaaacacagatatctgcatctgtgtgtaataaatgcacattgtcgcggacatttgttgcagagcgggcttaagcaccaaccataagagctacctatagtggcctatagtggcctctggcttgagttgatccctaagctacaggaatttagctttcgataggcggaagaatggaggatatcagtcaaacctggccatctcgatgcataccaacagcattatgcaggagagtcaagacgcagactgacagggaaggaggattggatctgtgccttggagtaattactacccaatgataccatacccaactgcaaggttcaaacccacaggatgtcgtggcttgcaatttgccagacaggaatatgaagaaaagggagtcaataagagctcgattgactgccaa

SEQ ID NO: 6437 - DNA, 819 bp, Muscodor strobelii
  misc_feature: SGI cDNA ID NO. 561886
  misc_feature: Encodes the peptide sequence at SEQ ID NO 6438
atgtcagcagtagcaaagcgcctcgcaggcaaaaccgtagtcataaccggggcatcatcaggcataggccgcagcaccgcctacgagttcgcgcgaaccgcagcaccagcaggcgggttgaagctcgtgctaaccgcgcgacgaatcgactctctaaaacaaatcgccgcggacatcacgtctaagataggagaggacaaagtcaaagtgcacgctgtgcaattagacgtcagtaaaccagatgaagtgagaggtttcgtggggaatctgcccgaggagtttagggatgtggatgttttggttaataatgccggcctagtaaaaggcgtagccaaagcccccgagatcgcggaagaagatgtgaacatcatgttcgcaacaaacgtcacaggtctcatcaacatgacgcaagctattctgcccatcttcctgaagcgacctaatggcggtgccggcgacatcatcaacatcggcagtgttgctggtcgtgagccttacattggaggcagtatctactgtgctactaaggcggccgttcgcacttttacagagtctttgcgcaaagaactaatcgcaacaagggttcgcgttttagaggtcgatcctggtcaagttgagacggaattctccgttgttcggttctatggcgacaaggccaaggccgatgctgtatatgctggctgtgaacctctgactcctgatgacattgccgaagttgtcgtcttcgtagctggcagaagagagaatgtggttgtggctgacacactcgtcttcccgaaccaccaggcagctgccacaatcatgcataaaaaatcctga

SEQ ID NO: 6438 - protein, 272 aa, Muscodor strobelii
  misc_feature: SGI Peptide ID NO. 561886
  misc_feature (11)..(191): Pfam Id: PF00106 Pfam Desc: short chain dehydrogenase
  misc_feature (12)..(208): Pfam Id: PF08659 Pfam Desc: KR domain
  misc_feature (2)..(272): NCBI GI: 171690706 Blast Desc: protein product [Podospora anserina] gi|170945301|emb|CAP71413.1| protein product [Podospora anserina]
  misc_feature (2)..(272): NCBI GI: 46115612 Blast Desc: FG03648.1 [Gibberella zeae PH-1]
  misc_feature (2)..(272): NCBI GI: 256721772 Blast Desc: [Nectria haematococca mpVI 77-13-4]
  misc_feature (2)..(271): NCBI GI: 256725962 Blast Desc: [Nectria haematococca mpVI 77-13-4]
  misc_feature (2)..(271): NCBI GI: 46116836 Blast Desc: FG04260.1 [Gibberella zeae PH-1]
  misc_feature (2)..(272): NCBI GI: 164423675 Blast Desc: NCU08044 [Neurospora crassa OR74A] gi|39979170|emb|CAE85543.1| conserved [Neurospora crassa] gi|157070191|gb|EAA33478.2| NCU08044 [Neurospora crassa OR74A]
  misc_feature (2)..(268): NCBI GI: 39971521 Blast Desc: MGG_07076 [Magnaporthe grisea 70-15] gi|145019540|gb|EDK03768.1| MGG_07076 [Magnaporthe grisea 70-15]
  misc_feature (4)..(271): NCBI GI: 156032800 Blast Desc: conserved [Sclerotinia sclerotiorum 1980] gi|154699208|gb|EDN98946.1| conserved [Sclerotinia sclerotiorum 1980]
  misc_feature (4)..(272): NCBI GI: 154309037 Blast Desc: conserved [Botryotinia fuckeliana B05.10] gi|150852456|gb|EDN27648.1| conserved [Botryotinia fuckeliana B05.10]
  misc_feature (2)..(272): NCBI GI: 115401486 Blast Desc: ATEG_07710 [Aspergillus terreus NIH2624] gi|114190272|gb|EAU31972.1| ATEG_07710 [Aspergillus terreus NIH2624]
  misc_feature (12)..(265): SWISSPROT Homolog: EC 1.1.1.276 Serine 3-dehydrogenase
MSAVAKRLAGKTVVITGASSGIGRSTAYEFARTAAPAGGLKLVLTARRIDSLKQIAADITSKIGEDKVKVHAVQLDVSKPDEVRGFVGNLPEEFRDVDVLVNNAGLVKGVAKAPEIAEEDVNIMFATNVTGLINMTQAILPIFLKRPNGGAGDIINIGSVAGREPYIGGSIYCATKAAVRTFTESLRKELIATRVRVLEVDPGQVETEFSVVRFYGDKAKADAVYAGCEPLTPDDIAEVVVFVAGRRENVVVADTLVFPNHQAAATIMHKKS

SEQ ID NO: 6439 - DNA, 1769 bp, Muscodor strobelii
  misc_feature: SGI EST ID NO. CUFF.16342.2
  misc_feature: Variant of the nucleotide sequence at SEQ ID NO 6437
gggatgcccagagtcatcgcgcgcaattgcgacatctcatcaagaatccatactccgataccgaatagaagccatttgattctccacgacatcgcctgctgtaatgcagtctataacagcgactcgcatatagtaataccacctaatcagcctcaagctcatacatattcccgtcctccccacatctaagtcgtcactctcgtccctgcatatcagaccctccatatgcccctcactcacaccatccacacctttcgctcgctacctatagcaacactactccgtcctcactctacccccatcctctcatcacctctcgcacacatattcaaaccgcgcaacatccgcaccatgtcagcagtagcaaagcgcctcgcaggcaaaaccgtagtcataaccggggcatcatcaggcataggccgcagcaccgcctacgagttcgcgcgaaccgcagcaccagcaggcgggttgaagctcgtgctaaccgcgcgacgaatcgactctctaaaacaaatcgccgcggacatcacgtctaagataggagaggacaaagtcaaagtgcacgctgtgcaattagacgtcagtaaaccagatgaagtgagaggtttcgtggggaatctgcccgaggagtttagggatgtggatgttttggttaataatgccggcctagtaaaaggcgtagccaaagcccccgagatcgcggaagaagatgtgaacatcatgttcgcaacaaacgtcacaggtctcatcaacatgacgcaagctattctgcccatcttcctgaagcgacctaatggcggtgccggcgacatcatcaacatcggcagtgttgctggtcgtgagccttacattggaggcagtatctactgtgctactaaggcggccgttcgcacttttacagagtctttgcgcaaagaactaatcgcaacaagggttcgcgttttagaggtcgatcctggtcaagttgagacggaattctccgttgttcggttctatggcgacaaggccaaggccgatgctgtatatgctggctgtgaacctctgactcctgatgacattgccgaagttgtcgtcttcgtagctggcagaagagagaatgtggttgtggctgacacactcgtcttcccgaaccaccaggcagctgccacaatcatgcataaaaaatcctgaaggatgatgtagaaatgtttcttgtatttacttcatagacactatatacagcaagaacgaggcatggactaagccgacattgcaaaagtgctgggcattatgacgcaacgtgggtaatctacgtgaccatacctgttgatatattcaaagaaggcggacatcattcgttcctaggtctatagctattgtggcatgtcagcgtctgaatgcacttcgacttgacttagaagcaacatgaagatgtttcatcagcgaaccgagttactcattcacatgcatcggctctccaactccgcatctcaaaacgaaacacggcgaaggaaaacaacggaagccagcatgacggaccttgccggcgtgaagcatgaagctaagtccttctaggaacaactccacaaccaatcataaccgcccccgaagaggctgctccggtgcgggagggtggctcgatacatttgtgatatagttgaatggataaacagttttcatcataaacatttgacaaagtgtgagatagacaagatgaaaggttgacatactgtcaaatatgtgacggtggattcccgaagcgcgaagattgtgtagatagtagatctgca

SEQ ID NO: 6440 - DNA, 1131 bp, Muscodor strobelii
  misc_feature: SGI cDNA ID NO. 561887
  misc_feature: Elevated expression when VOC is produced
  misc_feature: Encodes the peptide sequence at SEQ ID NO 6441
atgcctgcgtcaccgcccgccgacggccagcgactgggttggtcttcaggtccaaatgaacggggaaccctcgatattgtgtggacttgtttgtcaacgattgtcatctgctgctggaccgtcctgcatccagacgtgccgacacccacctcccgcaggcgtgacaaaataatcaatagcgttctctgtctcgtcttcgcaattctagcgccagaggctatcatggctgtcgcctggagcgactggaagttggcgcgagagcaggtgcgacaggcatcgcttgaggacggcgctggcggcgatgacgagggcgccactggatatttggactgtcggggcttgaacaagttggctgagcgtggcttcgaaatcgagtgcatccccgaaacgcgccagattgccgacaagagcaagggcgacagtctggtcaaggccatcgcagtcgtacaatcgttgcatctggccgtcgacggaattgcacgaatctaccaacatctcgggttcaccacgctcgagatcagcactgttgcatacctcccgtgttcgcttattgcgtactgtttttggtggaacaagccgctcgccgtcgatactgcattcgatgttgacgtctgtgtttcatcatcatcgtcacctccagctaatgggatccgtaagcttaccaaagcctcgcgattagtcgacgacgatgtcagtgcggcgctcaggggcgtgtcgcgacgccgctatcaccgctttccgctagccaagaagatctaccgcctcgccgtgcccgacatagacctgggcgcgccggacctctgggttgccagcctccctaagtattacttttcagatacaggcggagtcctcgcaattggaagcacattcttcggggcggtacactttgcggcgtggcactacgacttcgcgacggcggctgagcgatcgctctggcgggccagctgcgtagcgctcgtgcttggaccgctgctctcgtggctgacgggcagcctcattcaccgcctctacgatatcgatatctggaagagtccgcagatcaaaccctcacttccggttccagtgacgggagctggtgcttctgacgacctggccgtggacaaagaatatcgtgtcaatcctcctcggtag

SEQ ID NO: 6441 - protein, 376 aa, Muscodor strobelii
  misc_feature: SGI Peptide ID NO. 561887
  misc_feature (7)..(362): NCBI GI: 238839519 Blast Desc: conserved [Microsporum canis CBS 113480]
  misc_feature (4)..(338): NCBI GI: 145234855 Blast Desc: An03g01740 [Aspergillus niger] gi|134057750|emb|CAK38147.1| protein product [Aspergillus niger]
  misc_feature (13)..(337): NCBI GI: 255956865 Blast Desc: Pc21g22150 [Penicillium chrysogenum Wisconsin 54-1255] gi|211590896|emb|CAP97112.1| Pc21g22150 [Penicillium chrysogenum Wisconsin 54-1255]
  misc_feature (19)..(324): NCBI GI: 170109101 Blast Desc: [Laccaria bicolor S238N-H82] gi|164639338|gb|EDR03610.1| [Laccaria bicolor S238N-H82]
  misc_feature (14)..(320): NCBI GI: 212530492 Blast Desc: PMAA_036780 [Penicillium marneffei ATCC 18224] gi|210074801|gb|EEA28888.1| PMAA_036780 [Penicillium marneffei ATCC 18224]
  misc_feature (3)..(313): NCBI GI: 121717127 Blast Desc: ACLA_076300 [Aspergillus clavatus NRRL 1] gi|119404173|gb|EAW14590.1| ACLA_076300 [Aspergillus clavatus NRRL 1]
  misc_feature (15)..(197): NCBI GI: 170113984 Blast Desc: [Laccaria bicolor S238N-H82] gi|164636857|gb|EDR01148.1| [Laccaria bicolor S238N-H82]
  misc_feature (7)..(216): NCBI GI: 170103344 Blast Desc: [Laccaria bicolor S238N-H82] gi|164642258|gb|EDR06515.1| [Laccaria bicolor S238N-H82]
  misc_feature (13)..(319): NCBI GI: 169599991 Blast Desc: SNOG_02825 [Phaeosphaeria nodorum SN15] gi|111068436|gb|EAT89556.1| SNOG_02825 [Phaeosphaeria nodorum SN15]
  misc_feature (8)..(194): NCBI GI: 145609029 Blast Desc: MGG_09092 [Magnaporthe grisea 70-15] gi|145016487|gb|EDK00917.1| MGG_09092 [Magnaporthe grisea 70-15]
  misc_feature: Useful for introducing or modulating the production of volatile compounds
MPASPPADGQRLGWSSGPNERGTLDIVWTCLSTIVICCWTVLHPDVPTPTSRRRDKIINSVLCLVFAILAPEAIMAVAWSDWKLAREQVRQASLEDGAGGDDEGATGYLDCRGLNKLAERGFEIECIPETRQIADKSKGDSLVKAIAVVQSLHLAVDGIARIYQHLGFTTLEISTVAYLPCSLIAYCFWWNKPLAVDTAFDVDVCVSSSSSPPANGIRKLTKASRLVDDDVSAALRGVSRRRYHRFPLAKKIYRLAVPDIDLGAPDLWVASLPKYYFSDTGGVLAIGSTFFGAVHFAAWHYDFATAAERSLWRASCVALVLGPLLSWLTGSLIHRLYDIDIWKSPQIKPSLPVPVTGAGASDDLAVDKEYRVNPPR

SEQ ID NO: 6442 - DNA, 1386 bp, Muscodor strobelii
  misc_feature: SGI cDNA ID NO. 561888
  misc_feature: Reduced expression when VOC is produced
  misc_feature: Encodes the peptide sequence at SEQ ID NO 6443
atgcagttcggccatctacttctcctcgctacctgcgcggtagcaagcccaggtctaagcatacccaaaggttgtcctcttcagaattgcctctttaagaatgctttaccaccagctctcaaacctgcggcctcttcgttctgcacagcgtacttgggcaagaatcgttgcaccaaaacgaagaccgcgaccaagacaaccacattaacggcaaccaagactcctgctactctaacgcgggaaacttcaactgttactgccataacgataggcagcgtctgcacgagcacaacgacgacaactgtcgatgcgccaactctaacgacgagcattgactacgtaacataccacacattagttccacgggacgaaggactagatgctcgtgggctcgcaacgccaggttggcttaccgcaggatgcacagccaagagcccggctaaagctatatcggccgcttgtgactgcttcattggcactgccaccgttacgaagacgaagacagcttctaagactgtcactgtcacagcctcaacaccagtgataacaatcaccaagacatacacgcaagtggaaactgcgtgcacctcgacgtcgacaaagacagccacgtccactttaggtggccaaggtggtctgacttgtggtaagaccttcacggcatacccgactgcatcatcaaccggatcggtcacttgcgcaaacactatccctcaaccatccgccaacgtcctcttacgtgttgaaggaaatgagtcagacggtacgatcttcgagggttgcattgagtctggaccgcaattgatcaccaccccttcaggcggatcacatcagtgcgacgccacaaataacggcgcgaacccgaatcccggtactacgccaacggaccagattgcgtctgcgggccgcctgaacggctttggattcgacgggacatggtctgatcaattccaggacttttttatcacaagtattgccaacaccctccagaccagtacccagttttggggtcttatcgtgaatggacagttcagtccagttggaggttgccaattcatccttaataacggcgaccagtccctctgggcttttgatgcgttcaataagaacgtgaatcttcaggtctctccagactacgccgtcgccgaggtcgacagtggtaccgtgaccgttaccattactgacacttttactggcagtccggtcgcgggtgcctcgttcgggggaagtattagcgacgcgtcagggcaagtcacaattccagtcccatcagatgctggatgctaccagatgaaagctaagcgaagcgatggtatccgttcgaacgccttctatcttactgttgtagatgccttcgatgtcggatcagcaccgcctggcaagtaa

SEQ ID NO: 6443 - protein, 461 aa, Muscodor strobelii
  misc_feature: SGI Peptide ID NO. 561888
  misc_feature (244)..(402): NCBI GI: 284043180 Blast Desc: Cwoe_1718 [Conexibacter woesei DSM 14684] gi|283947401|gb|ADB50145.1| Cwoe_1718 [Conexibacter woesei DSM 14684]
  misc_feature (254)..(367): NCBI GI: 282868921 Blast Desc: SACT1DRAFT_1955 [Streptomyces sp. ACT-1] gi|282577703|gb|EFB83117.1| SACT1DRAFT_1955 [Streptomyces sp. ACT-1]
  misc_feature (254)..(367): NCBI GI: 182435446 Blast Desc: SGR_1653 [Streptomyces griseus subsp. griseus NBRC 13350] gi|178463962|dbj|BAG18482.1| [Streptomyces griseus subsp. griseus NBRC 13350]
  misc_feature (242)..(430): NCBI GI: 284043189 Blast Desc: Cwoe_1727 [Conexibacter woesei DSM 14684] gi|283947410|gb|ADB50154.1| Cwoe_1727 [Conexibacter woesei DSM 14684]
  misc_feature (246)..(455): NCBI GI: 284044176 Blast Desc: Cwoe_2722 [Conexibacter woesei DSM 14684] gi|283948397|gb|ADB51141.1| Cwoe_2722 [Conexibacter woesei DSM 14684]
  misc_feature: Useful for introducing or modulating the production of volatile compounds
MQFGHLLLLATCAVASPGLSIPKGCPLQNCLFKNALPPALKPAASSFCTAYLGKNRCTKTKTATKTTTLTATKTPATLTRETSTVTAITIGSVCTSTTTTTVDAPTLTTSIDYVTYHTLVPRDEGLDARGLATPGWLTAGCTAKSPAKAISAACDCFIGTATVTKTKTASKTVTVTASTPVITITKTYTQVETACTSTSTKTATSTLGGQGGLTCGKTFTAYPTASSTGSVTCANTIPQPSANVLLRVEGNESDGTIFEGCIESGPQLITTPSGGSHQCDATNNGANPNPGTTPTDQIASAGRLNGFGFDGTWSDQFQDFFITSIANTLQTSTQFWGLIVNGQFSPVGGCQFILNNGDQSLWAFDAFNKNVNLQVSPDYAVAEVDSGTVTVTITDTFTGSPVAGASFGGSISDASGQVTIPVPSDAGCYQMKAKRSDGIRSNAFYLTVVDAFDVGSAPPGK

SEQ ID NO: 6444 - DNA, 3806 bp, Muscodor strobelii
  misc_feature: SGI EST ID NO. CUFF.16103.0
  misc_feature: Variant of the nucleotide sequence at SEQ ID NO 6442
caagcggatccgttgtcccgaatctcacgtatccaacccagagcatggctagtcgagacactattccacagcgacggacccgataatacgacggcgtaaatataaacccggctcagctggtctagcgatctaggaggtctaagttttcactatggcgacgaaaatcgataaatacttgaggccctgatgattttactagtgtctcgtgtgaatctcgttttctgcgtttttgttcattccagccaagcagaatcgtggaagctgtgagggtagacggacttggctgtcttgttgaaacgtattctcctcatgactgacgtccaccatgcagttcggccatctacttctcctcgctacctgcgcggtagcaagcccaggtctaagcatacccaaaggttgtcctcttcagaattgcctctttaagaatgctttaccaccagctctcaaacctgcggcctcttcgttctgcacagcgtacttgggcaagaatcgttgcaccaaaacgaagaccgcgaccaagacaaccacattaacggcaaccaagactcctgctactctaacgcgggaaacttcaactgttactgccataacgataggcagcgtctgcacgagcacaacgacgacaactgtcgatgcgccaactctaacgacgagcattgactacgtaacataccacacattagttccacgggacgaaggactagatgctcgtgggctcgcaacgccaggttggcttaccgcaggatgcacagccaagagcccggctaaagctatatcggccgcttgtgactgcttcattggcactgccaccgttacgaagacgaagacagcttctaagactgtcactgtcacagcctcaacaccagtgataacaatcaccaagacatacacgcaagtggaaactgcgtgcacctcgacgtcgacaaagacagccacgtccactttaggtggccaaggtggtctgacttgtggtaagaccttcacggcatacccgactgcatcatcaaccggatcggtcacttgcgcaaacactatccctcaaccatccgccaacgtcctcttacgtgttgaaggaaatgagtcagacggtacgatcttcgagggttgcattgagtctggaccgcaattgatcaccaccccttcaggcggatcacatcagtgcgacgccacaaataacggcgcgaacccgaatcccggtactacgccaacggaccagattgcgtctgcgggccgcctgaacggctttggattcgacgggacatggtctgatcaattccaggacttttttatcacaagtattgccaacaccctccagaccagtacccagttttggggtcttatcgtgaatggacagttcagtccagttggaggttgccaattcatccttaataacggcgaccagtccctctgggcttttgatgcgttcaataagaacgtgaatcttcaggtctctccagactacgccgtcgccgaggtcgacagtggtaccgtgaccgttaccattactgacacttttactggcagtccggtcgcgggtgcctcgttcgggggaagtattagcgacgcgtcagggcaagtcacaattccagtcccatcagatgctggatgctaccagatgaaagctaagcgaagcgatggtatccgttcgaacgccttctatcttactgttgtagatgccttcgatgtcggatcagcaccgcctggcaagtaatcgactgcagagtgttgcttcagactaagttgtaagggaacgatagacgttcatatatatgagtaatattagtaaagtttaaagatgtagatcgagagatccaaactcataataataatcacggagtgagcgcgcgtgttgcatataacaacgcagcactaccaatatactaccacctaagagcttctttgtttgaacgcagtcatcttcgaattcttgtttcattgaagtcaatgcttggactattctgaatcacctagctaggacattgccttggctggtccgctttcgtcgctaactctcgttatattgaccagggttggcgaaatggtcatgtatccttcaataggcttggtcagagccaggaaagagcatagtgtggttcaatatataaaatggaaattggctgtatgagaaactgtacgacaccaaatatggttgctaggtagtgtggctactccaaggtagccttgcctaaagcgaccctatttgccaccagtaactcggcttatcatcaagcgagtcaagatcatcccaaaagtctcctggtggcttgaatatgacaatcgagtcctggccattgtcgtttctaccgattgctttgaaagcgtcgattgtatggttgcttggacgccattcgaaggtatggaagaaaactctccaacgagacgtgtccggaaattccttatcccatagaccgaaagatgtaccaggtgctccacatatgacgtgaaacacgcaattatcacctttgtccttttctactgagagatatgcagttcgtagagctggtgttaaagagcgagagcatcggcgcgcgaatgcctggagcagttcattcatccttgtgttatttggggatcgtcggaccggtctagtgaaatttatgtaaccgtagtcatccttcttgtctgctttgaggaaggactcattcgcgtcaaagaagtcctgcgcttcccattcttcttcctcggtgtctgcatatcctgggggcagccgatgctgcatagcagacactagcgacctttgttcgtccacaatgccacgctcctggagatccataagccatgtgccgtcagggtagcacatgtcgagttgaaattgtagcgtggtcgcatgtatccagcagacctggtctctttctttgtctgtggatgcatcaaagaacgacaagctcagcggtcctctgatccgaatatcttgacaatccttgacacgctcacgcagaagcaagctgagcgcatcaggcgttgctcggtcaaatacaggtaatgccaagcctctaaatttatgatttggcgatttgatgatagtcttgaagtttgtcaaggatttgggcagtggcacagcgttgagtgcacccacaagctcgtcgcggtaaatctgatcaaggctataatgccgaccccagcacaacgaattatccagatcccatcccaccaccttcacatttggcattctagacgtaaggaacacggcagatgccggattccacaaccggaaagagctgtgaaagccgaacgtctgtatgcacggcagctctggaaatcccattatatcggccggatgaatcttcaggacagaaaactgggcgtgaaatgatttttcctccgcagcccagtcagcggccgctatttcgagcgctatgggtggcgtggccgtatgacggctcaaaatgtcaaacagacgtcggagaatgccggttgcggcatcgtcgttggttcgccgctctgctgccgtcatccacccaaattcccgaaattcatcaatgccaagagagggtaatacaatttctacacagagcgttctcaagaactgacgccggcgatcatctagtatttgcgcgaactcatcgaggctctcctccgaagcgcggatttcgaggtcttgaaaggtgtagcgttcaatagctgcttggaatttgcgcgaggtggcggcgattgatgagaggttgtagggcctatcatcgtagacgaaggacaccacatggtcaaccagctcttgtggcaacttctccatcatcatttgcaatgttgttctgtggggttagcttggcgatttgaactaccttggaataggaagagaatgggtgaag

SEQ ID NO: 6445 - DNA, 1551 bp, Muscodor strobelii
  misc_feature: SGI cDNA ID NO. 561889
  misc_feature: Encodes the peptide sequence at SEQ ID NO 6446
atgatgatggagaagttgccacaagagctggttgaccatgtggtgtccttcgtctacgatgataggccctacaacctctcatcaatcgccgccacctcgcgcaaattccaagcagctattgaacgctacacctttcaagacctcgaaatccgcgcttcggaggagagcctcgatgagttcgcgcaaatactagatgatcgccggcgtcagttcttgagaacgctctgtgtagaaattgtattaccctctcttggcattgatgaatttcgggaatttgggtggatgacggcagcagagcggcgaaccaacgacgatgccgcaaccggcattctccgacgtctgtttgacattttgagccgtcatacggccacgccacccatagcgctcgaaatagcggccgctgactgggctgcggaggaaaaatcatttcacgcccagttttctgtcctgaagattcatccggccgatataatgggatttccagagctgccgtgcatacagacgttcggctttcacagctctttccggttgtggaatccggcatctgccgtgttccttacgtctagaatgccaaatgtgaaggtggtgggatgggatctggataattcgttgtgctggggtcggcattatagccttgatcagatttaccgcgacgagcttgtgggtgcactcaacgctgtgccactgcccaaatccttgacaaacttcaagactatcatcaaatcgccaaatcataaatttagaggcttggcattacctgtatttgaccgagcaacgcctgatgcgctcagcttgcttctgcgtgagcgtgtcaaggattgtcaagatattcggatcagaggaccgctgagcttgtcgttctttgatgcatccacagacaaagaaagagaccaggtctgctggatacatgcgaccacgctacaatttcaactcgacatgtgctaccctgacggcacatggcttatggatctccaggagcgtggcattgtggacgaacaaaggtcgctagtgtctgctatgcagcatcggctgcccccaggatatgcagacaccgaggaagaagaatgggaagcgcaggacttctttgacgcgaatgagtccttcctcaaagcagacaagaaggatgactacggttacataaatttcactagaccggtccgacgatccccaaataacacaaggatgaatgaactgctccaggcattcgcgcgccgatgctctcgctctttaacaccagctctacgaactgcatatctctcagtagaaaaggacaaaggtgataattgcgtgtttcacgtcatatgtggagcacctggtacatctttcggtctatgggataaggaatttccggacacgtctcgttggagagttttcttccataccttcgaatggcgtccaagcaaccatacaatcgacgctttcaaagcaatcggtagaaacgacaatggccaggactcgattgtcatattcaagccaccaggagacttttgggatgatcttgactcgcttgatgataagccgagttactggtggcaaatagggtcgctttag

SEQ ID NO: 6446 - protein, 516 aa, Muscodor strobelii
  misc_feature: SGI Peptide ID NO. 561889
  misc_feature (3)..(497): NCBI GI: 256733582 Blast Desc: NECHADRAFT_77848 [Nectria haematococca mpVI 77-13-4]
  misc_feature (3)..(118): NCBI GI: 256724182 Blast Desc: [Nectria haematococca mpVI 77-13-4]
  misc_feature (3)..(321): NCBI GI: 256720854 Blast Desc: NECHADRAFT_85576 [Nectria haematococca mpVI 77-13-4]
  misc_feature (26)..(320): NCBI GI: 67527744 Blast Desc: AN4149.2 [Aspergillus nidulans FGSC A4] gi|40740220|gb|EAA59410.1| [Aspergillus nidulans FGSC A4] gi|259481255|tpe|CBF74605.1| TPA: conserved [Aspergillus nidulans
  misc_feature (2)..(196): NCBI GI: 255954485 Blast Desc: Pc21g09580 [Penicillium chrysogenum Wisconsin 54-1255] gi|211589706|emb|CAP95855.1| Pc21g09580 [Penicillium chrysogenum Wisconsin 54-1255]
MMMEKLPQELVDHVVSFVYDDRPYNLSSIAATSRKFQAAIERYTFQDLEIRASEESLDEFAQILDDRRRQFLRTLCVEIVLPSLGIDEFREFGWMTAAERRTNDDAATGILRRLFDILSRHTATPPIALEIAAADWAAEEKSFHAQFSVLKIHPADIMGFPELPCIQTFGFHSSFRLWNPASAVFLTSRMPNVKVVGWDLDNSLCWGRHYSLDQIYRDELVGALNAVPLPKSLTNFKTIIKSPNHKFRGLALPVFDRATPDALSLLLRERVKDCQDIRIRGPLSLSFFDASTDKERDQVCWIHATTLQFQLDMCYPDGTWLMDLQERGIVDEQRSLVSAMQHRLPPGYADTEEEEWEAQDFFDANESFLKADKKDDYGYINFTRPVRRSPNNTRMNELLQAFARRCSRSLTPALRTAYLSVEKDKGDNCVFHVICGAPGTSFGLWDKEFPDTSRWRVFFHTFEWRPSNHTIDAFKAIGRNDNGQDSIVIFKPPGDFWDDLDSLDDKPSYWWQIGSL

SEQ ID NO: 6447 - DNA, 3806 bp, Muscodor strobelii
  misc_feature: SGI EST ID NO. CUFF.16103.0
  misc_feature: Variant of the nucleotide sequence at SEQ ID NO 6445
cttcacccattctcttcctattccaaggtagttcaaatcgccaagctaaccccacagaacaacattgcaaatgatgatggagaagttgccacaagagctggttgaccatgtggtgtccttcgtctacgatgataggccctacaacctctcatcaatcgccgccacctcgcgcaaattccaagcagctattgaacgctacacctttcaagacctcgaaatccgcgcttcggaggagagcctcgatgagttcgcgcaaatactagatgatcgccggcgtcagttcttgagaacgctctgtgtagaaattgtattaccctctcttggcattgatgaatttcgggaatttgggtggatgacggcagcagagcggcgaaccaacgacgatgccgcaaccggcattctccgacgtctgtttgacattttgagccgtcatacggccacgccacccatagcgctcgaaatagcggccgctgactgggctgcggaggaaaaatcatttcacgcccagttttctgtcctgaagattcatccggccgatataatgggatttccagagctgccgtgcatacagacgttcggctttcacagctctttccggttgtggaatccggcatctgccgtgttccttacgtctagaatgccaaatgtgaaggtggtgggatgggatctggataattcgttgtgctggggtcggcattatagccttgatcagatttaccgcgacgagcttgtgggtgcactcaacgctgtgccactgcccaaatccttgacaaacttcaagactatcatcaaatcgccaaatcataaatttagaggcttggcattacctgtatttgaccgagcaacgcctgatgcgctcagcttgcttctgcgtgagcgtgtcaaggattgtcaagatattcggatcagaggaccgctgagcttgtcgttctttgatgcatccacagacaaagaaagagaccaggtctgctggatacatgcgaccacgctacaatttcaactcgacatgtgctaccctgacggcacatggcttatggatctccaggagcgtggcattgtggacgaacaaaggtcgctagtgtctgctatgcagcatcggctgcccccaggatatgcagacaccgaggaagaagaatgggaagcgcaggacttctttgacgcgaatgagtccttcctcaaagcagacaagaaggatgactacggttacataaatttcactagaccggtccgacgatccccaaataacacaaggatgaatgaactgctccaggcattcgcgcgccgatgctctcgctctttaacaccagctctacgaactgcatatctctcagtagaaaaggacaaaggtgataattgcgtgtttcacgtcatatgtggagcacctggtacatctttcggtctatgggataaggaatttccggacacgtctcgttggagagttttcttccataccttcgaatggcgtccaagcaaccatacaatcgacgctttcaaagcaatcggtagaaacgacaatggccaggactcgattgtcatattcaagccaccaggagacttttgggatgatcttgactcgcttgatgataagccgagttactggtggcaaatagggtcgctttaggcaaggctaccttggagtagccacactacctagcaaccatatttggtgtcgtacagtttctcatacagccaatttccattttatatattgaaccacactatgctctttcctggctctgaccaagcctattgaaggatacatgaccatttcgccaaccctggtcaatataacgagagttagcgacgaaagcggaccagccaaggcaatgtcctagctaggtgattcagaatagtccaagcattgacttcaatgaaacaagaattcgaagatgactgcgttcaaacaaagaagctcttaggtggtagtatattggtagtgctgcgttgttatatgcaacacgcgcgctcactccgtgattattattatgagtttggatctctcgatctacatctttaaactttactaatattactcatatatatgaacgtctatcgttcccttacaacttagtctgaagcaacactctgcagtcgattacttgccaggcggtgctgatccgacatcgaaggcatctacaacagtaagatagaaggcgttcgaacggataccatcgcttcgcttagctttcatctggtagcatccagcatctgatgggactggaattgtgacttgccctgacgcgtcgctaatacttcccccgaacgaggcacccgcgaccggactgccagtaaaagtgtcagtaatggtaacggtcacggtaccactgtcgacctcggcgacggcgtagtctggagagacctgaagattcacgttcttattgaacgcatcaaaagcccagagggactggtcgccgttattaaggatgaattggcaacctccaactggactgaactgtccattcacgataagaccccaaaactgggtactggtctggagggtgttggcaatacttgtgataaaaaagtcctggaattgatcagaccatgtcccgtcgaatccaaagccgttcaggcggcccgcagacgcaatctggtccgttggcgtagtaccgggattcgggttcgcgccgttatttgtggcgtcgcactgatgtgatccgcctgaaggggtggtgatcaattgcggtccagactcaatgcaaccctcgaagatcgtaccgtctgactcatttccttcaacacgtaagaggacgttggcggatggttgagggatagtgtttgcgcaagtgaccgatccggttgatgatgcagtcgggtatgccgtgaaggtcttaccacaagtcagaccaccttggccacctaaagtggacgtggctgtctttgtcgacgtcgaggtgcacgcagtttccacttgcgtgtatgtcttggtgattgttatcactggtgttgaggctgtgacagtgacagtcttagaagctgtcttcgtcttcgtaacggtggcagtgccaatgaagcagtcacaagcggccgatatagctttagccgggctcttggctgtgcatcctgcggtaagccaacctggcgttgcgagcccacgagcatctagtccttcgtcccgtggaactaatgtgtggtatgttacgtagtcaatgctcgtcgttagagttggcgcatcgacagttgtcgtcgttgtgctcgtgcagacgctgcctatcgttatggcagtaacagttgaagtttcccgcgttagagtagcaggagtcttggttgccgttaatgtggttgtcttggtcgcggtcttcgttttggtgcaacgattcttgcccaagtacgctgtgcagaacgaagaggccgcaggtttgagagctggtggtaaagcattcttaaagaggcaattctgaagaggacaacctttgggtatgcttagacctgggcttgctaccgcgcaggtagcgaggagaagtagatggccgaactgcatggtggacgtcagtcatgaggagaatacgtttcaacaagacagccaagtccgtctaccctcacagcttccacgattctgcttggctggaatgaacaaaaacgcagaaaacgagattcacacgagacactagtaaaatcatcagggcctcaagtatttatcgattttcgtcgccatagtgaaaacttagacctcctagatcgctagaccagctgagccgggtttatatttacgccgtcgtattatcgggtccgtcgctgtggaatagtgtctcgactagccatgctctgggttggatacgtgagattcgggacaacggatccgcttg

SEQ ID NO: 6448 - DNA, 999 bp, Muscodor strobelii
  misc_feature: SGI cDNA ID NO. 561890
  misc_feature: Reduced expression when VOC is produced
  misc_feature: Encodes the peptide sequence at SEQ ID NO 6449
atgactgttaatgctcctacgacagaaaagcgccgttactggctgctcacttcgcctcgaactgcgtccaacatgcttgtcaggatactaaacctcgacgagcagggtgtgaggccagcgtacaatggcgggtatttcttcttcccgtccatcttgtctcgactgcccatttacgacaagaagccggaagagatcacccctgaggagcgcaccgagcaaaaggaagctacgcagaagtcagcagatgcgttgcaagatcatcttgccgccgccgaaaaggaaaaccaggccatctttgtcaaagaacacatcatcttcttgaatgctgccgaggccgagcgtcagtatatgtaccctgaggctgtagctccacccacgactgcagttattaggggtcttgataacccaactcgctctgagaacaatatgacttgtcttcccgacgaattccttaaaacatggcacccaacaatcctcattcgccatccagccgcgcagcttccctctttgttcagaactgctttaagtgacgagatacaactggacggcaagaaacgcggcaagagagagccgtacgcagtcgagaccaccatgaaatgggttcggtcgttgtatgagttctatcgtacacactttggcgataatagcgcctggcctatcgtcttggatgctgatgatgtcatgcttcagcccaagcttgtggctaagtacgctgagctggcgggactggacacatcgaaactcaaattctcctgggaagaagccagcaaggagaagattgagaagatgtcctcggccgagaagaggatgttgagctctatcaatgcaagcaccggcgtcaacatggacaaagtagcaggtaacgtcgaccttgacaaggaagccgcgaagtggcgtgaggaatttggagaggatggaggtcgcaagcttgagaaatgggttcgagaggctattcctgagtacgagtatcttcgctcaaagagattgactttggattaa

SEQ ID NO: 6449 - protein, 332 aa, Muscodor strobelii
  misc_feature: SGI Peptide ID NO. 561890
  misc_feature (1)..(329): NCBI GI: 256725437 Blast Desc: NECHADRAFT_95141 [Nectria haematococca mpVI 77-13-4]
  misc_feature (1)..(331): NCBI GI: 116179332 Blast Desc: CHGG_00294 [Chaetomium globosum CBS 148.51] gi|88184591|gb|EAQ92059.1| CHGG_00294 [Chaetomium globosum CBS 148.51]
  misc_feature (1)..(329): NCBI GI: 46115060 Blast Desc: FG03372.1 [Gibberella zeae PH-1]
  misc_feature (8)..(331): NCBI GI: 256722378 Blast Desc: NECHADRAFT_17690 [Nectria haematococca mpVI 77-13-4]
  misc_feature (12)..(331): NCBI GI: 46118071 Blast Desc: FG04682.1 [Gibberella zeae PH-1]
  misc_feature (9)..(329): NCBI GI: 226281710 Blast Desc: conserved [Paracoccidioides brasiliensis Pb01]
  misc_feature (12)..(330): NCBI GI: 238845398 Blast Desc: conserved [Microsporum canis CBS 113480]
  misc_feature (11)..(329): NCBI GI: 225680182 Blast Desc: conserved [Paracoccidioides brasiliensis Pb03]
  misc_feature (5)..(329): NCBI GI: 258574857 Blast Desc: [Uncinocarpus reesii 1704] gi|237901876|gb|EEP76277.1| [Uncinocarpus reesii 1704]
  misc_feature (11)..(329): NCBI GI: 226287819 Blast Desc: conserved [Paracoccidioides brasiliensis Pb18]
  misc_feature: Useful for introducing or modulating the production of volatile compounds
MTVNAPTTEKRRYWLLTSPRTASNMLVRILNLDEQGVRPAYNGGYFFFPSILSRLPIYDKKPEEITPEERTEQKEATQKSADALQDHLAAAEKENQAIFVKEHIIFLNAAEAERQYMYPEAVAPPTTAVIRGLDNPTRSENNMTCLPDEFLKTWHPTILIRHPAAQLPSLFRTALSDEIQLDGKKRGKREPYAVETTMKWVRSLYEFYRTHFGDNSAWPIVLDADDVMLQPKLVAKYAELAGLDTSKLKFSWEEASKEKIEKMSSAEKRMLSSINASTGVNMDKVAGNVDLDKEAAKWREEFGEDGGRKLEKWVREAIPEYEYLRSKRLTLD

SEQ ID NO: 6450 - DNA, 1428 bp, Muscodor strobelii
  misc_feature: SGI EST ID NO. CUFF.16109.0
  misc_feature: Variant of the nucleotide sequence at SEQ ID NO 6448
gacgggtagtgaaaagaccaataagcaaacatgggactggacagggcatgaatgtccgaatatgcatatgtgaatggggcttgagtcaagtatcaatcaagtataaacattcaccatcgcccctcaacttcaaatctttagacacttcctctcacaactctctacatactccacccacgataaacgccggctccttaacaagaagcggagtgtattatcataagaattagcaggcatactcggttcttcaagaattactagctgcaacatgactgttaatgctcctacgacagaaaagcgccgttactggctgctcacttcgcctcgaactgcgtccaacatgcttgtcaggatactaaacctcgacgagcagggtgtgaggccagcgtacaatggcgggtatttcttcttcccgtccatcttgtctcgactgcccatttacgacaagaagccggaagagatcacccctgaggagcgcaccgagcaaaaggaagctacgcagaagtcagcagatgcgttgcaagatcatcttgccgccgccgaaaaggaaaaccaggccatctttgtcaaagaacacatcatcttcttgaatgctgccgaggccgagcgtcagtatatgtaccctgaggctgtagctccacccacgactgcagttattaggggtcttgataacccaactcgctctgagaacaatatgacttgtcttcccgacgaattccttaaaacatggcacccaacaatcctcattcgccatccagccgcgcagcttccctctttgttcagaactgctttaagtgacgagatacaactggacggcaagaaacgcggcaagagagagccgtacgcagtcgagaccaccatgaaatgggttcggtcgttgtatgagttctatcgtacacactttggcgataatagcgcctggcctatcgtcttggatgctgatgatgtcatgcttcagcccaagcttgtggctaagtacgctgagctggcgggactggacacatcgaaactcaaattctcctgggaagaagccagcaaggagaagattgagaagatgtcctcggccgagaagaggatgttgagctctatcaatgcaagcaccggcgtcaacatggacaaagtagcaggtaacgtcgaccttgacaaggaagccgcgaagtggcgtgaggaatttggagaggatggaggtcgcaagcttgagaaatgggttcgagaggctattcctgagtacgagtatcttcgctcaaagagattgactttggattaagtcatagtcgtcttcccggattagagggtgctagatattgacttcatgcggacaaagaaactgtattaacataagactagaaatttcaaagacaacgaattgtcacttggcacaatagtattctcttacctacctatctcacatgtcccatgttggtgcca

SEQ ID NO: 6451 - DNA, 1080 bp, Muscodor strobelii
  misc_feature: SGI cDNA ID NO. 561891
  misc_feature: Reduced expression when VOC is produced
  misc_feature: Encodes the peptide sequence at SEQ ID NO 6452
atgtccaaggatactgctcaagtcgataccgcagaagttgcatcgatccacgatattgagccaccgcccgtcgacgaagactacgtgaatcccgcagacaaaagtccacgatggtggctaggggcacatgctttcgcacttcgacttggtgccaccattgggtttaatattggtaaccgcgcggggcagtcagcaccatcaccgacgaaaacgatctggttggattctactctgagccaatggaagggcacaggggtgatcagcgcaaatgtatggataccaccgctagcaaatgcaaatgcattagaaaagcgaccagccattatcaattttcacggtggtggcttcattttgggacagggcacagatgatgcgcgttgggctcatgctctaatggttggtatgggtgctgtagtcttttcggtgaactaccgtctcgctccaggatatccattcccgacgccggtggaggactccgttgatgctatacttcaaatatgcaatgacgcggaccagtacaagatcgaccggaatcgcattttgctttctggtttctcagcaggggcaacacttgctaccagtagttggattgtccttcaagatcccacaaaatggggctataacttaccgtcttctcgccccacgatatctggtatctcgttgttttacccattattggactggacattggatcgacctcagaaacgggctgcctgtaagcgaccagatatgacgttgcctagtagtctgacggatctgatcgacgcgtcttacttacaccctccccttccgagacgcgaacggacagatattcgattgtctccgggattgatgtctgatgagctgatcgatgaattgccgcccatccacttatgtttgtgcgaatacgacatgctgcttgcggaaggacaactatttgcagaaagaatcgaaaatagaggtaggaagatcagtgttcgggttgtcgatggtgaaaaacatgcttgggataaacctttacctttaggaccgaaagacagcgtttcatttgagtatgaaatcgccatagaagctatcaagagctggtttgacagtgcataa

SEQ ID NO: 6452 - protein, 359 aa, Muscodor strobelii
  misc_feature: SGI Peptide ID NO. 561891
  misc_feature (108)..(331): Pfam Id: PF07859 Pfam Desc: alpha/beta hydrolase fold
  misc_feature (90)..(148): Pfam Id: PF00135 Pfam Desc: Carboxylesterase
  misc_feature (20)..(356): NCBI GI: 46110186 Blast Desc: FG01975.1 [Gibberella zeae PH-1]
  misc_feature (20)..(356): NCBI GI: 256720736 Blast Desc: [Nectria haematococca mpVI 77-13-4]
  misc_feature (100)..(355): NCBI GI: 39945396 Blast Desc: MGG_04680 [Magnaporthe grisea 70-15] gi|145011292|gb|EDJ95948.1| MGG_04680 [Magnaporthe grisea 70-15]
  misc_feature (32)..(357): NCBI GI: 134114421 Blast Desc: CNBG4390 [Cryptococcus neoformans var. neoformans B-3501A] gi|50256772|gb|EAL19492.1| CNBG4390 [Cryptococcus neoformans var. neoformans B-3501A]
  misc_feature (32)..(357): NCBI GI: 58269162 Blast Desc: [Cryptococcus neoformans var. neoformans JEC21] gi|57227973|gb|AAW44430.1| conserved [Cryptococcus neoformans var. neoformans JEC21]
  misc_feature (22)..(358): NCBI GI: 85096902 Blast Desc: NCU07081 [Neurospora crassa OR74A] gi|28921834|gb|EAA31110.1| [Neurospora crassa OR74A]
  misc_feature (36)..(358): NCBI GI: 119497259 Blast Desc: lipase, [Neosartorya fischeri NRRL 181] gi|119413552|gb|EAW23493.1| lipase, [Neosartorya fischeri NRRL 181]
  misc_feature (37)..(331): NCBI GI: 116203219 Blast Desc: CHGG_09494 [Chaetomium globosum CBS 148.51] gi|88178012|gb|EAQ85480.1| CHGG_09494 [Chaetomium globosum CBS 148.51]
  misc_feature (36)..(357): NCBI GI: 159130488 Blast Desc: lipase, [Aspergillus fumigatus A1163]
  misc_feature (37)..(357): NCBI GI: 121703219 Blast Desc: lipase, [Aspergillus clavatus NRRL 1] gi|119398017|gb|EAW08448.1| lipase, [Aspergillus clavatus NRRL 1]
  misc_feature (105)..(328): SWISSPROT Homolog: EC 3.1.1.3 Triacylglycerol lipase
  misc_feature: Useful for introducing or modulating the production of volatile compounds
MSKDTAQVDTAEVASIHDIEPPPVDEDYVNPADKSPRWWLGAHAFALRLGATIGFNIGNRAGQSAPSPTKTIWLDSTLSQWKGTGVISANVWIPPLANANALEKRPAIINFHGGGFILGQGTDDARWAHALMVGMGAVVFSVNYRLAPGYPFPTPVEDSVDAILQICNDADQYKIDRNRILLSGFSAGATLATSSWIVLQDPTKWGYNLPSSRPTISGISLFYPLLDWTLDRPQKRAACKRPDMTLPSSLTDLIDASYLHPPLPRRERTDIRLSPGLMSDELIDELPPIHLCLCEYDMLLAEGQLFAERIENRGRKISVRVVDGEKHAWDKPLPLGPKDSVSFEYEIAIEAIKSWFDSA

SEQ ID NO: 6453 - DNA, 1579 bp, Muscodor strobelii
  misc_feature: SGI EST ID NO. CUFF.16119.0
  misc_feature: Variant of the nucleotide sequence at SEQ ID NO 6451
tcgaaattgagtttacgaccattccgtattaaagtgccaatcttcatcaattgccaggtctccctgaactggtcaagacagtgttgtggagatgtccaaggatactgctcaagtcgataccgcagaagttgcatcgatccacgatattgagccaccgcccgtcgacgaagactacgtgaatcccgcagacaaaagtccacgatggtggctaggggcacatgctttcgcacttcgacttggtgccaccattgggtttaatattggtaaccgcgcggggcagtcagcaccatcaccgacgaaaacgatctggttggattctactctgagccaatggaagggcacaggggtgatcagcgcaaatgtatggataccaccgctagcaaatgcaaatgcattagaaaagcgaccagccattatcaattttcacggtggtggcttcattttgggacagggcacagatgatgcgcgttgggctcatgctctaatggttggtatgggtgctgtagtcttttcggtgaactaccgtctcgctccaggatatccattcccgacgccggtggaggactccgttgatgctatacttcaaatatgcaatgacgcggaccagtacaagatcgaccggaatcgcattttgctttctggtttctcagcaggggcaacacttgctaccagtagttggattgtccttcaagatcccacaaaatggggctataacttaccgtcttctcgccccacgatatctggtatctcgttgttttacccattattggactggacattggatcgacctcagaaacgggctgcctgtaagcgaccagatatgacgttgcctagtagtctgacggatctgatcgacgcgtcttacttacaccctccccttccgagacgcgaacggacagatattcgattgtctccgggattgatgtctgatgagctgatcgatgaattgccgcccatccacttatgtttgtgcgaatacgacatgctgcttgcggaaggacaactatttgcagaaagaatcgaaaatagaggtaggaagatcagtgttcgggttgtcgatggtgaaaaacatgcttgggataaacctttacctttaggaccgaaagacagcgtttcatttgagtatgaaatcgccatagaagctatcaagagctggtttgacagtgcataaaaatgatctgagaggattgtcaatcttattggtggcattgtgaggtatacttcacgaatcagatcagccgccaagccccgtcgacgtgacggtatacgcacacttttcaagcctctcagcagatagccacgccccacgcaattggacgcggacgttgagtcatctcggggatcgacagcctccgaaaccccattgaatgacttcagaaatatgagctcttccgcatttgataagctgtcaatagcaactgccttccatggtggttcttacttttgggtggctttggttcgtattgctgccgtaatccatgcaactggtcgttgtcctgttacttcacctgtctagtagaacatacatgtaaaagactgagagcttagatacgtataattataatacatagaagtcgat

SEQ ID NO: 6454 - DNA, 2013 bp, Muscodor strobelii
  misc_feature: SGI cDNA ID NO. 561892
  misc_feature: Encodes the peptide sequence at SEQ ID NO 6455
atggcgtcgacaccagaatgggacatggtcgatgagacttataagactattgacaagatactcgctaagcaaaatggtggttttgcacacgccaaagactccatacctattctacctgaggctagcatcaattgcaaaataaccgctcaaacaacaaatctgccgtatttctcgattccactcaaggagaccgaaacaattgctgccctcaagtgcgttgaaggcctaatggcgcgagctctctacaatcagcgttgtaaagaccaactccccgaggcattcgacgaagcgaatacacccgtagaagtaaatcttgagcatgttactaatttcatgatgcaatcatatgcgacttgcttccatgaacaggtcggcggtgggttcttaggaggatcatttggcaaacttagcaaagtaggaaaggatttcatgatgcaaaaggaatatgacaccgatctcaatcatgcgcaatccgacgagaaatatcgattgctgggcgcaatctatccgactgccgaacctaagaaggggcacgcggaatgtcatgctcatgttcatcaatctctgaccgcgaaaccgacagcagagaccctaggccttacacaagaaaaccacgacagtcttgagccagaagaatatcgcgacatgataaagcagctagttaaaacgaaaacggcacgtgattgggatgacttattcattgaaaagggggaagctggcgtcatggtgatgagacaggataaattcctggagacaaaccacggccaagttactaatgcccgcctgccatggacggtggagagagttggcaaaagcaacaacccgtataaactaccgttgcttagtagaccaaatggacgaccactcgaaggcgtaaaagtcattgaattttgtcgtatcatcgctgggcctactgtgggacgcatcctagcggaatatggagcagacgtgatcaaaatcaccaacccagatattccggatgtcccttggtttcaagttgatgtcaacatgggtaagaaatgcttgcccctgaatctcaaagacgaaggccaccagaaatatttctgcgagaaattgatcgggcaagccgatatcattctggacggcaataggccaggggctattccaaggttactcggtaagattttcggtgtcgggaaagagaacttgggagacaaagaggcaatagactcagtccatctgctcctgaagaacttgaaagacaagtatcatagggattatgtctacgtgacggagaactgttttggccattatggtgactggaagaaccgcagaggctggcagcagattgccgactgcgtgactggtgttgcgatgatacaaggggctttcatgttcccgacaaaaaacgaaccgcttgttcctccgttcccgatctcagactacggtacggcatgcatgggcgccatcgcggccctcgctgggctcttcaatcgacaaactaagggtggatcgtggattggcaaaacctcccttgtgcagtatgatttgctgcttctcgctcacgaaccataccctcaaaacgttcaatctgagctcctaaaaagagctcagaaaagagacaggatacctaactcatactattcagatctccattttggagtcggtattcagaatcccaaagtgtggcctcggaatctggaatgctccagcagcgtcgacgaagtttctggagccttcttttataacatgctgtctcagtacagcgacattctgttcgatccaacactctcattttatgaattctggctgtcttacaattatgcgaaaaactcgaagcccttaattgtgcaggcagtcaagccagttgttcatattgagggacttgttattgagcatcagcgacaacctacacccaatgcaactgcatggctcgaactacagccggaagatatttggtcccaactcaagaacgagagggcagaatcagtggttgaggttgaatgggtggacaagacaatgaaaagacttcggctcaaggcacgaaagtaa

SEQ ID NO: 6455 - protein, 670 aa, Muscodor strobelii
  misc_feature: SGI Peptide ID NO. 561892
  misc_feature (56)..(639): NCBI GI: 240105551 Blast Desc: CAIB/BAIF family protein [Coccidioides posadasii C735 delta SOWgp]
  misc_feature (51)..(638): NCBI GI: 212527980 Blast Desc: CAIB/BAIF family enzyme [Penicillium marneffei ATCC 18224] gi|210073545|gb|EEA27632.1| CAIB/BAIF family enzyme [Penicillium marneffei ATCC 18224]
  misc_feature (51)..(629): NCBI GI: 39941338 Blast Desc: MGG_05580 [Magnaporthe grisea 70-15] gi|145022252|gb|EDK06272.1| MGG_05580 [Magnaporthe grisea 70-15]
  misc_feature (56)..(639): NCBI GI: 119193845 Blast Desc: CIMG_01297 [Coccidioides immitis RS]
  misc_feature (49)..(629): NCBI GI: 46115648 Blast Desc: FG03666.1 [Gibberella zeae PH-1]
  misc_feature (51)..(629): NCBI GI: 242785232 Blast Desc: CAIB/BAIF family enzyme [Talaromyces stipitatus ATCC 10500] gi|218720700|gb|EED20119.1| CAIB/BAIF family enzyme [Talaromyces stipitatus ATCC 10500]
  misc_feature (56)..(638): NCBI GI: 255954147 Blast Desc: Pc21g07860 [Penicillium chrysogenum Wisconsin 54-1255] gi|211589537|emb|CAP95683.1| Pc21g07860 [Penicillium chrysogenum Wisconsin 54-1255]
  misc_feature (53)..(629): NCBI GI: 115389534 Blast Desc: conserved [Aspergillus terreus NIH2624] gi|114194668|gb|EAU36368.1| conserved [Aspergillus terreus NIH2624]
  misc_feature (56)..(629): NCBI GI: 238503924 Blast Desc: CAIB/BAIF family enzyme [Aspergillus flavus NRRL3357] gi|220690665|gb|EED47014.1| CAIB/BAIF family enzyme [Aspergillus flavus NRRL3357]
  misc_feature (56)..(629): NCBI GI: 145255154 Blast Desc: An18g04200 [Aspergillus niger] gi|134084467|emb|CAK43222.1| protein product [Aspergillus niger]
MASTPEWDMVDETYKTIDKILAKQNGGFAHAKDSIPILPEASINCKITAQTTNLPYFSIPLKETETIAALKCVEGLMARALYNQRCKDQLPEAFDEANTPVEVNLEHVTNFMMQSYATCFHEQVGGGFLGGSFGKLSKVGKDFMMQKEYDTDLNHAQSDEKYRLLGAIYPTAEPKKGHAECHAHVHQSLTAKPTAETLGLTQENHDSLEPEEYRDMIKQLVKTKTARDWDDLFIEKGEAGVMVMRQDKFLETNHGQVTNARLPWTVERVGKSNNPYKLPLLSRPNGRPLEGVKVIEFCRIIAGPTVGRILAEYGADVIKITNPDIPDVPWFQVDVNMGKKCLPLNLKDEGHQKYFCEKLIGQADIILDGNRPGAIPRLLGKIFGVGKENLGDKEAIDSVHLLLKNLKDKYHRDYVYVTENCFGHYGDWKNRRGWQQIADCVTGVAMIQGAFMFPTKNEPLVPPFPISDYGTACMGAIAALAGLFNRQTKGGSWIGKTSLVQYDLLLLAHEPYPQNVQSELLKRAQKRDRIPNSYYSDLHFGVGIQNPKVWPRNLECSSSVDEVSGAFFYNMLSQYSDILFDPTLSFYEFWLSYNYAKNSKPLIVQAVKPVVHIEGLVIEHQRQPTPNATAWLELQPEDIWSQLKNERAESVVEVEWVDKTMKRLRLKARK

SEQ ID NO: 6456 - DNA, 597 bp, Muscodor strobelii
  misc_feature: SGI EST ID NO. CUFF.16128.0
  misc_feature: Variant of the nucleotide sequence at SEQ ID NO 6454
cttaggaggatcatttggcaaacttagcaaagtaggaaaggatttcatgatgcaaaaggaatatggtaaatcgaaagcgtcacatgagtttcatgcaaaatatcaagtaagctgacttgatgcctcaagacaccgatctcaatcatgcgcaatccgacgagaaatatcgattgctgggcgcaatctatccgactgccgaacctaagaaggggcacgcggaatgtcatgctcatgttcatcaatctctgaccgcgaaaccgacagcagagaccctaggccttacacaagaaaaccacgacagtcttgagccagaagaatatcgcgacatgataaagcagctagttaaaacgaaaacggcacgtgattgggatgacttattcattgaaaagggggaagctggcgtcatggtgatgagacaggataaattcctggagacaaaccacggccaagttactaatgcccgcctgccatggacggtggagagagttggcaaaagcaacaacccgtataaactaccgttgcttagtagaccaaatggacgaccactcgaaggcgtaaaagtcattgaattttgtcgtatcatcgctgggcctactg

SEQ ID NO: 6457 - DNA, 1098 bp, Muscodor strobelii
  misc_feature: SGI cDNA ID NO. 561893
  misc_feature: Elevated expression when VOC is produced
  misc_feature: Encodes the peptide sequence at SEQ ID NO 6458
atggttctcggaacagcgcaacggcctacgtggccggacgtggcgtcctttcggaggacggcagatgttcagctcgggtcgcctttcttcggccgccttcctctcgagatccgggagatgatctacgcggaatgtttcgtctcctcgggaccgaaacaacacgtctttctaagccgtcacgatggtcgtctcacccactcgccatgtattctcgagcctggagatcacgatacgcgaaatgatgaaatacaacgcctgatgtttcagcagggccaaaaccgacgagggtctcgatctcggtcgtccctcactgttgatgagcgttggaacgcgcggttctcatcttcctggcatgaacactggcgatgcgaagaagcaatgacggcgagcagtcctgaacacgggcattaccgtccaccgcgaacgctattcttgccgttgctgttactttgcaaacaaacatatatcgaggccttcgatcatctctattcatccgcaaccctggtcttcacagatcttgaagcagcccaccgttttctcctatccacatccagcaagattccagcttctttgctacggtcagtggacttctctctcgccctgtcctaccagactcttcatgagcaacgaatgcacgatatcccttcgcaatgcaatgggccatgggcacaactatgtaccaaactatcagacctagcacggtttgcttcactacgtactgtgacgatccgtctagaccttaagagcgatacgggcgatgaagcgggagattggtggcgcgttaatgaacgatgggctctttgcgcgatacgtggaattctggcccgtcgcctcactgtatatttgccagacgtagctcatcctgattggtctcgaaagttccagtatgttgagggtgacgagacacccttccgacttgagagatatcagaagatgcgctgggtttctgtaggtgatggtcggcacgttgagtctttagttgatcttcccaagaagagttcctcggatgggaggtcaagggaatccagcaagaatcgacttaataaggcgaaggagggattgaaaaacatggttgtcggtgtgcttgctgcacactga

SEQ ID NO: 6458 - protein, 365 aa, Muscodor strobelii
  misc_feature: SGI Peptide ID NO. 561893
  misc_feature (20)..(208): NCBI GI: 171691294 Blast Desc: protein product [Podospora anserina] gi|170945595|emb|CAP71708.1| protein product [Podospora anserina]
  misc_feature (13)..(308): NCBI GI: 116195296 Blast Desc: [Chaetomium globosum CBS 148.51] gi|88180159|gb|EAQ87627.1| [Chaetomium globosum CBS 148.51]
  misc_feature (20)..(180): NCBI GI: 256730086 Blast Desc: [Nectria haematococca mpVI 77-13-4]
  misc_feature (32)..(246): NCBI GI: 46139755 Blast Desc: FG11392.1 [Gibberella zeae PH-1]
  misc_feature (20)..(214): NCBI GI: 39960615 Blast Desc: MGG_09329 [Magnaporthe grisea 70-15] gi|145009433|gb|EDJ94118.1| [Magnaporthe grisea 70-15]
  misc_feature (21)..(177): NCBI GI: 261356028 Blast Desc: [Verticillium albo-atrum VaMs.102]
  misc_feature (34)..(314): NCBI GI: 256724271 Blast Desc: NECHADRAFT_87380 [Nectria haematococca mpVI 77-13-4]
  misc_feature (24)..(327): NCBI GI: 169621161 Blast Desc: SNOG_13788 [Phaeosphaeria nodorum SN15] gi|111057692|gb|EAT78812.1| SNOG_13788 [Phaeosphaeria nodorum SN15]
  misc_feature (107)..(308): NCBI GI: 169615871 Blast Desc: SNOG_11101 [Phaeosphaeria nodorum SN15] gi|111060480|gb|EAT81600.1| SNOG_11101 [Phaeosphaeria nodorum SN15]
  misc_feature: Useful for introducing or modulating the production of volatile compounds
MVLGTAQRPTWPDVASFRRTADVQLGSPFFGRLPLEIREMIYAECFVSSGPKQHVFLSRHDGRLTHSPCILEPGDHDTRNDEIQRLMFQQGQNRRGSRSRSSLTVDERWNARFSSSWHEHWRCEEAMTASSPEHGHYRPPRTLFLPLLLLCKQTYIEAFDHLYSSATLVFTDLEAAHRFLLSTSSKIPASLLRSVDFSLALSYQTLHEQRMHDIPSQCNGPWAQLCTKLSDLARFASLRTVTIRLDLKSDTGDEAGDWWRVNERWALCAIRGILARRLTVYLPDVAHPDWSRKFQYVEGDETPFRLERYQKMRWVSVGDGRHVESLVDLPKKSSSDGRSRESSKNRLNKAKEGLKNMVVGVLAAH

SEQ ID NO: 6459 - DNA, 2443 bp, Muscodor strobelii
  misc_feature: SGI EST ID NO. CUFF.16134.0
  misc_feature: Variant of the nucleotide sequence at SEQ ID NO 6457
agaccactcactgaaaatgtcctatcgagtgccgaaaatttcgaagaattgttgacagcgactaaaagcttagttgtggctcaaacaggtagaagcagaggatcttcgtccgagatcttgtctgggtgatgcagaacagctctgtggtctacgctgttggatacccgagatttacacattggaccgagatacaggtatgggtagcaagtagtagcacccaatgatagcaatatgagggtggtgggacggatgggatgggggcttgaaggaagcgggaaccaacgggagctaccggacttagtagcttttcttcagcccccaacactgtattatgcatgacgtgtttacgagaatgtctggtagaatggctggatcaatcgtcttcgaagagagaaatgctacagcagggaattaagaaccatctaacacaaataaatatgcttataggaggaggcggacagaaacacctcacgaacaagtcgccgccgcctatatgacgaacgatggtgaaccttacattttctggctgcgcgacttgattgacgggctgaatgcacctctataaactagagtccggcagtgcgcttattagcgatttacttgactctacatgatccgagccggaacatcgcccttcgaacttctctttacaatctagctctgtgttcggatagcagtctgggtccagtaggctgcctgattatcacatggtgcgctcccgacgttgccgtctgttggtcgtttttacacttcgcgcataatcgtcaggagaatagcgggccagcgttgcaacaccatcggcacgggcgtctctgcgcggttaagcagcccccatctgctgtcgccatcgggccaattgaacccgccattaggtgagtttcgcacagcaatcgtccacttgcttggaacgcaccgatcctgtgagatgctgactgccgttttcggttctatcattgcgcatgttggcgtctaccgaccagtcataggctgccgtcgccagtatcagaacgaggaaaccatggtttggctacagtagagctataatggctgcaggctacgatgcaggctctcgtagacgcagatgcgagaggcagtgtatgcctgggtagtaagctagacgggagggtagtacacagagtcctacagcaatgatggggttataaagacgctacagccttgtaggactctcgctcgttagttatgttggacgcttctcccaacatgaaatccaaaggaatccgttggtcctattattagtgatacgacgtgatggttctcggaacagcgcaacggcctacgtggccggacgtggcgtcctttcggaggacggcagatgttcagctcgggtcgcctttcttcggccgccttcctctcgagatccgggagatgatctacgcggaatgtttcgtctcctcgggaccgaaacaacacgtctttctaagccgtcacgatggtcgtctcacccactcgccatgtattctcgagcctggagatcacgatacgcgaaatgatgaaatacaacgcctgatgtttcagcagggccaaaaccgacgagggtctcgatctcggtcgtccctcactgttgatgagcgttggaacgcgcggttctcatcttcctggcatgaacactggcgatgcgaagaagcaatgacggcgagcagtcctgaacacgggcattaccgtccaccgcgaacgctattcttgccgttgctgttactttgcaaacaaacatatatcgaggccttcgatcatctctattcatccgcaaccctggtcttcacagatcttgaagcagcccaccgttttctcctatccacatccagcaagattccagcttctttgctacggtcagtggacttctctctcgccctgtcctaccagactcttcatgagcaacgaatgcacgatatcccttcgcaatgcaatgggccatgggcacaactatgtaccaaactatcagacctagcacggtttgcttcactacgtactgtgacgatccgtctagaccttaagagcgatacgggcgatgaagcgggagattggtggcgcgttaatgaacgatgggctctttgcgcgatacgtggaattctggcccgtcgcctcactgtatatttgccagacgtagctcatcctgattggtctcgaaagttccagtatgttgagggtgacgagacacccttccgacttgagagatatcagaagatgcgctgggtttctgtaggtgatggtcggcacgttgagtctttagttgatcttcccaagaagagttcctcggatgggaggtcaagggaatccagcaagaatcgacttaataaggcgaaggagggattgaaaaacatggttgtcggtgtgcttgctgcacactgagggcttagtaaatattatctctcacggaggtgagataggtgatcgtggaagcttacggaagtgctgcagacgctca

SEQ ID NO: 6460 - DNA, 921 bp, Muscodor strobelii
  misc_feature: SGI cDNA ID NO. 561894
  misc_feature: Encodes the peptide sequence at SEQ ID NO 6461
atgtatgagcaggatgacgaggatatggacttaattcagatgcacatggatctcgttcggcattcccgccatgcggtcaagggagatctactgcgctggcaaaggcggctggcttcgacatggggacatcggcattggaggtgtgaagagagggtagaatacgacaagccaagctcaatcgatcgaactggtcttggtgctttgatgttggtgtgcaagaagatgtatcctgaagtgatggaatccttcgtcgaaagccacaaatttatcttcaatgatttatttccggcgtaccgattcttcgtgcagcctggctcgcctcatctcagtcatatgcgcgagctagacctcacgttcagtgttgctttccatgaattcgcgccgtttctcgccattggccagacggagaccgacaacagcgataaacaggctacactagcagaggcccagaactccagattaggcgccatcttcagcacagttgcgaaacagatcacctgtctacacagcttacgagtgtcactcgatatttatgaccgaggtccatggcggaaaatacccgaacgcatcgtatctgcacagctgcttgaacagatccgagtcttgaggaataggcagggcgagtgtaattacacagtcgaattaccacctgcgctacctattagaacccactacagcggcatgcagtatattgaggatgccaatgtgggagaagaagatgaggccactagggtgcagttgcctttccgaatcatacggcgaccggccctgcggtattggcaattcaacccaggcgacgtcgaacactttacatgggaaacgtgcgacggcgaaaaacaacaacaacactgctggattgtgttgagcaagcaggcaaggctcatctcgaatccatacctggtcgatttttccaaccgatag

SEQ ID NO: 6461 - protein, 306 aa, Muscodor strobelii
  misc_feature: SGI Peptide ID NO. 561894
  misc_feature (33)..(185): NCBI GI: 171691294 Blast Desc: protein product [Podospora anserina] gi|170945595|emb|CAP71708.1| protein product [Podospora anserina]
MYEQDDEDMDLIQMHMDLVRHSRHAVKGDLLRWQRRLASTWGHRHWRCEERVEYDKPSSIDRTGLGALMLVCKKMYPEVMESFVESHKFIFNDLFPAYRFFVQPGSPHLSHMRELDLTFSVAFHEFAPFLAIGQTETDNSDKQATLAEAQNSRLGAIFSTVAKQITCLHSLRVSLDIYDRGPWRKIPERIVSAQLLEQIRVLRNRQGECNYTVELPPALPIRTHYSGMQYIEDANVGEEDEATRVQLPFRIIRRPALRYWQFNPGDVEHFTWETCDGEKQQQHCWIVLSKQARLISNPYLVDFSNR

SEQ ID NO: 6462 - DNA, 2105 bp, Muscodor strobelii
  misc_feature: SGI EST ID NO. CUFF.16144.1
  misc_feature: Variant of the nucleotide sequence at SEQ ID NO 6460
ggctggaggtgggcacatgaggggcgcatgtatcttgtcttacatggctgacctcgtgctgtcaataagcctcaaatgaatccttcccaataagtgagtttatgtaaacatgtatcacctaagctagccaccaacatgaatcgtcaatgcacttgattcggattcgaaatagggctgaacctggtagataaacgtggtttctcccctcgacctggcgtcgttttgatcgttatgtttctgctcctactacagttatactgcacacgtcgtgtgttcggacagattattacctaataccacgaccatggcgctcggattctcatcacgagtgaagtcatatcttcgccctaagttatataaaagatcaagatctagcaactccaactcaacatgcagcgacacaaacaagagggtatgtacggtatcaacaaagccaacagtcgatgcacgatcgtccatagaacgagaggaaagagcaactccaaattctgcaatattcgacgagcaggttggcagcgacctgctccaaaagctacccctggagcttcggaagatggtgtatgcccacgtgtggcagggggctaacgatcacatgtaccacgaacctagaggtcgacacctacatttcaaagatggtcattggatccatactcgctgtgtcatgtatgagcaggatgacgaggatatggacttaattcagatgcacatggatctcgttcggcattcccgccatgcggtcaagggagatctactgcgctggcaaaggcggctggcttcgacatggggacatcggcattggaggtgtgaagagagggtagaatacgacaagccaagctcaatcgatcgaactggtcttggtgctttgatgttggtgtgcaagaagatgtatcctgaagtgatggaatccttcgtcgaaagccacaaatttatcttcaatgatttatttccggcgtaccgattcttcgtgcagcctggctcgcctcatctcagtcatatgcgcgagctagacctcacgttcagtgttgctttccatgaattcgcgccgtttctcgccattggccagacggagaccgacaacagcgataaacaggctacactagcagaggcccagaactccagattaggcgccatcttcagcacagttgcgaaacagatcacctgtctacacagcttacgagtgtcactcgatatttatgaccgaggtccatggcggaaaatacccgaacgcatcgtatctgcacagctgcttgaacagatccgagtcttgaggaataggcagggcgagtgtaattacacagtcgaattaccacctgcgctacctattagaacccactacagcggcatgcagtatattgaggatgccaatgtgggagaagaagatgaggccactagggtgcagttgcctttccgaatcatacggcgaccggccctgcggtattggcaattcaacccaggcgacgtcgaacactttacatgggaaacgtgcgacggcgaaaaacaacaacaacactgctggattgtgttgagcaagcaggcaaggctcatctcgaatccatacctggtcgatttttccaaccgatagagaagagagcgggcgccaacaaacgtggcctcaatttgagtgtcacaggcgatttctcttggctgccttgcgttgtcgcattgtagagctctcagaaggcggggagtgagtcaacaaggattgcctggcgacatgcacagctatcctaggggaagatctggctgtttgaaggctgttggtgcaggggttttagaggcgcatgcgttagcctgcagatattcggcggagatcacatggatgtctggttgagactgtaagcataaccacctcgccagctgatcagggataggaagtagcatctattcgtttgccctaaacataatcgtgtacagttacaccgtaaaatggcacctccctaagtgctctcagagaatgtgctgagagtacctatgtaaattaatataattcatcaaagttcggaactgtagtattttagacaagacgtgcgaagtaggtagtctatgtttcagaagcgcgtaaagtcagtcgttcctaaggaggtgtagaattttataggcatgac

SEQ ID NO: 6463 - DNA, 714 bp, Muscodor strobelii
  misc_feature: SGI cDNA ID NO. 561895
  misc_feature: Encodes the peptide sequence at SEQ ID NO 6464
atgtctaccatccctcctggaggttacaattatgcttcacagggttggaacgcaggctacggactgcgaaacgaggtcggccttgcatttgacggaaacgcaatgctttggggcgttgagaacagcgccgataaccttgcccgcacagtagatggtaaaacaactgatgttcataaggacaatccttcggaagagctcaactacattggtgatatctcatctgctgccgatagattttacggatacccaatgtgtttcacggtcggagatccaagtgaattcccggatcaaggctttcaagtcggccaacaatttgtacaaacaccaacaccatatttcaacgatagcacatgcgctgcaatctccataccacccattcttagtctacccgcgcattccgcaccactcggctgcgaatttgacgccttatacggcaacctctttgtcgcgatgcatggtagttgggacagagatccaccgacaggatacaaagtggtcgcgctaccattcaccaaacacgcagaaggttattatgctccagtcttcgctccatggagtactcaaaacaccatcgaggttttctatccgccagacgagagccaatgctcgtcatcttcgtgcattcgacctgtgggcttggcattcgatgcgaagggtcgcttgttcgtgactagcgatacttctggagagatctatgtgttatcgactggatga

SEQ ID NO: 6464 - protein, 237 aa, Muscodor strobelii
  misc_feature: SGI Peptide ID NO. 561895
  misc_feature (1)..(234): NCBI GI: 189203559 Blast Desc: conserved [Pyrenophora tritici-repentis Pt-1C-BFP] gi|187985214|gb|EDU50702.1| conserved [Pyrenophora tritici-repentis Pt-1C-BFP]
  misc_feature (1)..(234): NCBI GI: 169602517 Blast Desc: SNOG_04262 [Phaeosphaeria nodorum SN15] gi|160706189|gb|EAT88022.2| SNOG_04262 [Phaeosphaeria nodorum SN15]
  misc_feature (1)..(195): NCBI GI: 169604130 Blast Desc: SNOG_05075 [Phaeosphaeria nodorum SN15] gi|111066346|gb|EAT87466.1| SNOG_05075 [Phaeosphaeria nodorum SN15]
  misc_feature (5)..(235): NCBI GI: 116200510 Blast Desc: CHGG_10800 [Chaetomium globosum CBS 148.51] gi|88175514|gb|EAQ82982.1| CHGG_10800 [Chaetomium globosum CBS 148.51]
  misc_feature (4)..(235): NCBI GI: 169862697 Blast Desc: CC1G_09525 [Coprinopsis cinerea okayama7#130] gi|116500961|gb|EAU83856.1| CC1G_09525 [Coprinopsis cinerea okayama7#130]
  misc_feature (2)..(234): NCBI GI: 169862695 Blast Desc: CC1G_09524 [Coprinopsis cinerea okayama7#130] gi|116500960|gb|EAU83855.1| CC1G_09524 [Coprinopsis cinerea okayama7#130]
  misc_feature (1)..(235): NCBI GI: 169862645 Blast Desc: CC1G_09499 [Coprinopsis cinerea okayama7#130] gi|116500935|gb|EAU83830.1| CC1G_09499 [Coprinopsis cinerea okayama7#130]
  misc_feature (19)..(235): NCBI GI: 169862693 Blast Desc: CC1G_09523 [Coprinopsis cinerea okayama7#130] gi|116500959|gb|EAU83854.1| CC1G_09523 [Coprinopsis cinerea okayama7#130]
  misc_feature (1)..(237): NCBI GI: 169862683 Blast Desc: CC1G_09518 [Coprinopsis cinerea okayama7#130] gi|116500954|gb|EAU83849.1| CC1G_09518 [Coprinopsis cinerea okayama7#130]
  misc_feature (1)..(234): NCBI GI: 258571069 Blast Desc: [Uncinocarpus reesii 1704] gi|237904608|gb|EEP79009.1| [Uncinocarpus reesii 1704]
MSTIPPGGYNYASQGWNAGYGLRNEVGLAFDGNAMLWGVENSADNLARTVDGKTTDVHKDNPSEELNYIGDISSAADRFYGYPMCFTVGDPSEFPDQGFQVGQQFVQTPTPYFNDSTCAAISIPPILSLPAHSAPLGCEFDALYGNLFVAMHGSWDRDPPTGYKVVALPFTKHAEGYYAPVFAPWSTQNTIEVFYPPDESQCSSSSCIRPVGLAFDAKGRLFVTSDTSGEIYVLSTG

SEQ ID NO: 6465 - DNA, 1635 bp, Muscodor strobelii
  misc_feature: SGI cDNA ID NO. 561896
  misc_feature: Encodes the peptide sequence at SEQ ID NO 6466
atggcgccctcgcagaacggcgttggcagtcacaacttcaaccagcacgccatcacgcacagccaagaacagaccccagccacgcgagcccagtctcaaggaccgctaacattctacaatcacgggcatagtctaagtcccgcccttcccatcaatccaatgcgaagtcccgcattccctccatatcctcaccaccacccctccataccagagcctcttgcgtacagctatgcccaaaggcccgccgcccaaaggcccgccacccaaaggcccgccacccaaaggcccgccacccaaaggcccgccacccatgtacagccccatgaaaatgcggctttcttccacagcggatacagccagagtcctcgcatgtgccttgagcagaatcacctagtccagaacgacatcatgtcagaggttcagtcgcccggacagtttagtatcaacatgccacaaggcgcgccccggttccccctagctcccccgcaaccagttcctaccatgcagctgcatcatgcaggcctgcccacccacatagccgaccagcacgctgctaagcagcagcagaagcgtcttcactctgcacccgccctggcaaagaagggcggaaagaagagaaaggcggcaaagaaggagggtcacattcctcgaccttcgaataaatggattctttaccgcgcatcgcgtcatcacgagatcgcgaaacaatacaagggaatcacgaatgctcagatttcaactattatcagccaagagtggaaacaaatgtctgacgacgagaagagaatgtgggttgataaagccgacgttctacgagcggagcacaagagagagcatccgaactacaaatataagccgggaccgaccaagcgccgcaatgatcatgtgatggcggttgatgaacgacaaccggaagtgaaccgtcaagagtcgagtatcaatgagatccgaccttcggcgctggtcaatcatggacacaatcagattaattaccatggagaacaaccccacatcaatgggtttcaacgaagccaacacgtcgccgccgccatcagcacggccgagcaggctccccgaatgtccgactctccgggagaggtttattcccgcccctccaattcgagcgttgtgggacatgatctagatcctatctttgacaacggcgagggcatcaccgtcaatgacacagccgagcaggttcctcagatgtccaattctctgagcgaggtctatccctacttctctaattcgatcggcatgggagatgactcagattctctcttcgacgacggcgaggacgtcgctgccatcagcacagtcgagcaggtccttcaaatgtccggctccccggatgaggcatatcccagcctttccaattcgagcgttgttggagatgatctagattccctcttcgacgaaggtgaagacatcgctctcaccactgatcccactgtcaccgaggccgcacctttcgactatatggccgacctggacaatcttctcaccaaccaggattgtggtactaccacggatgccggtgaccatcaggacgacttcggtcaggacttcgctaaggacatggagtacatcaacagtttggacttcaccaaggctttttccaatgatagccagtaa

SEQ ID NO: 6466 - protein, 544 aa, Muscodor strobelii
  misc_feature: SGI Peptide ID NO. 561896
  misc_feature (215)..(283): Pfam Id: PF00505 Pfam Desc: HMG (high mobility group) box
  misc_feature (197)..(339): NCBI GI: 156056551 Blast Desc: SS1G_04006 [Sclerotinia sclerotiorum 1980] gi|73762564|gb|AAZ83720.1| mating type 2 protein [Sclerotinia sclerotiorum] gi|154701792|gb|EDO01531.1| SS1G_04006 [Sclerotinia
  misc_feature (194)..(284): NCBI GI: 95113628 Blast Desc: MAT1-1-3 [Claviceps purpurea]
  misc_feature (207)..(298): NCBI GI: 238915465 Blast Desc: MAT1-1-3 [Hypocrea jecorina]
  misc_feature (216)..(292): NCBI GI: 63253687 Blast Desc: MAT-2 [Pyrenophora teres]
  misc_feature (216)..(292): NCBI GI: 113876786 Blast Desc: MAT-2 [Pyrenophora graminea]
  misc_feature (216)..(292): NCBI GI: 63253681 Blast Desc: MAT-2 [Pyrenophora teres] gi|113876774|gb|ABI37058.1| MAT-2 [Pyrenophora teres f. maculata] gi|113876776|gb|ABI37059.1| MAT-2 [Pyrenophora teres f. maculata] gi|113876778|gb|ABI37060.1|
  misc_feature (216)..(292): NCBI GI: 113876789 Blast Desc: MAT-2 [Pyrenophora graminea]
  misc_feature (216)..(292): NCBI GI: 63253679 Blast Desc: MAT-2 [Pyrenophora teres] gi|113876756|gb|ABI37049.1| MAT-2 [Pyrenophora teres f. teres] gi|113876758|gb|ABI37050.1| MAT-2 [Pyrenophora teres f. teres] gi|113876760|gb|ABI37051.1| f.
  misc_feature (201)..(341): NCBI GI: 157111610 Blast Desc: sex-determining region y protein, sry [Aedes aegypti] gi|108883819|gb|EAT48044.1| sex-determining region y protein, sry [Aedes aegypti]
  misc_feature (195)..(292): NCBI GI: 30171186 Blast Desc: mating-type protein MAT1-2 [Leptosphaeria maculans]
MAPSQNGVGSHNFNQHAITHSQEQTPATRAQSQGPLTFYNHGHSLSPALPINPMRSPAFPPYPHHHPSIPEPLAYSYAQRPAAQRPATQRPATQRPATQRPATHVQPHENAAFFHSGYSQSPRMCLEQNHLVQNDIMSEVQSPGQFSINMPQGAPRFPLAPPQPVPTMQLHHAGLPTHIADQHAAKQQQKRLHSAPALAKKGGKKRKAAKKEGHIPRPSNKWILYRASRHHEIAKQYKGITNAQISTIISQEWKQMSDDEKRMWVDKADVLRAEHKREHPNYKYKPGPTKRRNDHVMAVDERQPEVNRQESSINEIRPSALVNHGHNQINYHGEQPHINGFQRSQHVAAAISTAEQAPRMSDSPGEVYSRPSNSSVVGHDLDPIFDNGEGITVNDTAEQVPQMSNSLSEVYPYFSNSIGMGDDSDSLFDDGEDVAAISTVEQVLQMSGSPDEAYPSLSNSSVVGDDLDSLFDEGEDIALTTDPTVTEAAPFDYMADLDNLLTNQDCGTTTDAGDHQDDFGQDFAKDMEYINSLDFTKAFSNDSQ

SEQ ID NO: 6467 - DNA, 2059 bp, Muscodor strobelii
  misc_feature: SGI EST ID NO. CUFF.16172.0
  misc_feature: Variant of the nucleotide sequence at SEQ ID NO 6465
ccctcgcagaacggcgttggcagtcacaacttcaaccagcacgccatcacgcacagccaagaacagaccccagccacgcgagcccagtctcaaggaccgctaacattctacaatcacgggcatagtctaagtcccgcccttcccatcaatccaatgcgaagtcccgcattccctccatatcctcaccaccacccctccataccagagcctcttgcgtacagctatgcccaaaggcccgccgcccaaaggcccgccacccaaaggcccgccacccaaaggcccgccacccaaaggcccgccacccatgtacagccccatgaaaatgcggctttcttccacagcggatacagccagagtcctcgcatgtgccttgagcagaatcacctagtccagaacgacatcatgtcagaggttcagtcgcccggacagtttagtatcaacatgccacaaggcgcgccccggttccccctagctcccccgcaaccagttcctaccatgcagctgcatcatgcaggcctgcccacccacatagccgaccagcacgctgctaagcagcagcagaagcgtcttcactctgcacccgccctgggtaatgagactcgggactaggagcccgaatctcagccagagacggtgcagcatcaagcaaagaagggcggaaagaagagaaaggcggcaaagaaggagggtcacattcctcgaccttcgaataaatggattctttaccgcgcatcgcgtcatcacgagatcgcgaaacaatacaagggaatcacgaatgctcagatttcaactattatcagccaagagtggaaacaaatgtctgacgacgagaagagaatgtgggttgataaagccgacgttctacgagcggagcacaagagagagcatccgaactacaaatataagccgggaccgaccaagcgccgcaatgatcatgtgatggcggttgatgaacgacaaccggaagtgaaccgtcaagagtcgagtatcaatgagatccgaccttcggcgctggtcaatcatggacacaatcagattaattaccatggagaacaaccccacatcaatgggtttcaacgaagccaacacgtcgccgccgccatcagcacggccgagcaggctccccgaatgtccgactctccgggagaggtttattcccgcccctccaattcgagcgttgtgggacatgatctagatcctatctttgacaacggcgagggcatcaccgtcaatgacacagccgagcaggttcctcagatgtccaattctctgagcgaggtctatccctacttctctaattcgatcggcatgggagatgactcagattctctcttcgacgacggcgaggacgtcgctgccatcagcacagtcgagcaggtccttcaaatgtccggctccccggatgaggcatatcccagcctttccaattcgagcgttgttggagatgatctagattccctcttcgacgaaggtgaagacatcgctctcaccactgatcccactgtcaccgaggccgcacctttcgactatatggccgacctggacaatcttctcaccaaccaggattgtggtactaccacggatgccggtgaccatcaggacgacttcggtcaggacttcgctaaggacatggagtacatcaacagtttggacttcaccaaggctttttccaatgatagccagtaactctaattctacggatcttcctacgactatgatctgaacggcttgcatcctgagccagctaccacagactttggctagcggcgtcttcagctttcagaacaatttcactagcaatgctccggctaggggcgagcaacgaaccatgtaacacggggcatttggatgtgtctagggcacactgaacaattgacagcaagatcattgacgatcttgcattggcagcttttctggcatgagaagttttgcctatgaagctcaggatatatttcaggaaatttggacgaaaaaaaattcaaaacaaaaaaccctcaaaaagacgtctcaagggacgctgtatattacccaccaaaaaatgtacatttctagataccag

SEQ ID NO: 6468 - DNA, 1545 bp, Muscodor strobelii
  misc_feature: SGI cDNA ID NO. 561897
  misc_feature: Encodes the peptide sequence at SEQ ID NO 6469
atgcctcccaacaacggtatacctctttccagtctgtctgcgccggtgaaccccaaggacccgagatctcgttctaagtcaccaggagatgtcgccgatcacagctactccattccgcccgacttcaacatagacgacctgtccgacgacgacgacgcagaccacctagacaacatgtcagacaagggcagagcctccttacagcgtggccactcgagcctgccactcctccacaaagaagacaacgtcgacgacgatgaccaagagcgcggccgcacctcgtacctacacgatcctgccctcgcaacatccactgcccggcctcggcctcctttgctctctcgcaactcgacgatgcgctctcgctcgcccgacgcatcggcccgcatggcagcccgcaagaagtacaccctctccgccatcttcctcgtcatcaccctcgtctccttctgcctgcagaccgagctgggccgctacgtgcagcacgagctcggatggaacaaggcatactgcatgctgtacctgactcacggctcctggtccatactgtggcctacccagcttctgatcctgcgcgtgcagaagtggaacatgccgtggagtactttctggcgccgccatctgtatatcctgcgcagcacggcgcacatggtcgccgagcagcaactcgacgtcccgcgccaggtgctccagcgcagcccgtggccctacgtcatccgcaccaccgccttcgttaccagcgccctgacgattgcgggtctgagctggtacgtcgcagtcagtatgacgagcccgagcgatctgaccgccatctacaactgctctgccttcttcgcctacgccttcagcgtgccgctgctgaaagagaagcttcggctcgacaagtcgcttgctgtcctcgtcgccatcgtcggtgtgctgatcgtcgcgtacggcgactcgcgcgagtcgtctgctggaggcgccaaggaggcaggtgcgcgcttcctgggaaatctgatcatcggcgctggcagtgtgctctacggattgtacgaggtgctgtataagcggtacgcgtgtccacccgagggtacgtctgcgagccgtggtgtcatctttgccaatacctttggcagttgcgtgggcttgttcacgttacttgttctttggattccgttgccacttcttcacatccttggatgggagacctttgagctacccacaggcaagacggcgctatatctctggctctccgtcatattgaatgcaacgtttgcaggcagtttcctggtgctcatctctcttaccagccctgtcctgagctctgtcgctgcactgctgacgatatttatcgttgcggtcgcagattggctcctgacaggcgtagcactgagcttcgcggcactggtaggcggcgtgctaatcatcgtcgcattccttgtgctgagctggagcacctggcgcgagatgacggaggatgcgaaacatgcacaggcgcaatatagcgaggcgcctgttgactggagtgatgaggagtcggacaaggatgataggaggctatag

SEQ ID NO: 6469 - protein, 514 aa, Muscodor strobelii
  misc_feature: SGI Peptide ID NO. 561897
  misc_feature (251)..(311): Pfam Id: PF00892 Pfam Desc: Integral membrane protein DUF6
  misc_feature (64)..(511): NCBI GI: 154294240 Blast Desc: BC1G_13806 [Botryotinia fuckeliana B05.10] gi|150844816|gb|EDN20009.1| BC1G_13806 [Botryotinia fuckeliana B05.10]
  misc_feature (50)..(492): NCBI GI: 156066079 Blast Desc: SS1G_01051 [Sclerotinia sclerotiorum 1980] gi|154691909|gb|EDN91647.1| SS1G_01051 [Sclerotinia sclerotiorum 1980]
  misc_feature (59)..(492): NCBI GI: 145604248 Blast Desc: MGG_13948 [Magnaporthe grisea 70-15] gi|145012282|gb|EDJ96938.1| MGG_13948 [Magnaporthe grisea 70-15]
  misc_feature (56)..(510): NCBI GI: 256731822 Blast Desc: NECHADRAFT_104536 [Nectria haematococca mpVI 77-13-4]
  misc_feature (64)..(511): NCBI GI: 242774654 Blast Desc: DUF6 domain protein, [Talaromyces stipitatus ATCC 10500] gi|218722103|gb|EED21521.1| DUF6 domain protein, [Talaromyces stipitatus ATCC 10500]
  misc_feature (15)..(488): NCBI GI: 46137399 Blast Desc: FG10215.1 [Gibberella zeae PH-1]
  misc_feature (114)..(501): NCBI GI: 255937151 Blast Desc: Pc13g11850 [Penicillium chrysogenum Wisconsin 54-1255] gi|211584222|emb|CAP92254.1| Pc13g11850 [Penicillium chrysogenum Wisconsin 54-1255]
  misc_feature (55)..(510): NCBI GI: 171676575 Blast Desc: protein product [Podospora anserina] gi|170936354|emb|CAP61012.1| protein product [Podospora anserina]
  misc_feature (64)..(509): NCBI GI: 226290490 Blast Desc: conserved [Paracoccidioides brasiliensis Pb18]
  misc_feature (63)..(501): NCBI GI: 119495273 Blast Desc: NFIA_012170 [Neosartorya fischeri NRRL 181] gi|119412587|gb|EAW22528.1| conserved [Neosartorya fischeri NRRL 181]
MPPNNGIPLSSLSAPVNPKDPRSRSKSPGDVADHSYSIPPDFNIDDLSDDDDADHLDNMSDKGRASLQRGHSSLPLLHKEDNVDDDDQERGRTSYLHDPALATSTARPRPPLLSRNSTMRSRSPDASARMAARKKYTLSAIFLVITLVSFCLQTELGRYVQHELGWNKAYCMLYLTHGSWSILWPTQLLILRVQKWNMPWSTFWRRHLYILRSTAHMVAEQQLDVPRQVLQRSPWPYVIRTTAFVTSALTIAGLSWYVAVSMTSPSDLTAIYNCSAFFAYAFSVPLLKEKLRLDKSLAVLVAIVGVLIVAYGDSRESSAGGAKEAGARFLGNLIIGAGSVLYGLYEVLYKRYACPPEGTSASRGVIFANTFGSCVGLFTLLVLWIPLPLLHILGWETFELPTGKTALYLWLSVILNATFAGSFLVLISLTSPVLSSVAALLTIFIVAVADWLLTGVALSFAALVGGVLIIVAFLVLSWSTWREMTEDAKHAQAQYSEAPVDWSDEESDKDDRRL

SEQ ID NO: 6470 - DNA, 2810 bp, Muscodor strobelii
  misc_feature: SGI EST ID NO. CUFF.16487.1
  misc_feature: Variant of the nucleotide sequence at SEQ ID NO 6468
tgcagactgacgcaggcgcgtgcttgcgccccctggatcaccccgaaccatgggggcggatctaatctgtcatttcgaggaatggaatgcaacattttcgacgttcttcactctgacttctcacctcctagcgtcacacttttctatcgtaattctgagcctcactgctacccacggcaactcctgcaaccggccgcgacgagcgagacggatgacgcgatatctgtaggttttcaattgcatctggagaccccacgcccccgtgcagctgcatacatccaggcctcgaaatagcatggcacgctgagaaccactcacactcgcactctcgaacttatcaaacttatcgacttatctgtacatgtgcatgcgcccgtcggccgtctgacctcgaagtcactcaactctagtcactcctttgcacgccctcccttctgaaccgtctcattcgcccggtgcgccatcacgccatcgtctgcatcgcccaccggtgcagctcgttgtatattgtatattgttcttgtgtaaccttattgtaaacccttcgttatcgttcgcttctcttgatgcctcccaacaacggtatacctctttccagtctgtctgcgccggtgaaccccaaggacccgagatctcgttctaagtcaccaggagatgtcgccgatcacagctactccattccgcccgacttcaacatagacgacctgtccgacgacgacgacgcagaccacctagacaacatgtcagacaagggcagagcctccttacagcgtggccactcgagcctgccactcctccacaaagaagacaacgtcgacgacgatgaccaagagcgcggccgcacctcgtacctacacgatcctgccctcgcaacatccactgcccggcctcggcctcctttgctctctcgcaactcgacgatgcgctctcgctcgcccgacgcatcggcccgcatggcagcccgcaagaagtacaccctctccgccatcttcctcgtcatcaccctcgtctccttctgcctgcagaccgagctgggccgctacgtgcagcacgagctcggatggaacaaggcatactgcatgctgtacctgactcacggctcctggtccatactgtggcctacccagcttctgatcctgcgcgtgcagaagtggaacatgccgtggagtactttctggcgccgccatctgtatatcctgcgcagcacggcgcacatggtcgccgagcagcaactcgacgtcccgcgccaggtgctccagcgcagcccgtggccctacgtcatccgcaccaccgccttcgttaccagcgccctgacgattgcgggtctgagctggtacgtcgcagtcagtatgacgagcccgagcgatctgaccgccatctacaactgctctgccttcttcgcctacgccttcagcgtgccgctgctgaaagagaagcttcggctcgacaagtcgcttgctgtcctcgtcgccatcgtcggtgtgctgatcgtcgcgtacggcgactcgcgcgagtcgtctgctggaggcgccaaggaggcaggtgcgcgcttcctgggaaatctgatcatcggcgctggcagtgtgctctacggattgtacgaggtgctgtataagcggtacgcgtgtccacccgagggtacgtctgcgagccgtggtgtcatctttgccaatacctttggcagttgcgtgggcttgttcacgttacttgttctttggattccgttgccacttcttcacatccttggatgggagacctttgagctacccacaggcaagacggcgctatatctctggctctccgtcatattgaatgcaacgtttgcaggcagtttcctggtgctcatctctcttaccagccctgtcctgagctctgtcgctgcactgctgacgatatttatcgttgcggtcgcagattggctcctgacaggcgtagcactgagcttcgcggcactggtaggcggcgtgctaatcatcgtcgcattccttgtgctgagctggagcacctggcgcgagatgacggaggatgcgaaacatgcacaggcgcaatatagcgaggcgcctgttgactggagtgatgaggagtcggacaaggatgataggaggctatagacgggctttgcgcgtatagaactagactgcttttctcttgtttggggatacatcggactcgggtcttgcgatgaccgtttgcatcgcgttgcatcgcattggattagggttgttatctattacggcattttcactcgggcttatcctggatcacactccatgatggaggggccgatggatactctacggcgtttggcgttggttacatatcacatgtcataagaatgcatggtatcgatattggtagatatagggcatttgctttgtgagggcagagaagcatgaaatggatgaattgggaggcgaatagctttgccttcattgattacatactttgaatcacaagtagtgtaaaagtacagatcaagtcatggcattcaatttgaatgcccattagacccaagtccggcttcaaccggcttgcatacggacgggcgtgatgtggagtctattggtatagcaacttcaagacatttggtgggctgagaaaggacggatcaagtatcgaatcaactttcacgatttgtgagtcgtgtgaaatgcgaactgacgctctccctgcgcccttctcgattcttcagcagaatgatatgctgcagggtaagcaactcagaccaagggtgtagtcaaatgatccaactacagttatcttaccaactgtgcctccgcagacaggtctactagattaggcaaaattta

SEQ ID NO: 6471 - DNA, 1032 bp, Muscodor strobelii
  misc_feature: SGI cDNA ID NO. 561898
  misc_feature: Elevated expression when VOC is produced
  misc_feature: Encodes the peptide sequence at SEQ ID NO 6472
atggcttcgggaaagcatttcaagaacataccaccgtttccggaaggagatgtgctagtggcggcaatcgagactatctctttagcagacctccggtctcacaatgaaaccgcggggcagaagctgttcacatcttgcacagagcttggcttctttatgcttgatttgagagaagatgaggttggcgagaccatgatcgatgtcatcgatcgtctctttgacatcagtcgacgtctgatggacctggccgaggaggaaaagctgagatatcttcacgatatcccgaggagttttcttgggttcaaaccaagaggtgtatcaaagacagaaaagaaccaacccgatcgcttcgaatggttcaacattggctgtgacggtctaacaggaacagactcgctacaaccacttccccctatcatgaagaacaatctttcccttctccaagcattccacatcttcgggcaagacatcgcgaacctcatattcgacgtcctcgcatctcaactcggcatatcaaccgaaagtttcaccgcgcttcactcaccggaccaagtctcaggcacaataatacgcttcatcaagtccttcgcaagtcccaactcagaagacatgggcacaagcatgcaccaccacacagatctaggcagcataaccctactagccaacatcctcggtggtctgcagatcctcaaaccaggcggcgacccaatggataccacggcgtggcaatggctacaacccaagccgggctgtctgatcgtaaatttaggtgatgctatggtacagtggacgagcggctctctccgcagtagtgtacatcgggttaatcatgcgcctggggagcagagggtcgtggatagatatagtttgggtctttttatcaggccgaatagagacgcgcctatgaatccgttgatggggggtggggagaagacggagttgacggctggggagtgggagattagaaaactgatgggttataagagggaggagggtaaggatgcggataagggtgaggagtctcgtctttga

SEQ ID NO: 6472 - protein, 343 aa, Muscodor strobelii
  misc_feature: SGI Peptide ID NO. 561898
  misc_feature (183)..(296): Pfam Id: PF03171 Pfam Desc: 2OG-Fe(II) oxygenase superfamily
  misc_feature (200)..(296): Pfam Id: PF03171 Pfam Desc: 2OG-Fe(II) oxygenase superfamily
  misc_feature (1)..(342): NCBI GI: 156065687 Blast Desc: SS1G_00854 [Sclerotinia sclerotiorum 1980] gi|154691713|gb|EDN91451.1| SS1G_00854 [Sclerotinia sclerotiorum 1980]
  misc_feature (6)..(328): NCBI GI: 259489603 Blast Desc: TPA: oxidoreductase, 2OG-Fe(II) oxygenase family, (AFU_orthologue; AFUA_5G11160) [Aspergillus nidulans FGSC A4]
  misc_feature (6)..(328): NCBI GI: 67515813 Blast Desc: AN0188.2 [Aspergillus nidulans FGSC A4] gi|40746905|gb|EAA66061.1| AN0188.2 [Aspergillus nidulans FGSC A4]
  misc_feature (1)..(339): NCBI GI: 225558377 Blast Desc: oxidoreductase [Ajellomyces capsulatus G186AR]
  misc_feature (7)..(342): NCBI GI: 212529716 Blast Desc: oxidoreductase, 2OG-Fe(II) oxygenase family, [Penicillium marneffei ATCC 18224] gi|210074413|gb|EEA28500.1| oxidoreductase, 2OG-Fe(II) oxygenase family, [Penicillium ATCC
  misc_feature (1)..(336): NCBI GI: 115401474 Blast Desc: conserved [Aspergillus terreus NIH2624] gi|114190266|gb|EAU31966.1| conserved [Aspergillus terreus NIH2624]
  misc_feature (5)..(328): NCBI GI: 242762390 Blast Desc: oxidoreductase, 2OG-Fe(II) oxygenase family, [Talaromyces stipitatus ATCC 10500] gi|218723564|gb|EED22981.1| oxidoreductase, 2OG-Fe(II) oxygenase family, [Talaromyces ATCC
  misc_feature (1)..(342): NCBI GI: 119192568 Blast Desc: CIMG_00661 [Coccidioides immitis RS]
  misc_feature (1)..(342): NCBI GI: 240106044 Blast Desc: 1-aminocyclopropane-1-carboxylate oxidase, [Coccidioides posadasii C735 delta SOWgp]
  misc_feature (1)..(325): NCBI GI: 238490780 Blast Desc: oxidoreductase, 2OG-Fe(II) oxygenase family, [Aspergillus flavus NRRL3357] gi|220697040|gb|EED53381.1| oxidoreductase, 2OG-Fe(II) oxygenase family, [Aspergillus flavus
  misc_feature (75)..(304): SWISSPROT Homolog: EC 1.14.17.4 Aminocyclopropanecarboxylate oxidase
  misc_feature: Useful for introducing or modulating the production of volatile compounds
MASGKHFKNIPPFPEGDVLVAAIETISLADLRSHNETAGQKLFTSCTELGFFMLDLREDEVGETMIDVIDRLFDISRRLMDLAEEEKLRYLHDIPRSFLGFKPRGVSKTEKNQPDRFEWFNIGCDGLTGTDSLQPLPPIMKNNLSLLQAFHIFGQDIANLIFDVLASQLGISTESFTALHSPDQVSGTIIRFIKSFASPNSEDMGTSMHHHTDLGSITLLANILGGLQILKPGGDPMDTTAWQWLQPKPGCLIVNLGDAMVQWTSGSLRSSVHRVNHAPGEQRVVDRYSLGLFIRPNRDAPMNPLMGGGEKTELTAGEWEIRKLMGYKREEGKDADKGEESRL

SEQ ID NO: 6473 - DNA, 1451 bp, Muscodor strobelii
  misc_feature: SGI EST ID NO. CUFF.16181.0
  misc_feature: Variant of the nucleotide sequence at SEQ ID NO 6471
attaggtcggcgggaacgttttctgacatgtgagatcctggatttgaggaacgatcggccataccgtgcgatatcgacgggttataaaagacgtcgagagtaaaatgtaggagtggcatataccatcccgcgacttgtgtttcgggccatctttcaacccgccttacagtttcgacaactcaagtaaacatcatggcttcgggaaagcatttcaagaacataccaccgtttccggaaggagatgtgctagtggcggcaatcgagactatctctttagcagacctccggtctcacaatgaaaccgcggggcagaagctgttcacatcttgcacagagcttggcttctttatgcttgatttgagagaagatgaggttggcgagaccatgatcgatgtcatcgatcgtctctttgacatcagtcgacgtctgatggacctggccgaggaggaaaagctgagatatcttcacgatatcccgaggagttttcttgggttcaaaccaagaggtgtatcaaagacagaaaagaaccaacccgatcgcttcgaatggttcaacattggctgtgacggtctaacaggaacagactcgctacaaccacttccccctatcatgaagaacaatctttcccttctccaagcattccacatcttcgggcaagacatcgcgaacctcatattcgacgtcctcgcatctcaactcggcatatcaaccgaaagtttcaccgcgcttcactcaccggaccaagtctcaggcacaataatacgcttcatcaagtccttcgcaagtcccaactcagaagacatgggcacaagcatgcaccaccacacagatctaggcagcataaccctactagccaacatcctcggtggtctgcagatcctcaaaccaggcggcgacccaatggataccacggcgtggcaatggctacaacccaagccgggctgtctgatcgtaaatttaggtgatgctatggtacagtggacgagcggctctctccgcagtagtgtacatcgggttaatcatgcgcctggggagcagagggtcgtggatagatatagtttgggtctttttatcaggccgaatagagacgcgcctatgaatccgttgatggggggtggggagaagacggagttgacggctggggagtgggagattagaaaactgatgggttataagagggaggagggtaaggatgcggataagggtgaggagtctcgtctttgaaggggggcgtgtgtaaattggattgatgattgattcgtccatgagctgcgtaattatactgaatcggcattgagagagcgaaaggcaagggtatgaggtagcgggtgagggatcggtgttgtcgaattattgacttaggagcagtatgtctgtatccatataagcttatctactggaactgttttttcatttgaccagttcatttatgattatcattacgatattca

SEQ ID NO: 6474 - DNA, 1434 bp, Muscodor strobelii
  misc_feature: SGI cDNA ID NO. 561899
  misc_feature: Encodes the peptide sequence at SEQ ID NO 6475
atgagttcctccgtcgaaacctttcgggagcactggatcagtattgcatgcacttcatttgtggcatatcaaatcggagcagtaatatggaacttatatttccatccccttagaaagtttcctggacctcttctcgcgagaagtaccttattttggcgcgcgtggatgacgcttaccggtcgtcaaccccagatactgcgaaagaagcacgaaaaatacggtatgtgcactgcaatctttgatgcttctaagtctaggttgcatcaaacgtgtcatactgaccccagcttcaaaggctctgttgtccgtgtctctccaaatgaattaagtttctgcacagtacagtcctacaaagatatatacgggtttcctcgacctggcgaaccgcaatgtatcaagagcgagttctatgacatttttggcaatgggtttaagactggatgcataggttccgagagagaccctcaagttcaaagccagaaaaaaaagaatctcctggccgctttctctccaaaagcattggctagtcaagaagacataatgcatcgatgcattgacgcattcgtggccaaaattggagatgaaagcttgcgcttggacggtggaattgatatggtagaatggtttaacatgaattcatttgacttgttcggtgaaatggcattcggagaaacattcggttgtattgctacgggcaagccgcacttttgggttgacatgattcttcaacatgttcgggagattgttctcatggataatctgcgccgctttcagattctctccggtttatcaaaatggctcttaccttccatgttaatgtcgatacggaagaaacatagccagtttagcagggataaggtcaagaagtacggcaaacgaacatcacccctgaagcagaatgctaagtataggctagacaaggtcaagagcggcgacgtttctctcgaggaaatgacagcacatgcctcaacattaataatcgctggcggagagactactgcgaccacgctctccgcggcaatgttttacctgctaaaggatccaagcatcatcagcaaactcaccgctgaaattagggagcgatacaagacttataatgagatagatgctatttcggcgcagagcctaccatatctgcaagccgtcattaatgaagctttgcgtcatcatccgtcgggagcccatgggttccctcgcatttcgccgggcttgcaagttgacggatactgggtaccgaaaggcagcgagatttacacttgcacgtgggtagcatcgcatcacccagactattttcaagacccagacaaatttgacccggaaagttttgcctacatgcagatgtccctagttctcagcaagatgctcttcacttacgacctcgaattagtggagaaagatatgaattgggaagcagagtcaacacattgtgagtag

SEQ ID NO: 6475 - protein, 477 aa, Muscodor strobelii
  misc_feature: SGI Peptide ID NO. 561899
  misc_feature (41)..(477): Pfam Id: PF00067 Pfam Desc: Cytochrome P450
  misc_feature (314)..(440): Pfam Id: PF00067 Pfam Desc: Cytochrome P450
  misc_feature (15)..(473): NCBI GI: 255931847 Blast Desc: Pc12g06380 [Penicillium chrysogenum Wisconsin 54-1255] gi|211582099|emb|CAP80265.1| Pc12g06380 [Penicillium chrysogenum Wisconsin 54-1255]
  misc_feature (21)..(474): NCBI GI: 259485752 Blast Desc: TPA: cytochrome P450, (Eurofung) [Aspergillus nidulans FGSC A4]
  misc_feature (29)..(474): NCBI GI: 121712479 Blast Desc: benzoate 4-monooxygenase cytochrome P450 [Aspergillus clavatus NRRL 1] gi|119402003|gb|EAW12425.1| benzoate 4-monooxygenase cytochrome P450 [Aspergillus clavatus NRRL 1]
  misc_feature (21)..(473): NCBI GI: 238839258 Blast Desc: benzoate 4-monooxygenase cytochrome P450 [Microsporum canis CBS 113480]
  misc_feature (23)..(473): NCBI GI: 238492291 Blast Desc: cytochrome P450, [Aspergillus flavus NRRL3357] gi|220695876|gb|EED52218.1| cytochrome P450, [Aspergillus flavus NRRL3357]
  misc_feature (13)..(474): NCBI GI: 188596513 Blast Desc: BCL4p [Botryotinia fuckeliana]
  misc_feature (79)..(474): NCBI GI: 67525647 Blast Desc: AN3281.2 [Aspergillus nidulans FGSC A4] gi|40744069|gb|EAA63249.1| AN3281.2 [Aspergillus nidulans FGSC A4]
  misc_feature (23)..(473): NCBI GI: 169782646 Blast Desc: [Aspergillus oryzae RIB40] gi|83774529|dbj|BAE64652.1| protein product [Aspergillus oryzae]
  misc_feature (35)..(474): NCBI GI: 259485758 Blast Desc: TPA: cytochrome P450, (Eurofung) [Aspergillus nidulans FGSC A4]
  misc_feature (12)..(472): NCBI GI: 154289577 Blast Desc: BC1G_16084 [Botryotinia fuckeliana B05.10] gi|150849019|gb|EDN24212.1| BC1G_16084 [Botryotinia fuckeliana B05.10] gi|169635728|emb|CAP58782.1| cytochrome P40 monooxygenase
  misc_feature (37)..(440): SWISSPROT Homolog: EC 1.14.13.12 Benzoate 4-monooxygenase
MSSSVETFREHWISIACTSFVAYQIGAVIWNLYFHPLRKFPGPLLARSTLFWRAWMTLTGRQPQILRKKHEKYGMCTAIFDASKSRLHQTCHTDPSFKGSVVRVSPNELSFCTVQSYKDIYGFPRPGEPQCIKSEFYDIFGNGFKTGCIGSERDPQVQSQKKKNLLAAFSPKALASQEDIMHRCIDAFVAKIGDESLRLDGGIDMVEWFNMNSFDLFGEMAFGETFGCIATGKPHFWVDMILQHVREIVLMDNLRRFQILSGLSKWLLPSMLMSIRKKHSQFSRDKVKKYGKRTSPLKQNAKYRLDKVKSGDVSLEEMTAHASTLIIAGGETTATTLSAAMFYLLKDPSIISKLTAEIRERYKTYNEIDAISAQSLPYLQAVINEALRHHPSGAHGFPRISPGLQVDGYWVPKGSEIYTCTWVASHHPDYFQDPDKFDPESFAYMQMSLVLSKMLFTYDLELVEKDMNWEAESTHCE

SEQ ID NO: 6476 - DNA, 858 bp, Muscodor strobelii
  misc_feature: SGI cDNA ID NO. 561900
  misc_feature: Encodes the peptide sequence at SEQ ID NO 6477
atggcggatacgttcaaacgtttcccagccgcagcccgtgtagttggcattgtcgcacggaagcagataacgaagttgtacgccgatacagccatgaatgagcaaatggctatcgacctggttgagaaacgtatcaaaactcgtacaagtcgaaaggacttcatgtcaaggattctcgagcaccgtggtgatgagcgccacaaagtctccgacttacaactagcagctcactcttgggactttgttgccgcgggtagtgaaacaacttcaacagccctgtcatgctgtaccttttatatactacgcaatccatctgttatggcgaagttgacgtcagaagtacgcagtgcatttatcacgtctgctgaaatcaacgacgcgtctacaaaggatttgtcgtatttaaatgctgtctgtcttgaatcaatgcgcattttcccgccacttccattaggcgttccccgcatagtacccgaaggcggcgataccgtcgatggacactttttgccgggtggtgtcactgttgctaccaacccgatggctgccggcctcgatgcacgcaatttcaagaatccactatcattcaatcctgaaagatggctacagaatgctcagctggccgttgatcgcgataatcttgaagctagtcaacctttcttgctaggtgcaagaggatgcttaggaaaaaggcgagtcgtttatctgggttggatggaaatgcgcacgactcttgcaaaggtcatattcacgtttgacctagtcctagtagatcagaatcttgattggcttagagactcgcgaatgacgacgctctggcgaaaaccgcctctgaggattcgcgcttctcttgctcggtga

SEQ ID NO: 6477 - protein, 285 aa, Muscodor strobelii
  misc_feature: SGI Peptide ID NO. 561900
  misc_feature (50)..(281): Pfam Id: PF00067 Pfam Desc: Cytochrome P450
  misc_feature (1)..(277): NCBI GI: 259485758 Blast Desc: TPA: cytochrome P450, (Eurofung) [Aspergillus nidulans FGSC A4]
  misc_feature (1)..(282): NCBI GI: 255931851 Blast Desc: Pc12g06400 [Penicillium chrysogenum Wisconsin 54-1255] gi|211582101|emb|CAP80267.1| Pc12g06400 [Penicillium chrysogenum Wisconsin 54-1255]
  misc_feature (1)..(277): NCBI GI: 121712467 Blast Desc: benzoate 4-monooxygenase cytochrome P450 [Aspergillus clavatus NRRL 1] gi|119401997|gb|EAW12419.1| benzoate 4-monooxygenase cytochrome P450 [Aspergillus clavatus NRRL 1]
  misc_feature (35)..(279): NCBI GI: 121716300 Blast Desc: benzoate 4-monooxygenase cytochrome P450 [Aspergillus clavatus NRRL 1] gi|119403916|gb|EAW14333.1| benzoate 4-monooxygenase cytochrome P450 [Aspergillus clavatus NRRL 1]
  misc_feature (23)..(284): NCBI GI: 119500518 Blast Desc: toxin biosynthesis cytochrome P450 monooxygenase, [Neosartorya fischeri NRRL 181] gi|119415181|gb|EAW25119.1| toxin biosynthesis cytochrome P450 monooxygenase, [Neosartorya fischeri
  misc_feature (35)..(284): NCBI GI: 70993962 Blast Desc: cytochrome P450 monooxygenase [Aspergillus fumigatus Af293] gi|66849462|gb|EAL89790.1| cytochrome P450 monooxygenase, [Aspergillus fumigatus Af293] gi|159125254|gb|EDP50371.1| toxin
  misc_feature (31)..(280): NCBI GI: 145235557 Blast Desc: An03g05460 [Aspergillus niger] gi|134058114|emb|CAK38308.1| protein product [Aspergillus niger]
  misc_feature (1)..(172): NCBI GI: 171677183 Blast Desc: protein product [Podospora anserina] gi|170936659|emb|CAP61318.1| protein product [Podospora anserina]
  misc_feature (9)..(230): NCBI GI: 169603624 Blast Desc: SNOG_04820 [Phaeosphaeria nodorum SN15] gi|111066091|gb|EAT87211.1| SNOG_04820 [Phaeosphaeria nodorum SN15]
  misc_feature (1)..(285): NCBI GI: 259485752 Blast Desc: TPA: cytochrome P450, (Eurofung) [Aspergillus nidulans FGSC A4]
  misc_feature (48)..(252): SWISSPROT Homolog: EC 1.14.13.88 Flavonoid 3',5'-hydroxylase
MADTFKRFPAAARVVGIVARKQITKLYADTAMNEQMAIDLVEKRIKTRTSRKDFMSRILEHRGDERHKVSDLQLAAHSWDFVAAGSETTSTALSCCTFYILRNPSVMAKLTSEVRSAFITSAEINDASTKDLSYLNAVCLESMRIFPPLPLGVPRIVPEGGDTVDGHFLPGGVTVATNPMAAGLDARNFKNPLSFNPERWLQNAQLAVDRDNLEASQPFLLGARGCLGKRRVVYLGWMEMRTTLAKVIFTFDLVLVDQNLDWLRDSRMTTLWRKPPLRIRASLAR

SEQ ID NO: 6478 - DNA, 969 bp, Muscodor strobelii
  misc_feature: SGI cDNA ID NO. 561901
  misc_feature: Encodes the peptide sequence at SEQ ID NO 6479
atggagaattttgtccatgcagctgttcctggtgcatttctggcggacatatttccatggttaaaatttatcccggagtggatgccagggggttcgtggaagacgaaggcatacaaatggcaatctgaactttctgaagtcacagagaagccatacgctttcacaaagtatcaaatgtcacgtggggaacacgagacttcgttcttatctcaactcctagaagcaggcgatgcaacagaggaggaaaagcacaccaataaatggtcggcgatgtcactgtatactgcaggggcagattctaatgtgtctgctcttggtgcttttttcttggcaatgacgatatttccggatgtgcaacgcaaagcccagcaggaaatcgatcacatcgtaggtcgcgatagattgccgaacatggcagatcgatctaatttgccgtatgtcgaggcactgattaaagaattatatcgttggcatccaatcgctccgatgggaattccacattgctctacagaagacgatatttaccaggggcatttcattcctcgcgggtcgatcatctttgccaatgtctggcattttacacatgatccggatgtgcacccggatccaatggtatttaaacctgatcgtttcgtctcaaagaacgggaaggaaacagagagggatcccaatctattcatttgggggtttggcagacgtatctgcccaggccgccatttggccgataatcttatatggcttacggtcgcacagtttgttgcatcatttgatgtttgtcgagtcgtggaaaatggaaaggagattataccgccgatagccttccagccaggtgtagccagccaccctgcaccatatcgcaatgtcattaagccgagatctccgcatcacagaaagctagtgaaggctctcgaggctaagtatccatggcaggagagtcacagcgaaattctcgagagcagtatagtctaa

SEQ ID NO: 6479 - protein, 322 aa, Muscodor strobelii
  misc_feature: SGI Peptide ID NO. 561901
  misc_feature (116)..(241): Pfam Id: PF00067 Pfam Desc: Cytochrome P450
  misc_feature (1)..(298): NCBI GI: 256724264 Blast Desc: NECHADRAFT_53484 [Nectria haematococca mpVI 77-13-4]
  misc_feature (1)..(322): NCBI GI: 242817323 Blast Desc: cytochrome P450 oxidoreductase OrdA-like, [Talaromyces stipitatus ATCC 10500] gi|218713397|gb|EED12821.1| cytochrome P450 oxidoreductase OrdA-like, [Talaromyces stipitatus ATCC
  misc_feature (1)..(321): NCBI GI: 212530868 Blast Desc: cytochrome P450 oxidoreductase OrdA-like, [Penicillium marneffei ATCC 18224] gi|210074989|gb|EEA29076.1| cytochrome P450 oxidoreductase OrdA-like, [Penicillium marneffei ATCC 18224]
  misc_feature (1)..(321): NCBI GI: 212530870 Blast Desc: cytochrome P450 oxidoreductase OrdA-like, [Penicillium marneffei ATCC 18224] gi|210074990|gb|EEA29077.1| cytochrome P450 oxidoreductase OrdA-like, [Penicillium marneffei ATCC 18224]
  misc_feature (1)..(319): NCBI GI: 169617413 Blast Desc: SNOG_11884 [Phaeosphaeria nodorum SN15] gi|111059808|gb|EAT80928.1| SNOG_11884 [Phaeosphaeria nodorum SN15]
  misc_feature (1)..(319): NCBI GI: 169599354 Blast Desc: SNOG_02494 [Phaeosphaeria nodorum SN15] gi|111069586|gb|EAT90706.1| SNOG_02494 [Phaeosphaeria nodorum SN15]
  misc_feature (1)..(319): NCBI GI: 189199880 Blast Desc: O-methylsterigmatocystin oxidoreductase [Pyrenophora tritici-repentis Pt-1C-BFP] gi|187983376|gb|EDU48864.1| O-methylsterigmatocystin oxidoreductase [Pyrenophora Pt-1C-BFP]
  misc_feature (1)..(321): NCBI GI: 169762482 Blast Desc: [Aspergillus oryzae RIB40] gi|83770169|dbj|BAE60302.1| protein product [Aspergillus oryzae]
  misc_feature (1)..(319): NCBI GI: 145254277 Blast Desc: An18g01200 [Aspergillus niger] gi|134084162|emb|CAK47195.1| protein product [Aspergillus niger]
  misc_feature (3)..(321): NCBI GI: 238489025 Blast Desc: cytochrome P450 oxidoreductase OrdA-like, [Aspergillus flavus NRRL3357] gi|220698138|gb|EED54478.1| cytochrome P450 oxidoreductase OrdA-like, [Aspergillus flavus NRRL3357]
  misc_feature (8)..(257): SWISSPROT Homolog: EC 1.14.13.21 Flavonoid 3'-monooxygenase
MENFVHAAVPGAFLADIFPWLKFIPEWMPGGSWKTKAYKWQSELSEVTEKPYAFTKYQMSRGEHETSFLSQLLEAGDATEEEKHTNKWSAMSLYTAGADSNVSALGAFFLAMTIFPDVQRKAQQEIDHIVGRDRLPNMADRSNLPYVEALIKELYRWHPIAPMGIPHCSTEDDIYQGHFIPRGSIIFANVWHFTHDPDVHPDPMVFKPDRFVSKNGKETERDPNLFIWGFGRRICPGRHLADNLIWLTVAQFVASFDVCRVVENGKEIIPPIAFQPGVASHPAPYRNVIKPRSPHHRKLVKALEAKYPWQESHSEILESSIV

SEQ ID NO: 6480 - DNA, 567 bp, Muscodor strobelii
  misc_feature: SGI cDNA ID NO. 561902
  misc_feature: Encodes the peptide sequence at SEQ ID NO 6481
atgcagacctttgtgctggctttgagcctaacgtttactctttcatattaccttattcgatggctagcacatggccgtcgcgcagcattacccccgggccctcgaggcattcctgtcattggcaatctgaacgatttgcctaaaggcgatggaatggagtgccatcactggctcaagcacaagcagaaatacggtcccataagttctgtgacagtgatgggccaacccatcgtcattttgaacgatgccagtatggcatttgatctctttgaaaaaagatcggtgaaatactcttcaagaccaagacaagtcgtcgcgggtgagatcgttggctggcagcatacgcccggcggctctcctaataactctcgttggagaactttgcgcaaaaacttgaatcgtctgattggcaccaaaggatccgccgcgcagttttataatcttcaggaagccgaagtcggacattttctcctacatcttctgaaaagtccggaaaagctccagcagcatattgaaaggcttgtctcctccagcttactgtctaagcatctattaacttttgcttga

SEQ ID NO: 6481 - protein, 188 aa, Muscodor strobelii
  misc_feature: SGI Peptide ID NO. 561902
  misc_feature (31)..(133): Pfam Id: PF00067 Pfam Desc: Cytochrome P450
  misc_feature (41)..(179): NCBI GI: 256724264 Blast Desc: NECHADRAFT_53484 [Nectria haematococca mpVI 77-13-4]
  misc_feature (3)..(180): NCBI GI: 189195692 Blast Desc: O-methylsterigmatocystin oxidoreductase [Pyrenophora tritici-repentis Pt-1C-BFP] gi|187980063|gb|EDU46689.1| O-methylsterigmatocystin oxidoreductase [Pyrenophora Pt-1C-BFP]
  misc_feature (9)..(180): NCBI GI: 242817323 Blast Desc: cytochrome P450 oxidoreductase OrdA-like, [Talaromyces stipitatus ATCC 10500] gi|218713397|gb|EED12821.1| cytochrome P450 oxidoreductase OrdA-like, [Talaromyces stipitatus ATCC
  misc_feature (4)..(180): NCBI GI: 169599354 Blast Desc: SNOG_02494 [Phaeosphaeria nodorum SN15] gi|111069586|gb|EAT90706.1| SNOG_02494 [Phaeosphaeria nodorum SN15]
  misc_feature (4)..(180): NCBI GI: 212530868 Blast Desc: cytochrome P450 oxidoreductase OrdA-like, [Penicillium marneffei ATCC 18224] gi|210074989|gb|EEA29076.1| cytochrome P450 oxidoreductase OrdA-like, [Penicillium marneffei ATCC 18224]
  misc_feature (4)..(180): NCBI GI: 238488269 Blast Desc: cytochrome P450, [Aspergillus flavus NRRL3357] gi|220697760|gb|EED54100.1| cytochrome P450, [Aspergillus flavus NRRL3357]
  misc_feature (40)..(174): NCBI GI: 67522288 Blast Desc: AN1601.2 [Aspergillus nidulans FGSC A4] gi|40745565|gb|EAA64721.1| AN1601.2 [Aspergillus nidulans FGSC A4]
  misc_feature (40)..(180): NCBI GI: 259486936 Blast Desc: TPA: cytochrome P450, (Eurofung) [Aspergillus nidulans FGSC A4]
  misc_feature (4)..(180): NCBI GI: 169762482 Blast Desc: [Aspergillus oryzae RIB40] gi|83770169|dbj|BAE60302.1| protein product [Aspergillus oryzae]
  misc_feature (39)..(171): NCBI GI: 121716160 Blast Desc: Cytochrome P450 oxidoreductase, [Aspergillus clavatus NRRL 1] gi|119403846|gb|EAW14263.1| Cytochrome P450 oxidoreductase, [Aspergillus clavatus NRRL 1]
  misc_feature (30)..(157): SWISSPROT Homolog: EC 1.14.13.73 Tabersonine 16-hydroxylase
MQTFVLALSLTFTLSYYLIRWLAHGRRAALPPGPRGIPVIGNLNDLPKGDGMECHHWLKHKQKYGPISSVTVMGQPIVILNDASMAFDLFEKRSVKYSSRPRQVVAGEIVGWQHTPGGSPNNSRWRTLRKNLNRLIGTKGSAAQFYNLQEAEVGHFLLHLLKSPEKLQQHIERLVSSSLLSKHLLTFA

SEQ ID NO: 6482 - DNA, 990 bp, Muscodor strobelii
  misc_feature: SGI cDNA ID NO. 561903
  misc_feature: Encodes the peptide sequence at SEQ ID NO 6483
atgattgattctcctactgaggctgccaatatggcgcgcacaacgaatttggcacctttcatcaaacgacagatcccctcatcaggcttgacggcgatgtgtcatccgctgacagagaaagccattagagaagtgaacgacttctttctccagcactgggactttccaagccctaaattccgcaagagatttgaaggtgacggcatgacccgtgtgacatgcttttatgtctgcaaatcactcgacgaccgcctgatcctggcatgtcgactgatcacgctcctctttttgattgacgatgtgctagagcatttgtctcttgaagaaggcaaggcgtataacgagaaggtcttcaccttctttcgaggggatgctcagccagaccgcacagtgcccgttgagtggatttcgtatgacttgtggcaagatctacgaaaatgcgacaaagaactagccgatgagatgcttgagccagtgtggcaatttatggattctcagactgatccgcgtcggctcactaaaatgagttttggagaatatcttgaataccgtgaaacagatgttggcaaaggtgtactgagtgcattgattcgcttcaccggcgcaattcatctttcttcggaagatctcgctattgcggacagggttgatagaaattgtggaagacatatggctgttgtgaatgacatctggagttatgaaaaagaggttcatgcagcaaagactcttcacgaggaaggtggagtactttgtacagcggtggcgattcttgcaaacgagaccaatgtttccgttgactctgcgaaaagagttctctatcaactctgcagagaatgggaagtcgagcaggagtatctcgtagaggaagcactttctcaaaaggataccccagagtttagagagtacttgaagcgtatcgagtaccaaatgtccggcaatgagttctggagtcgatcgaccgaccggtatctcaagccaacagcagcctga

SEQ ID NO: 6483 - protein, 329 aa, Muscodor strobelii
  misc_feature: SGI Peptide ID NO. 561903
  misc_feature (36)..(284): Pfam Id: PF03936 Pfam Desc: Terpene synthase family, metal binding domain
  misc_feature (5)..(327): NCBI GI: 171677181 Blast Desc: protein product [Podospora anserina] gi|170936658|emb|CAP61317.1| protein product [Podospora anserina]
  misc_feature (26)..(323): NCBI GI: 126030360 Blast Desc: protein product [Podospora anserina] gi|170936658|emb|CAP61317.1| protein product [Podospora anserina]
  misc_feature (22)..(323): NCBI GI: 169782654 Blast Desc: [Aspergillus oryzae RIB40] gi|83774533|dbj|BAE64656.1| protein product [Aspergillus oryzae]
  misc_feature (26)..(323): NCBI GI: 255931833 Blast Desc: Pc12g06310 [Penicillium chrysogenum Wisconsin 54-1255] gi|211582092|emb|CAP80258.1| Pc12g06310 [Penicillium chrysogenum Wisconsin 54-1255]
  misc_feature (27)..(329): NCBI GI: 121712471 Blast Desc: terpene synthase metal binding domain protein [Aspergillus clavatus NRRL 1] gi|119401999|gb|EAW12421.1| terpene synthase metal binding domain protein [Aspergillus clavatus NRRL
  misc_feature (26)..(323): NCBI GI: 416643 Blast Desc: ARIS_PENRO RecName: Full=Aristolochene synthase; Short=AS; AltName: Full=Sesquiterpene cyclase gi|169178|gb|AAA33694.1| aristolochene synthase [Penicillium
  misc_feature (26)..(320): NCBI GI: 10120633 Blast Desc: ARIS_PENRO RecName: Full=Aristolochene synthase; Short=AS; AltName: Full=Sesquiterpene cyclase gi|169178|gb|AAA33694.1| aristolochene synthase [Penicillium
  misc_feature (28)..(328): NCBI GI: 67525639 Blast Desc: AN3277.2 [Aspergillus nidulans FGSC A4] gi|40744065|gb|EAA63245.1| AN3277.2 [Aspergillus nidulans FGSC A4] gi|259485756|tpe|CBF83046.1| TPA: conserved [Aspergillus FGSC
  misc_feature (26)..(314): NCBI GI: 224589059 Blast Desc: FPP cyclase [Penicillium expansum]
  misc_feature (105)..(323): NCBI GI: 238492299 Blast Desc: aristolochene synthase, [Aspergillus flavus NRRL3357] gi|220695880|gb|EED52222.1| aristolochene synthase, [Aspergillus flavus NRRL3357]
  misc_feature (26)..(323): SWISSPROT Homolog: EC 4.2.3.9 Aristolochene synthase
  misc_feature: Useful for introducing or modulating the production of volatile compounds
MIDSPTEAANMARTTNLAPFIKRQIPSSGLTAMCHPLTEKAIREVNDFFLQHWDFPSPKFRKRFEGDGMTRVTCFYVCKSLDDRLILACRLITLLFLIDDVLEHLSLEEGKAYNEKVFTFFRGDAQPDRTVPVEWISYDLWQDLRKCDKELADEMLEPVWQFMDSQTDPRRLTKMSFGEYLEYRETDVGKGVLSALIRFTGAIHLSSEDLAIADRVDRNCGRHMAVVNDIWSYEKEVHAAKTLHEEGGVLCTAVAILANETNVSVDSAKRVLYQLCREWEVEQEYLVEEALSQKDTPEFREYLKRIEYQMSGNEFWSRSTDRYLKPTAA

SEQ ID NO: 6484 - DNA, 1527 bp, Muscodor strobelii
  misc_feature: SGI cDNA ID NO. 561904
  misc_feature: Encodes the peptide sequence at SEQ ID NO 6485
atgtctttcaaccacactgcatacaataggaacaattttctgtggaatgatcaacaactgttctcggttcaatatgctgcaagcttcatcgctctcagtattggcctcgcttgggtgtcttggacacagtggctaggaaagccgaagttgattcctggcatacacgtcgtgggaggcaacagccggagccagatcatggcaagtcgtgagagatttcgtgttgcttctagacaaatggtaatcagtggatacaataagtcaatggggaaagaattttactatgtgccatcgagagcaggcgagcggcttgtgatgccaacccattttattgaggagctgaaatcagctgccatggacaaggtcgatttcactggtatcatgattgatcttgtcgatcgtagtagactaaatcctgacactctcaaacttggtgtgtcgccaagagtgtcatcgatgatgcccgatatccaagatgagattgaggtagcattcggtgacctgtttcctccctgcgatgactggaccgaggttgaactgcttccggtcttttcaactattgtcggtcgggcgaccagccgaatgatgggcggcacgacattgagtagagatccagaatgggtcaaagcagcggtcaactttgcccactgctccgtcaacggatctcaaaaaatcaagtctctgccatggctgattcgaccaatccttgctccctgggtaaaagagatcagagaagatgtggcaaacagttaccgaataggcgagataaaagcaaagcatatcatggaggaacgcttaggtaccgaagaatggcccaatgattttctaacattactctataacggagctaaagggaaagaaaaggaaaataacttcttggcaaagatgctattacagactgccttcgcttctatccatacgagtactgcagccatattgcatttcattatggatctttgtgagcatcctgagtatatcgagatacttcagaatgaatacagagaagtgctagacgagaaaggaaatatcattgcaggtggaatgaatcacttatccaagatggatagctgtatcaaggagtcccaaaggctttggccagcgacaattcttacattcgaacggatcgtgcatcaagatcgcactttgtcaaacggcttaacgataccagcaggacatcgaatcgcagtttgcaatgctggggtgaacatggatccaaatatctacccagatccggagaaatttgatgggctacgctttgataaacttcgccaaagagatgccgccacggctggcaagacacaatttgtgtcatgcaaccaaagtagtctcaatttcggctacgggcgtcatgcttgcccaggtcgtttcttctttgcagatgaatacaagacaataatggttcgcttgttagagaattatgagtttaaattccccgatgggaagagcagaccgccaaccctagagtgggaaacacaatatgttgtaaaccctgcctctacagtcatgttcagaaaacgaaagtctccctag

SEQ ID NO: 6485 - protein, 508 aa, Muscodor strobelii
  misc_feature: SGI Peptide ID NO. 561904
  misc_feature (48)..(504): Pfam Id: PF00067 Pfam Desc: Cytochrome P450
  misc_feature (228)..(504): Pfam Id: PF00067 Pfam Desc: Cytochrome P450
  misc_feature (36)..(506): NCBI GI: 67525633 Blast Desc: AN3274.2 [Aspergillus nidulans FGSC A4] gi|40744062|gb|EAA63242.1| AN3274.2 [Aspergillus nidulans FGSC A4]
  misc_feature (36)..(506): NCBI GI: 259485760 Blast Desc: TPA: cytochrome P450, (Eurofung) [Aspergillus nidulans FGSC A4]
  misc_feature (123)..(506): NCBI GI: 238492293 Blast Desc: cytochrome P450, [Aspergillus flavus NRRL3357] gi|220695877|gb|EED52219.1| cytochrome P450, [Aspergillus flavus NRRL3357]
  misc_feature (123)..(506): NCBI GI: 169782648 Blast Desc: [Aspergillus oryzae RIB40] gi|83774530|dbj|BAE64653.1| protein product [Aspergillus oryzae]
  misc_feature (46)..(459): NCBI GI: 121712463 Blast Desc: cytochrome P450 [Aspergillus clavatus NRRL 1] gi|119401995|gb|EAW12417.1| cytochrome P450 [Aspergillus clavatus NRRL 1]
  misc_feature (15)..(505): NCBI GI: 169635726 Blast Desc: cytochrome P450 monooxygenase [Botryotinia fuckeliana]
  misc_feature (20)..(504): NCBI GI: 189211769 Blast Desc: ent-kaurene oxidase [Pyrenophora tritici-repentis Pt-1C-BFP] gi|187979412|gb|EDU46038.1| ent-kaurene oxidase [Pyrenophora tritici-repentis Pt-1C-BFP]
  misc_feature (71)..(505): NCBI GI: 50355605 Blast Desc: Phoma betae P450 monooxygenase No.2 gi|50355635|dbj|BAD29974.1| P450 monooxygenase 2 [Phoma betae]
  misc_feature (71)..(505): NCBI GI: 119494789 Blast Desc: cytochrome P450 monooxygenase, [Neosartorya fischeri NRRL 181] gi|119412362|gb|EAW22303.1| cytochrome P450 monooxygenase, [Neosartorya fischeri NRRL 181]
  misc_feature (28)..(503): NCBI GI: 256724873 Blast Desc: NECHADRAFT_77014 [Nectria haematococca mpVI 77-13-4]
  misc_feature (69)..(505): SWISSPROT Homolog: EC 1.14.13.78 Ent-kaurene oxidase
MSFNHTAYNRNNFLWNDQQLFSVQYAASFIALSIGLAWVSWTQWLGKPKLIPGIHVVGGNSRSQIMASRERFRVASRQMVISGYNKSMGKEFYYVPSRAGERLVMPTHFIEELKSAAMDKVDFTGIMIDLVDRSRLNPDTLKLGVSPRVSSMMPDIQDEIEVAFGDLFPPCDDWTEVELLPVFSTIVGRATSRMMGGTTLSRDPEWVKAAVNFAHCSVNGSQKIKSLPWLIRPILAPWVKEIREDVANSYRIGEIKAKHIMEERLGTEEWPNDFLTLLYNGAKGKEKENNFLAKMLLQTAFASIHTSTAAILHFIMDLCEHPEYIEILQNEYREVLDEKGNIIAGGMNHLSKMDSCIKESQRLWPATILTFERIVHQDRTLSNGLTIPAGHRIAVCNAGVNMDPNIYPDPEKFDGLRFDKLRQRDAATAGKTQFVSCNQSSLNFGYGRHACPGRFFFADEYKTIMVRLLENYEFKFPDGKSRPPTLEWETQYVVNPASTVMFRKRKSP

SEQ ID NO: 6486 - DNA, 1677 bp, Muscodor strobelii
  misc_feature: SGI cDNA ID NO. 561905
  misc_feature: Encodes the peptide sequence at SEQ ID NO 6487
atggctgacccgtcgcccgcgtcggcatctaccgacaacgtgcacgatggtacacatgatacattcccttccgaggagcgcaagtctagtcctactgtcgtgtatccgtcaacttggaggcaaattatcatcgtgactggcctcctctcgggcgtgtttctagctggacttgacgttagcatcatatcgaccgctatcccggcaatcacaaacgagttcaactcgctcaaagatgccggttggtacggctcggccttttttctcgccgatgcggcattccagtcgatctgggccaaggcatacaaatactttgacatcaaatgggtattcatagctactgtgatcttctttgagcttggatgcctcgtcgccgctctgtcgcccaatagcccggcccttatcgtcggccgtgtcatacagggcggcggggctgcaggtatcattctgggctgctactccatcgccaacttcgtgagccctcccgataaggtaccgctgatagttggcatgatcgggaccattttcagcatttctagtatcattggaccggtcattggcggagtattcacatctgatgtaacttggcgttggtgtttctgggtcaatttgccgattggcgctgtgcccttatcactcattctcctcttcttccgaactccgcctcaagcgaaggtatcttccggggcgccagccaaggagattgccgccagcttcgacctctcaggtgcaactttgtttatcgctgctttgattacgttcatccttgcgacgacttggggcggtactgagtatgcctggaattcgtcccaagtaatcggcctgcttgtcggctggatcttgctgtctattgcttttgttgccaacgaattttggcaaaaggagagagcactgatagttgtacgcgtgatgaagaatcgcgacatgtgggttaattgtctttacctcttcactctgtacggagcttacttttcgatcgtatacaatctccctacctacttccaggcaacagccggtctctcaccaaaagatagcggtatccgcacaatccctatcatcggcgcgacgtcaatcttcagctttgtggggtccgttgccatagggaagtacggtaaatactcgctgttcatgctagtttttactgcgatcacggttgtctcagggggcctgatctacactttcgatgtgaatacgagcttaggaaagcagattggctatcagattctgcttggccttggagttgggcctgtcatccagattccacccattgtcgcaggtatagtaaacaagaacgctgacaaagcgctcgggctgggctcagtgctggtcacacaattcggtgctgcatcactggtcatttcagctgcgtctgccatcactaataacttgctaattaaaaatatccctatctacgcacctggggtcgaccccgctatgattttaggcataggaccatatgagttgcagaactattttgacggcgataccttgttcggcgtgagaaaggcttatgtcgtcggtctgcgtggcgcgtggattttagccattgcactttgggggatcgctttcctctccgtgtttttggcgaagtggccaggacatatgacaccggcacaagaagatgatgttgctgagcagcagcccgagacgaaagaggcagtcgcatcagactcggcatga

SEQ ID NO: 6487 - protein, 558 aa, Muscodor strobelii
  misc_feature: SGI Peptide ID NO. 561905
  misc_feature (48)..(454): Pfam Id: PF07690 Pfam Desc: Major Facilitator Superfamily
  misc_feature (5)..(543): NCBI GI: 121711439 Blast Desc: MFS transporter, [Aspergillus clavatus NRRL 1] gi|119401486|gb|EAW11909.1| MFS transporter, [Aspergillus clavatus NRRL 1]
  misc_feature (3)..(529): NCBI GI: 240106665 Blast Desc: Major Facilitator Superfamily protein [Coccidioides posadasii C735 delta SOWgp]
  misc_feature (8)..(530): NCBI GI: 261359861 Blast Desc: GliA [Verticillium albo-atrum VaMs.102]
  misc_feature (3)..(529): NCBI GI: 119174022 Blast Desc: CIMG_08993 [Coccidioides immitis RS]
  misc_feature (17)..(543): NCBI GI: 238841277 Blast Desc: MFS gliotoxin efflux transporter GliA [Microsporum canis CBS 113480]
  misc_feature (3)..(530): NCBI GI: 242806680 Blast Desc: MFS multidrug transporter, [Talaromyces stipitatus ATCC 10500] gi|218715419|gb|EED14841.1| MFS multidrug transporter, [Talaromyces stipitatus ATCC 10500]
  misc_feature (27)..(531): NCBI GI: 156065817 Blast Desc: SS1G_00919 [Sclerotinia sclerotiorum 1980] gi|154691778|gb|EDN91516.1| SS1G_00919 [Sclerotinia sclerotiorum 1980]
  misc_feature (14)..(530): NCBI GI: 261354374 Blast Desc: GliA [Verticillium albo-atrum VaMs.102]
  misc_feature (1)..(530): NCBI GI: 212538451 Blast Desc: MFS multidrug transporter, [Penicillium marneffei ATCC 18224] gi|210069123|gb|EEA23214.1| MFS multidrug transporter, [Penicillium marneffei ATCC 18224]
  misc_feature (8)..(531): NCBI GI: 154301769 Blast Desc: BC1G_10036 [Botryotinia fuckeliana B05.10] gi|150855698|gb|EDN30890.1| BC1G_10036 [Botryotinia fuckeliana B05.10]
MADPSPASASTDNVHDGTHDTFPSEERKSSPTVVYPSTWRQIIIVTGLLSGVFLAGLDVSIISTAIPAITNEFNSLKDAGWYGSAFFLADAAFQSIWAKAYKYFDIKWVFIATVIFFELGCLVAALSPNSPALIVGRVIQGGGAAGIILGCYSIANFVSPPDKVPLIVGMIGTIFSISSIIGPVIGGVFTSDVTWRWCFWVNLPIGAVPLSLILLFFRTPPQAKVSSGAPAKEIAASFDLSGATLFIAALITFILATTWGGTEYAWNSSQVIGLLVGWILLSIAFVANEFWQKERALIVVRVMKNRDMWVNCLYLFTLYGAYFSIVYNLPTYFQATAGLSPKDSGIRTIPIIGATSIFSFVGSVAIGKYGKYSLFMLVFTAITVVSGGLIYTFDVNTSLGKQIGYQILLGLGVGPVIQIPPIVAGIVNKNADKALGLGSVLVTQFGAASLVISAASAITNNLLIKNIPIYAPGVDPAMILGIGPYELQNYFDGDTLFGVRKAYVVGLRGAWILAIALWGIAFLSVFLAKWPGHMTPAQEDDVAEQQPETKEAVASDSA

SEQ ID NO: 6488 - DNA, 968 bp, Muscodor strobelii
  misc_feature: SGI EST ID NO. CUFF.16243.0
  misc_feature: Variant of the nucleotide sequence at SEQ ID NO 6486
ggtattcatagctactgtgatcttctttgagcttggatgcctcgtcgccgctctgtcgcccaatagcccggcccttatcgtcggccgtgtcatacagggcggcggggctgcaggtatcattctgggctgctactccatcgccaacttcgtgagccctcccgataaggtaccgctgatagttggcatgatcgggaccattttcagcatttctagtatcattggaccggtcattggcggagtattcacatctgatgtaacttggcgttggtgtttctgggtcaatttgccgattggcgctgtgcccttatcactcattctcctcttcttccgaactccgcctcaagcgaaggtatcttccggggcgccagccaaggagattgccgccagcttcgacctctcaggtgcaactttgtttatcgctgctttgattacgttcatccttgcgacgacttggggcggtactgagtatgcctggaattcgtcccaagtaatcggcctgcttgtcggctggatcttgctgtctattgcttttgttgccaacgaattttggcaaaaggagagagcactgatagttgtacgcgtgatgaagaatcgcgacatgtgggttaattgtctttacctcttcacgtaagtaatcacgcatgtatgatgtcagaagactagctaatggataccatttagtctgtacggagcttacttttcgatcgtatacaatctccctacctacttccaggcaacagccggtctctcaccaaaagatagcggtatccgcacaatccctatcatcggcgcgacgtcaatcttcagctttgtggggtccgttgccatagggaagtacggtaaatactcgctgttcatgctagtttttactgcgatcacggttgtctcagggggcctgatctacactttcgatgtgaatacgagcttaggaaagcagattggctatcagattctgcttggccttggag

SEQ ID NO: 6489 - DNA, 1497 bp, Muscodor strobelii
  misc_feature: SGI cDNA ID NO. 561906
  misc_feature: Reduced expression when VOC is produced
  misc_feature: Encodes the peptide sequence at SEQ ID NO 6490
atgcctatgttcgaagatgtcgacttcggcgtgaaggcgcctactagccctcaccaattgcaagcctcatccagccgggcaacatctctggcgcctcatgagcagcctcaacccattccaggtgaacacctgggagacgatcccattgagattccagcaactaggtccccatactccgatgtctctaaatacatgcataacttgagcatctccccatcacagaaggatcggagatcttcgcgtaactccttcggagcgtcgctgcccatccctcgctctaagagacggtctcgcctctcatcggtacacaatgctgaaaccgctgatggacgaccaactcgacctggcatgcctcccatccaacctactcgggacatccttgtcagccaggtccaagaggttgaggcgaagaaggttaagcttgccaagaatatggccttcgccttcgatattgatggtgtcctcgtccatggcgacagattgattcctgagggtcagcgtgcccttgagattctcaacggcgataacgagctaggcattaagatcccgcacatctttttgaccaatggcagcggaaagcccgagaaggctcgctgcgaacagctgtccagaattttgaagaactccgttgacactgaacaattcatccagtctcacacgcccatgagtgctttggcctcatatttcaagacggtgcttgtcgttggcggtgtcggttatcgatgtcgcgaagttgccgaggaatacgggttcaaggatgttgttgttccaaacgacatcgttgcatgggaccctagcattgccccttatcgcgagttcacacagcaagaagcggccatgtcgagaccaagagactttagcaagtgcaatatcgacgccatcttggtattctctgactcgcgagactatgctacggatatgcaaatcatcatggatctattgctttccgagaatggccgtctcacaaccaaggcaaaggaccctgagtctcagcgtattcccatttatttctctcaaggcgacttgctttgcccaactgagcactggcaccctcgtatgtcgcagggtgcgttccgtgtcggccttgaagccatgtacaagactatgactggtgtcgaacttgagcgtgtcgtatatggtaaaccagaattggccacgtacaagtatgccgatgaagtcatggcttcttggatggatcagctccacggcgaggagaagctgccagagaacatctacatggttggggacaacccagcgtccgatattattggcgggaatatgtatggatggaatacctgccttgtacgcactggtgttttccaaggcggtgacaatgacgaggataaccctgccaacttcggcgtgttccctaatgtcctcgaggctgttcagaccgcgctacgaaaggagctagggaatgacttcaagatgaacttcgacgagaccataaatcctgtgctccacggtagcaaggctgacgcagctgctgttgtctag

SEQ ID NO: 6490 - protein, 498 aa, Muscodor strobelii
  misc_feature: SGI Peptide ID NO. 561906
  misc_feature (33)..(498): NCBI GI: 46127059 Blast Desc: FG07907.1 [Gibberella zeae PH-1]
  misc_feature (2)..(492): NCBI GI: 171688236 Blast Desc: protein product [Podospora anserina] gi|170944080|emb|CAP70190.1| protein product [Podospora anserina]
  misc_feature (21)..(495): NCBI GI: 169610191 Blast Desc: SNOG_08192 [Phaeosphaeria nodorum SN15] gi|111063348|gb|EAT84468.1| SNOG_08192 [Phaeosphaeria nodorum SN15]
  misc_feature (19)..(496): NCBI GI: 189204372 Blast Desc: cat eye syndrome critical region protein 5 precursor [Pyrenophora tritici-repentis Pt-1C-BFP] gi|187985620|gb|EDU51108.1| cat eye syndrome critical region 5
  misc_feature (1)..(498): NCBI GI: 39975509 Blast Desc: MGG_00099 [Magnaporthe grisea 70-15] gi|145019062|gb|EDK03341.1| MGG_00099 [Magnaporthe grisea 70-15]
  misc_feature (1)..(494): NCBI GI: 154314897 Blast Desc: CDP-alcohol phosphatidyltransferase [Botryotinia fuckeliana B05.10] gi|150848328|gb|EDN23521.1| CDP-alcohol phosphatidyltransferase [Botryotinia fuckeliana B05.10]
  misc_feature (1)..(494): NCBI GI: 156052653 Blast Desc: SS1G_06493 [Sclerotinia sclerotiorum 1980] gi|154704272|gb|EDO04011.1| SS1G_06493 [Sclerotinia sclerotiorum 1980]
  misc_feature (49)..(486): NCBI GI: 85092393 Blast Desc: NCU04924 [Neurospora crassa OR74A] gi|28920777|gb|EAA30136.1| NCU04924 [Neurospora crassa OR74A]
  misc_feature (2)..(497): NCBI GI: 116197028 Blast Desc: CHGG_05112 [Chaetomium globosum CBS 148.51] gi|88181025|gb|EAQ88493.1| CHGG_05112 [Chaetomium globosum CBS 148.51]
  misc_feature (1)..(494): NCBI GI: 159125419 Blast Desc: phosphatidyl synthase [Aspergillus fumigatus A1163]
  misc_feature: Useful for introducing or modulating the production of volatile compounds
MPMFEDVDFGVKAPTSPHQLQASSSRATSLAPHEQPQPIPGEHLGDDPIEIPATRSPYSDVSKYMHNLSISPSQKDRRSSRNSFGASLPIPRSKRRSRLSSVHNAETADGRPTRPGMPPIQPTRDILVSQVQEVEAKKVKLAKNMAFAFDIDGVLVHGDRLIPEGQRALEILNGDNELGIKIPHIFLTNGSGKPEKARCEQLSRILKNSVDTEQFIQSHTPMSALASYFKTVLVVGGVGYRCREVAEEYGFKDVVVPNDIVAWDPSIAPYREFTQQEAAMSRPRDFSKCNIDAILVFSDSRDYATDMQIIMDLLLSENGRLTTKAKDPESQRIPIYFSQGDLLCPTEHWHPRMSQGAFRVGLEAMYKTMTGVELERVVYGKPELATYKYADEVMASWMDQLHGEEKLPENIYMVGDNPASDIIGGNMYGWNTCLVRTGVFQGGDNDEDNPANFGVFPNVLEAVQTALRKELGNDFKMNFDETINPVLHGSKADAAAVV

SEQ ID NO: 6491 - DNA, 2519 bp, Muscodor strobelii
  misc_feature: SGI EST ID NO. CUFF.16254.0
  misc_feature: Variant of the nucleotide sequence at SEQ ID NO 6489
atggaattgaatacatcgcacagtcgttgtctcagacatcctggagtttccgtgggtgtggtcggaatatttgggttcttatccacacagaccatcgcgatgtctgctgagtggtgccaggcttgataagatgtgagtccaccgagatagactaatcttcaccattggacccctgagattgtgacagcccaccatgtcatgctgagatggatactcgacgcgtgaaaggggagaaaactctaataagtcagcacttctacgtcatgaggggcctaagcatgataagagttttcctcgcgaggagggatatcggcctgagagaatgaataaaagggctgacgatgggccggtgttcaggaaggcgaagagctccaagtggaatattctaatatccttcctctctcccttctccctacagtacttacagtgtatttgagccgccatccagctagtcgtgaacttgaggaaaacaactgcgttgagattcaacgcaaagacaacaagatgcctatgttcgaagatgtcgacttcggcgtgaaggcgcctactagccctcaccaattgcaagcctcatccagccgggcaacatctctggcgcctcatgagcagcctcaacccattccaggtgaacacctgggagacgatcccattgagattccagcaactaggtccccatactccgatgtctctaaatacatgcataacttgagcatctccccatcacagaaggatcggagatcttcgcgtaactccttcggagcgtcgctgcccatccctcgctctaagagacggtctcgcctctcatcggtacacaatgctgaaaccgctgatggacgaccaactcgacctggcatgcctcccatccaacctactcgggacatccttgtcagccaggtccaagaggttgaggcgaagaaggttaagcttgccaagaatatggccttcgccttcgatattgatggtgtcctcgtccatggcgacagattgattcctgagggtcagcgtgcccttgagattctcaacggcgataacgagctaggcattaagatcccgcacatctttttgaccaatggcagcggaaagcccgagaaggctcgctgcgaacagctgtccagaattttgaagaactccgttgacactgaacaattcatccagtctcacacgcccatgagtgctttggcctcatatttcaagacggtgcttgtcgttggcggtgtcggttatcgatgtcgcgaagttgccgaggaatacgggttcaaggatgttgttgttccaaacgacatcgttgcatgggaccctagcattgccccttatcgcgagttcacacagcaagaagcggccatgtcgagaccaagagactttagcaagtgcaatatcgacgccatcttggtattctctgactcgcgagactatgctacggatatgcaaatcatcatggatctattgctttccgagaatggccgtctcacaaccaaggcaaaggaccctgagtctcagcgtattcccatttatttctctcaaggcgacttgctttgcccaactgagcactggcaccctcgtatgtcgcagggtgcgttccgtgtcggccttgaagccatgtacaagactatgactggtgtcgaacttgagcgtgtcgtatatggtaaaccagaattggccacgtacaagtatgccgatgaagtcatggcttcttggatggatcagctccacggcgaggagaagctgccagagaacatctacatggttggggacaacccagcgtccgatattattggcgggaatatgtatggatggaatacctgccttgtacgcactggtgttttccaaggcggtgacaatgacgaggataaccctgccaacttcggcgtgttccctaatgtcctcgaggctgttcagaccgcgctacgaaaggagctagggaatgacttcaagatgaacttcgacgagaccataaatcctgtgctccacggtagcaaggctgacgcagctgctgttgtctagaggtggcgtcccaagagcaggatttttaacgatatgaatgattcaacaaaataactataccacctcatacctattaggccttgagtaactaggtagattgcattagcttcgtggcgttacattatagacggttggataagggcagaagaccctcgtggtttctaataagataggtgcttttcccataaaccgtgtgcgaagtctccgcgatcatggatgtgcatctacaaatcgaatgccactctgaaggagtctgacaagacctcctacagcgatgactgcccatactaatggcgatgggcgcaattttgcataattcctgacaatggtgctgtcccaatccaagtcgcacgcgtacaaagatgggagagtcttttctataatgacacagtgtcgtgaacgcaatgccaacatctgattaggcgtgatcgatgcgaagaatcatcatttctacaatcagtgggctggctccctagttcaacattgtcttgacagataagcagacagccttgagttgc

SEQ ID NO: 6492 - DNA, 870 bp, Muscodor strobelii
  misc_feature: SGI cDNA ID NO. 561907
  misc_feature: Encodes the peptide sequence at SEQ ID NO 6493
atggctcgaatcgctcgttatcttagtctgttgctcctgggagcgtcggcgactaccgccttcccgcgaataggggctggcatttgggacagaaacagcgtctttccccgtgacgctgatctaagcgctggcgcaaagggctctgtcggcgtgacgccccacacgttctactcatcgtcggttggtgtcatcggttgcaaagtcgacgtcaatcgcatggcatattggcctgcgtctattgactgcaacaacatctgcatatccttgaattatggcggtcgatctgtgaagctcctccgtgtcgatagttctcagggtgcttacgatgtcagctacgatgcctggaattatctagtcttcgggaagtccgccacgaaagatccccaagttggtggcgccattacgatggactatgaagtgctttcaccgaccgagtgcaagagtctcctgcatacaagcggccataagctacctctctctgcgtctaatagcatgaattatctttcaaactgcttaacggagcaacctgatagctgggtctcgaagaactatgttctatacaacatacaggatcccgtatgtagttttggatacgatgagacctgtacgctcgattggccgacacagaatacggccacatgtcctcacgctgtcgggtatccgaataatctgaccgctagcaataaagatgattgggtctacgacatcgaatacggcactggcgatcttcttctcgcttcgactttacagcacgttgatggaggagacgcggattctggctccgcacgaagtattccacgctcgttgaatccttcagtgctggtgatgttaataggttttatggcctacgagctgatgatgtcttgttag

SEQ ID NO: 6493 - protein, 289 aa, Muscodor strobelii
  misc_feature: SGI Peptide ID NO. 561907
  misc_feature (46)..(265): NCBI GI: 171678641 Blast Desc: protein product [Podospora anserina] gi|170937390|emb|CAP62048.1| protein product [Podospora anserina]
  misc_feature (46)..(278): NCBI GI: 39975287 Blast Desc: MGG_00210 [Magnaporthe grisea 70-15] gi|145018928|gb|EDK03207.1| MGG_00210 [Magnaporthe grisea 70-15]
  misc_feature (53)..(255): NCBI GI: 85091553 Blast Desc: NCU09719 [Neurospora crassa OR74A] gi|28920351|gb|EAA29722.1| conserved [Neurospora crassa OR74A]
  misc_feature (45)..(268): NCBI GI: 261356963 Blast Desc: conserved [Verticillium albo-atrum VaMs.102]
  misc_feature (43)..(282): NCBI GI: 46116258 Blast Desc: FG03971.1 [Gibberella zeae PH-1]
  misc_feature (47)..(283): NCBI GI: 256723477 Blast Desc: NECHADRAFT_69811 [Nectria haematococca mpVI 77-13-4]
  misc_feature (41)..(246): NCBI GI: 46117258 Blast Desc: FG04471.1 [Gibberella zeae PH-1]
  misc_feature (50)..(246): NCBI GI: 238481829 Blast Desc: conserved [Aspergillus flavus NRRL3357] gi|220700203|gb|EED56541.1| conserved [Aspergillus flavus NRRL3357]
  misc_feature (50)..(246): NCBI GI: 116203201 Blast Desc: CHGG_09485 [Chaetomium globosum CBS 148.51] gi|88178003|gb|EAQ85471.1| CHGG_09485 [Chaetomium globosum CBS 148.51]
  misc_feature (44)..(246): NCBI GI: 256729326 Blast Desc: [Nectria haematococca mpVI 77-13-4]
MARIARYLSLLLLGASATTAFPRIGAGIWDRNSVFPRDADLSAGAKGSVGVTPHTFYSSSVGVIGCKVDVNRMAYWPASIDCNNICISLNYGGRSVKLLRVDSSQGAYDVSYDAWNYLVFGKSATKDPQVGGAITMDYEVLSPTECKSLLHTSGHKLPLSASNSMNYLSNCLTEQPDSWVSKNYVLYNIQDPVCSFGYDETCTLDWPTQNTATCPHAVGYPNNLTASNKDDWVYDIEYGTGDLLLASTLQHVDGGDADSGSARSIPRSLNPSVLVMLIGFMAYELMMSC

SEQ ID NO: 6494 - DNA, 1965 bp, Muscodor strobelii
  misc_feature: SGI EST ID NO. CUFF.16257.0
  misc_feature: Variant of the nucleotide sequence at SEQ ID NO 6492
cttagatgctgtacctccaggcttgtgcctgccaagctcgcaccataagggtcctacacactagtccatactaggacagttcattaaacccgcgcagtccatcgcgacgggagaggtgcaacggcgacgttgggcggcgcaaccgacaatgtcgttctcttcctgcatcttcaccacataatatcctgttgctcggcccagtcgaggcacaactgcgcacaagatctgcccgtcgccctatctagggcgctgccacctactaggggcatgtcactcattatcagcccaatcatttgaatttgcattgaagtctgtcgctctttcaaaatggctcgaatcgctcgttatcttagtctgttgctcctgggagcgtcggcgactaccgccttcccgcgaataggggctggcatttgggacagaaacagcgtctttccccgtgacgctgatctaagcgctggcgcaaagggctctgtcggcgtgacgccccacacgttctactcatcgtcggttggtgtcatcggttgcaaagtcgacgtcaatcgcatggcatattggcctgcgtctattgactgcaacaacatctgcatatccttgaattatggcggtcgatctgtgaagctcctccgtgtcgatagttctcagggtgcttacgatgtcagctacgatgcctggaattatctagtcttcgggaagtccgccacgaaagatccccaagttggtggcgccattacgatggactatgaagtgctttcaccgaccgagtgcaagagtctcctgcatacaagcggccataagctacctctctctgcgtctaatagcatgaattatctttcaaactgcttaacggagcaacctgatagctgggtctcgaagaactatgttctatacaacatacaggatcccgtatgtagttttggatacgatgagacctgtacgctcgattggccgacacagaatacggccacatgtcctcacgctgtcgggtatccgaataatctgaccgctagcaataaagatgattgggtctacgacatcgaatacggcactggcgatcttcttctcgcttcgactttacagcacgttgatggaggagacgcggattctggctccgcacgaagtattccacgctcgttgaatccttcagtgctggtgatgttaataggttttatggcctacgagctgatgatgtcttgttagatgagttttacgatcgttgttcttcttgcattgtcatgcgcaatgtacgagtcatccacgcgcgacgttttgcttcttgtctttatcgatcttgctggtccttgcagtacaaccatttgtggcccctttcacgtttgtatgatatcaagagaggccgtgccacaccgaacgaatgatgttttgttcccggcagctttttaatgttactactcgatacccacgtcatgtatattttattaagaaaaagccagcatacagaacaacgactgtgttctctaaatttgctatgtttgtggaggatgtatcatgttatgacatgaattggttcccatttggactgcgactcctgccgaagtatgaccaagtagcagcgccagtacaaattcgtccaattcgctcatgcagacgcccgtaaatgagtttatcagcagggaaacggcaaacatacgcgctcgatagtgcgcgtgataatagagtcgcaatgccaggcagcccgatactccattccgcatgctaggaaagaggtcttcgaatgttacacaagaccaacgaggcagcagaactttctcattcctctgcctaaggtgacaaaccttaacaaccttatctttctagctacgactcacgcattcgacgtccgcaaagccacaagatccgccagcaatcagtacttactctgcccgctgttgatgcttccacttaatggctatgatcttttagagtcatgttacgctagagaaaatagcactttcataggttttgaaattg

SEQ ID NO: 6495 - DNA, 1110 bp, Muscodor strobelii
  misc_feature: SGI cDNA ID NO. 561908
  misc_feature: Encodes the peptide sequence at SEQ ID NO 6496
atggattccacacaggagtcgcccgctatgttcccagctaacccgatacccgaatactaccgtggaattatccacaaacatggtcattcattcggctcagtactttacggtctctacccaatggaagttcataacttcattaatccccttctcgtcgtacttttcgtcacaggcgatgattgggcttcctatcacggtgacgacggagaatataaaccattcgccccaaacggaaccgaaatgcagcagccgttacactataatgacattatcgaacgtagagagctctttacaagcactcatgcactctacgactcaatagtccgcgaagccacagaatggcttcgtcctacagcactcgagccaagaccatatggcgccactatgccatatggcggcgccggtctagctgacttttcacatgttccagatattgatgaaaatgctcctcttacaattaaacaagagcagaggctccaacttgagcgtgagcggagacgagaggcgctccatctcgagtggctcttagcagattcagactcggagtcggactcagatctggacacggagcttctctacttcgccggctattctgatgcctctgatctaaactcggatcgaggctccaatgatgactcagtctcagaagacagtgaccttgatatggatgtcgatgacaacgacgatgccaacaacagtggtgtcactctcgcaaacgatgtttcagaagtagcagagtcagatgatgaggattcagacgacgatcgtgatcacgaagatccacgctggctcatcaaactcccacagcgtcctgttttcccaagatatacggctgaacgacaagccatcggatataacgcaaaatccattaatcgttttgtttttggctatcataccccatatttcgacgatctcgcaaatcgcgctatgtcccaacggcttgcagatctccatcggcaacttgataatttgaaccagcgcttgtgggaagaaatgggcgacgacgcagacgaccaatcaacaacgcagcaacaacagactcctgtcgcagtgcaaacaaacatggcacaaccacaatttagaccagtcgtattcgcaaattatcgctaa

SEQ ID NO: 6496 - protein, 369 aa, Muscodor strobelii
  misc_feature: SGI Peptide ID NO. 561908
MDSTQESPAMFPANPIPEYYRGIIHKHGHSFGSVLYGLYPMEVHNFINPLLVVLFVTGDDWASYHGDDGEYKPFAPNGTEMQQPLHYNDIIERRELFTSTHALYDSIVREATEWLRPTALEPRPYGATMPYGGAGLADFSHVPDIDENAPLTIKQEQRLQLERERRREALHLEWLLADSDSESDSDLDTELLYFAGYSDASDLNSDRGSNDDSVSEDSDLDMDVDDNDDANNSGVTLANDVSEVAESDDEDSDDDRDHEDPRWLIKLPQRPVFPRYTAERQAIGYNAKSINRFVFGYHTPYFDDLANRAMSQRLADLHRQLDNLNQRLWEEMGDDADDQSTTQQQQTPVAVQTNMAQPQFRPVVFANYR

SEQ ID NO: 6497 - DNA, 1126 bp, Muscodor strobelii
  misc_feature: SGI EST ID NO. CUFF.16263.0
  misc_feature: Variant of the nucleotide sequence at SEQ ID NO 6495
ggcgccggtctagctgacttttcacatgttccagatattgatgaaaatgctcctcttacaattaaacaagagcagaggctccaacttgagcgtgagcggagacgagaggcgctccatctcgagtggctcttagcagattcagactcggagtcggactcagatctggacacggagcttctctacttcgccggctattctgatgcctctgatctaaactcggatcgaggctccaatgatgactcagtctcagaagacagtgaccttgatatggatgtcgatgacaacgacgatgccaacaacagtggtgtcactctcgcaaacgatgtttcagaagtagcagagtcagatgatgaggattcagacgacgatcgtgatcacgaagatccacgctggctcatcaaactcccacagcgtcctgttttcccaagatatacggctgaacgacaagccatcggatataacgcaaaatccattaatcgttttgtttttggctatcataccccatatttcgacgatctcgcaaatcgcgctatgtcccaacggcttgcagatctccatcggcaacttgataatttgaaccagcgcttgtgggaagaaatgggcgacgacgcagacgaccaatcaacaacgcagcaacaacagactcctgtcgcagtgcaaacaaacatggcacaaccacaatttagaccagtcgtattcgcaaattatcgctaaagttctttgaccgcgcccgtggccttgatgcggcggcgttgttcctccaatttgcctcatatgaaattgacgcaagataaaagtctcaattgagcaagcgattcttttcactctttcacgtagatgaggcgttccaacacacttcatgcttagaacttgcagggaagcaataagcacttccgacaaaatgctacatttaacgcttcaagaactcattccgcgaaacctcttcctgtagtgctgccaaaggggagccggcgctgtcccgacgttttctatcatttaaagatgatttgtgtgtcagatgagatgaatactactgagacattactctgctcctcttagtctcaatttgtacgtatcgaggtataagcggtactgtaagaaagggactatgggcaagcgataatca

SEQ ID NO: 6498 - DNA, 909 bp, Muscodor strobelii
  misc_feature: SGI cDNA ID NO. 561909
  misc_feature: Encodes the peptide sequence at SEQ ID NO 6499
atgaggctgctgaataccaagacctaccaggttgaagagtttttaggtcgagatgttccgagatattccatcttgtcgcatagatgggaaggcgaggaggtcttattaagcgatctcaactccggaaactaccaaaacatgaaaggatactcgaagattcttggctgttgtcggatctctcgtattgaaggattcaaatacacatggattgattcttgctgcatagacaagtcttcgagcgccgaactctccgaggccatcaactcaatgttcgcctggtataaggaggcggctgtttgttatgcttatctgagcgatgtgcttgctccatcagatctcgctgccagtaagtggtttgatcggggatggacgctacaggagttgattgcgccggacactttggtgtttcttgacgcaacctggcacgaatttggtacaagggcttccttggcgagtacagtttccgtagtctctgggattgacaaagaattattggatccaatgcggccgagagcagacgtaaccattcttctacgtcgacgttatcatgttgcaacgataatgtcgtgggcggcggcgaggacaacagcaaggctcgaagatcaggcctattgtcttatgggattgttcagcgttaacatgccgctcctgtacggggaaggccagaaagcgttctaccgcctacagcaagagatcatgcgtgatacagatgatgactcaatcttcgcttggcatcgaactggacattggtatggacgatattgcggcttgctcgcagattcccctgcttgcttttcaggtctgaacgctgcattttctgtcaagcagaagataaatccattctacaagttctccaaagcagacgacgagaagaccatagagttttcatcacggcgaacatggctttag

SEQ ID NO: 6499 - protein, 302 aa, Muscodor strobelii
  misc_feature: SGI Peptide ID NO. 561909
  misc_feature (22)..(127): Pfam Id: PF06985 Pfam Desc: Heterokaryon incompatibility protein (HET)
  misc_feature (22)..(105): Pfam Id: PF06985 Pfam Desc: Heterokaryon incompatibility protein (HET)
  misc_feature (112)..(127): Pfam Id: PF06985 Pfam Desc: Heterokaryon incompatibility protein (HET)
  misc_feature (1)..(293): NCBI GI: 46139867 Blast Desc: FG11448.1 [Gibberella zeae PH-1]
  misc_feature (1)..(279): NCBI GI: 121715886 Blast Desc: HET domain protein [Aspergillus clavatus NRRL 1] gi|119403709|gb|EAW14126.1| HET domain protein [Aspergillus clavatus NRRL 1]
  misc_feature (1)..(266): NCBI GI: 115437654 Blast Desc: [Aspergillus terreus NIH2624] gi|114188680|gb|EAU30380.1| [Aspergillus terreus NIH2624]
  misc_feature (1)..(265): NCBI GI: 145246214 Blast Desc: An12g02770 [Aspergillus niger] gi|134080070|emb|CAK41116.1| protein product [Aspergillus niger]
  misc_feature (1)..(267): NCBI GI: 256722255 Blast Desc: NECHADRAFT_52327 [Nectria haematococca mpVI 77-13-4]
  misc_feature (1)..(246): NCBI GI: 256732223 Blast Desc: NECHADRAFT_93752 [Nectria haematococca mpVI 77-13-4]
  misc_feature (1)..(267): NCBI GI: 256731212 Blast Desc: NECHADRAFT_101749 [Nectria haematococca mpVI 77-13-4]
  misc_feature (1)..(276): NCBI GI: 238493477 Blast Desc: conserved [Aspergillus flavus NRRL3357] gi|220696469|gb|EED52811.1| conserved [Aspergillus flavus NRRL3357]
  misc_feature (1)..(280): NCBI GI: 154318644 Blast Desc: BC1G_02711 [Botryotinia fuckeliana B05.10] gi|150857841|gb|EDN33033.1| BC1G_02711 [Botryotinia fuckeliana B05.10]
  misc_feature (1)..(281): NCBI GI: 119481395 Blast Desc: HET domain protein [Neosartorya fischeri NRRL 181] gi|119408880|gb|EAW18829.1| HET domain protein [Neosartorya fischeri NRRL 181]
MRLLNTKTYQVEEFLGRDVPRYSILSHRWEGEEVLLSDLNSGNYQNMKGYSKILGCCRISRIEGFKYTWIDSCCIDKSSSAELSEAINSMFAWYKEAAVCYAYLSDVLAPSDLAASKWFDRGWTLQELIAPDTLVFLDATWHEFGTRASLASTVSVVSGIDKELLDPMRPRADVTILLRRRYHVATIMSWAAARTTARLEDQAYCLMGLFSVNMPLLYGEGQKAFYRLQQEIMRDTDDDSIFAWHRTGHWYGRYCGLLADSPACFSGLNAAFSVKQKINPFYKFSKADDEKTIEFSSRRTWL

SEQ ID NO: 6500 - DNA, 1938 bp, Muscodor strobelii
  misc_feature: SGI cDNA ID NO. 561910
  misc_feature: Encodes the peptide sequence at SEQ ID NO 6501
atgcatgatctgtctgccgttgctattatggtcgctgcctcggaggttgataccgtcaataacatcattccgaagttattctacgaagtgaagaagccaaaaaactggacaccacccggtcacgacttttcaactgcctcagacaactgttcacgcaaccatcatgtcacaattgacagtaagattggtaatccagcgattatatttgaagtacagattaatccatttgaaaattttctttataacctgctttcgcacgattgggttttcaaggacaaaaacgggcccatgaaagagggcgacaagctcatcctcgaggcggccaatctctcggcccgcagttatggcttggtattacaatacttcaaatggcggaaggaggaaaatatgtcacactctcctgcccccagatcactgaattttggcgcgacagctggctttgaacatttggtggaaacagttatccaagaacgccgtgacacatggcccgaaaagttcaaacaagcatctacagcgccatttggaaacatacagagttttcggaatgacacccttgctgataagcctaagattcggcttctggtcatcgatggaggtggtcttcgcgggctctcgtcattgtacatcttggagtcgctgatgcatagtatcaatcatggtcgtgaattacataagaatctgaagccagtcgaaaagccgagccaagtctttgacatgattgggggcacaggcacaggcggcctcatcgcggtcatgcttggtcggctgaacatgacgatcaaggagtgcatcgtagcctataaagatatcatgcaacgaatttcctcgataggcaatatgaaaccaccattagacacggaagacttatccggaatcatcgaaaagatctgtggtattgagcaaccattttacgatacatcagcgacatgtggcgttcaagtggcaatagcgactttgtccgtaccaaagatatttcggcccaccaaagacaacctgcagggcagcgcgccgggtcgttgcaatccagcagcgtatgctgcagctcagatcagagaacgttgcgagactgagacagaagatcagctcaaaaaacgacttgcctgttttatctcgattggcacaggcattagatttttgaatatgcctaacgcctttctggagctggctgagccaatgaatgaaatagctaacggaatcaaggtcagtaacacagatatccataagaattggaacccaacgggattgtaccatcgcttcgacgtccccgagctcaattccgtgaacggattcgaatgggaagtgtccgaagacatccagaataaaaccactgtgtatttgcaagagaaggaacatgatatagaacgatgtgttgcaatgatgcttcaggacgatgtctttctccagattgacgctcaaatcgagagtggccaaaattgttgggttgacgatggtcctgtaaggcctgctgttccagattttgcacaattttatttttggagagcggagtcgttgctcgcggagatcaaagagccaaccgaccattattactccaagtacgtggatattttggcatgccaaatcatgacatgggccatcaagatcgaagcacggccattggatcagggacactcaaagaaggcggacaagtataaaaaaagaggagaagccgacatcgaccgcgcacgagacctcgcagatcatgtcaagaagccagaacttaggcgccagaaaggccacaagatcgatgttgtatcattgttcttcgaacgctccaagcaagtgttagaaagtaactctgtgctcgaaagaaagagcatactcgagaaggtggatgttctgcgagctgagatcggccaggcgaagcatgatctcgctacacaggagctcttgcaagacttacaaaagcagctccacgaagacatcaaacacatggtatga

SEQ ID NO: 6501 - protein, 645 aa, Muscodor strobelii
  misc_feature: SGI Peptide ID NO. 561910
  misc_feature (194)..(347): Pfam Id: PF01734 Pfam Desc: Patatin-like phospholipase
  misc_feature (194)..(298): Pfam Id: PF01734 Pfam Desc: Patatin-like phospholipase
  misc_feature (175)..(296): NCBI GI: 169624186 Blast Desc: SNOG_15348 [Phaeosphaeria nodorum SN15] gi|111056161|gb|EAT77281.1| SNOG_15348 [Phaeosphaeria nodorum SN15]
  misc_feature (187)..(375): NCBI GI: 115383824 Blast Desc: [Aspergillus terreus NIH2624] gi|114196151|gb|EAU37851.1| [Aspergillus terreus NIH2624]
  misc_feature (187)..(377): NCBI GI: 159130287 Blast Desc: conserved [Aspergillus fumigatus A1163]
  misc_feature (191)..(431): NCBI GI: 169618527 Blast Desc: SNOG_12454 [Phaeosphaeria nodorum SN15] gi|160703629|gb|EAT80267.2| SNOG_12454 [Phaeosphaeria nodorum SN15]
  misc_feature (191)..(421): NCBI GI: 116195872 Blast Desc: CHGG_04534 [Chaetomium globosum CBS 148.51] gi|88180447|gb|EAQ87915.1| CHGG_04534 [Chaetomium globosum CBS 148.51]
  misc_feature (187)..(453): NCBI GI: 255930795 Blast Desc: Pc12g00510 [Penicillium chrysogenum Wisconsin 54-1255] gi|211581573|emb|CAP79678.1| Pc12g00510 [Penicillium chrysogenum Wisconsin 54-1255]
  misc_feature (133)..(276): NCBI GI: 256733327 Blast Desc: NECHADRAFT_77287 [Nectria haematococca mpVI 77-13-4]
  misc_feature (186)..(464): NCBI GI: 116201095 Blast Desc: CHGG_08432 [Chaetomium globosum CBS 148.51] gi|88176950|gb|EAQ84418.1| CHGG_08432 [Chaetomium globosum CBS 148.51]
  misc_feature (193)..(448): NCBI GI: 256723127 Blast Desc: NECHADRAFT_81163 [Nectria haematococca mpVI 77-13-4]
  misc_feature (178)..(314): NCBI GI: 170088935 Blast Desc: [Laccaria bicolor S238N-H82] gi|164648950|gb|EDR13192.1| [Laccaria bicolor S238N-H82]
MHDLSAVAIMVAASEVDTVNNIIPKLFYEVKKPKNWTPPGHDFSTASDNCSRNHHVTIDSKIGNPAIIFEVQINPFENFLYNLLSHDWVFKDKNGPMKEGDKLILEAANLSARSYGLVLQYFKWRKEENMSHSPAPRSLNFGATAGFEHLVETVIQERRDTWPEKFKQASTAPFGNIQSFRNDTLADKPKIRLLVIDGGGLRGLSSLYILESLMHSINHGRELHKNLKPVEKPSQVFDMIGGTGTGGLIAVMLGRLNMTIKECIVAYKDIMQRISSIGNMKPPLDTEDLSGIIEKICGIEQPFYDTSATCGVQVAIATLSVPKIFRPTKDNLQGSAPGRCNPAAYAAAQIRERCETETEDQLKKRLACFISIGTGIRFLNMPNAFLELAEPMNEIANGIKVSNTDIHKNWNPTGLYHRFDVPELNSVNGFEWEVSEDIQNKTTVYLQEKEHDIERCVAMMLQDDVFLQIDAQIESGQNCWVDDGPVRPAVPDFAQFYFWRAESLLAEIKEPTDHYYSKYVDILACQIMTWAIKIEARPLDQGHSKKADKYKKRGEADIDRARDLADHVKKPELRRQKGHKIDVVSLFFERSKQVLESNSVLERKSILEKVDVLRAEIGQAKHDLATQELLQDLQKQLHEDIKHMV

SEQ ID NO: 6502 - DNA, 1158 bp, Muscodor strobelii
  misc_feature: SGI cDNA ID NO. 561911
  misc_feature: Encodes the peptide sequence at SEQ ID NO 6503
atggcattatttccgacgcgtatggcttcctctgagatgcttcatctacactatcgaaaagtcgtcaacctcactgagcgatactgtaatggcccagaaggcttccaaaaatcgggcacttttcctcgaaccatccgcaaactcgtaccaatatctggtaaacaccctggattggttcggggttgttgctcaatcctacttactaaattgaatcagttctcgtggataggtttagttctagtcgactcaccaccactagaatcgaatgtatccatcacgtccgagatcaatgatagatcctcctatctaccaagagccctacaacctctccaagaaggatttgaagattttgaggagccactcccttttagtaaatttcgctcaactcctcgtgaaagtagtatcggcaagaaacgacagtcgacatcacttcttgaggttctccttgagtattccgtgagagcaccacctgccttcgacccatccaagccatcgatcatgtgtctgagctactacgctctccgaacgatagcagccgaatggatgctttacgcacgtctcctttctgcgtacctgaagtactacgaatactccttccatacatttgatcaacatccaatcgaggccgacctcagtgatcttcaacggtggcgacgacgttgtaaacagtcttcacacaaactacgagttctggagctgtttcttgataaacaaatctcgatctcagagcatggtagcgacctatcgccttatgctagcctccgagacgacttccgataccttgcatctgatattgatcactcgtgtcactatctcgagcttatcttgcctgtgacagcaacagttgtccagctcgtagacgcgcgaagatcaatgagtgaagctgtcaatgtgagatatctcacgtacattggattggtgttcgtacctctcacatttgtctcgggaatttttagcatgagcgatggattcgtcccaggacagaagaacttctgggtatacacggcagtagctgtgcctttgttgaccttggttttgggaacttcaatgatcgcatcggaagcgggaagggagaggcgcgatgctttcaaggccagggtatttgaaatcagtcggaagctatcgcaatacttcatgggacttgccaaacctgcttga

SEQ ID NO: 6503 - protein, 385 aa, Muscodor strobelii
  misc_feature: SGI Peptide ID NO. 561911
  misc_feature (1)..(338): NCBI GI: 171678527 Blast Desc: protein product [Podospora anserina] gi|170937333|emb|CAP61991.1| protein product [Podospora anserina]
  misc_feature (2)..(349): NCBI GI: 145607946 Blast Desc: MGG_09963 [Magnaporthe grisea 70-15] gi|145015420|gb|EDJ99956.1| MGG_09963 [Magnaporthe grisea 70-15]
  misc_feature (7)..(346): NCBI GI: 242763409 Blast Desc: conserved [Talaromyces stipitatus ATCC 10500] gi|218723765|gb|EED23182.1| conserved [Talaromyces stipitatus ATCC 10500]
  misc_feature (1)..(369): NCBI GI: 46120426 Blast Desc: FG04860.1 [Gibberella zeae PH-1]
  misc_feature (4)..(321): NCBI GI: 256728154 Blast Desc: NECHADRAFT_54193 [Nectria haematococca mpVI 77-13-4]
  misc_feature (4)..(346): NCBI GI: 256725035 Blast Desc: NECHADRAFT_26045 [Nectria haematococca mpVI 77-13-4]
  misc_feature (14)..(346): NCBI GI: 46127773 Blast Desc: FG08264.1 [Gibberella zeae PH-1]
  misc_feature (58)..(368): NCBI GI: 46107996 Blast Desc: FG00880.1 [Gibberella zeae PH-1]
  misc_feature (174)..(349): NCBI GI: 242788204 Blast Desc: conserved [Talaromyces stipitatus ATCC 10500] gi|218721318|gb|EED20737.1| conserved [Talaromyces stipitatus ATCC 10500]
  misc_feature (174)..(349): NCBI GI: 212543973 Blast Desc: conserved [Penicillium marneffei ATCC 18224] gi|210067048|gb|EEA21141.1| conserved [Penicillium marneffei ATCC 18224]
MALFPTRMASSEMLHLHYRKVVNLTERYCNGPEGFQKSGTFPRTIRKLVPISGKHPGLVRGCCSILLTKLNQFSWIGLVLVDSPPLESNVSITSEINDRSSYLPRALQPLQEGFEDFEEPLPFSKFRSTPRESSIGKKRQSTSLLEVLLEYSVRAPPAFDPSKPSIMCLSYYALRTIAAEWMLYARLLSAYLKYYEYSFHTFDQHPIEADLSDLQRWRRRCKQSSHKLRVLELFLDKQISISEHGSDLSPYASLRDDFRYLASDIDHSCHYLELILPVTATVVQLVDARRSMSEAVNVRYLTYIGLVFVPLTFVSGIFSMSDGFVPGQKNFWVYTAVAVPLLTLVLGTSMIASEAGRERRDAFKARVFEISRKLSQYFMGLAKPA

SEQ ID NO: 6504 - DNA, 1914 bp, Muscodor strobelii
  misc_feature: SGI cDNA ID NO. 561912
  misc_feature: Encodes the peptide sequence at SEQ ID NO 6505
atggatggccgttcagcaagccccacggccgggacacataaatcacaacctaattcgcgatggagctggtcaaaatggaagactctacttttccgcaagagagtcgctatccccggaaccctcagcatcatcatcgtcatcatgattccgatcctggttgtcgtgctgcttcatatggccaggatggctatgggtggtgcagctggccccactgggaagccgaatatcgtgttcatcatgtccgatgaccaggatagacgacttggatctttagatcgtatgacagcagttcagcaagaactcatagcaaagggaacggagttcacgaatcactatacaaatcaagcgctgtgttgcccgtcaagatctacaattctgcgaggtcagacagtccacaacaccaatctgaccaatgttgtcaagcctggcggatcatacaacaaatgggttgaatctggtcaagacacgaattacttgccacactggctccacaaggcaggatatcggactgaatatatcggcaagatcatgaacggttatggtatcacgaacttcgacgtcaagtctaaagggtgggactggagcgacctcctcgtcgaaccgtatatcgacgatttcaattctccagttctgtccaagaatggcgagcgaccggtgtattacaaaggttaccaccaaactgacattattcgcattaaggcaccaatccctcttcagcgacatttagagctgtatccagacgtcaaggctccaaggactccgaacttcaatccctcggatgagcagcaagccaacgctggtggttgggtcaagaccttgttacccatgaataactcagcggtcaactttgcggacttcgtctatcggtctcgcttacaagcagttgctggcgttgacgaaattgtggaagatgttattaagatgcttgaattcaagggtgtactcgataacacatacgtcatcttcacgtcagataatggctatcacgttggccaacacagaatgccggcaggaaaatcgctattttacaacgaggacacgaatctaccatttgtggttcgcgggccgggagtgcccaagaatgtgtcatcccacattccaagcctacatctcgatcttgcgccaacgtttcttgacatcgccggtgttaatagctcagattttcccgtgttttttgatggccgtagcctactatcgcaatggcacgatccaacttcttcatcagcagctggcacagcggcagggcagggaaactcgaaagagagcatcaatattgagtattggggaaatgcaggtattgaagctccgagtgctggaaaattaggttcaccatttgaggacacaagctacaagactattcgactcttgggcatggagcaaagctgggtctataccgtctggtgctcgggagacaaggagttgtacaatacagctgctgatccctatgagcttgtgaaccttgcacacaatacggactcggcacgactagtgaatcgactgaacgcgctattaatggtcacaaaatcatgcgaacagaacagctgtcgcgatccatgggctctgttgaagcccaaagttggagcaaacacggtccgactttcatcccttacacaggccatgaacggtacatacgacagtttctttgcggacttcgaaaaggtttcgtttgatacttgcctggccgtgcaattggttactaacgaaagaccttactttccggctctggacacgctcagtggaggtgggttaggccgtgcgtatcggaacgaaacgatcaatatcaaggctgcaggcggcgcgcgtgtaattgctacaccggattattatggtacagctgcacagagaaatgcaacaattcaaaacattacggcagtttcccgggtcttgaccgacgaggagcttgctgcaagatag

SEQ ID NO: 6505 - protein, 637 aa, Muscodor strobelii
  misc_feature: SGI Peptide ID NO. 561912
  misc_feature (72)..(486): Pfam Id: PF00884 Pfam Desc: Sulfatase
  misc_feature (241)..(486): Pfam Id: PF00884 Pfam Desc: Sulfatase
  misc_feature (72)..(175): Pfam Id: PF00884 Pfam Desc: Sulfatase
  misc_feature (53)..(635): NCBI GI: 145615374 Blast Desc: MGG_05540 [Magnaporthe grisea 70-15] gi|145022215|gb|EDK06235.1| MGG_05540 [Magnaporthe grisea 70-15]
  misc_feature (60)..(634): NCBI GI: 145604811 Blast Desc: MGG_07920 [Magnaporthe grisea 70-15] gi|145012735|gb|EDJ97389.1| MGG_07920 [Magnaporthe grisea 70-15]
  misc_feature (72)..(575): NCBI GI: 169779723 Blast Desc: [Aspergillus oryzae RIB40] gi|83773065|dbj|BAE63193.1| protein product [Aspergillus oryzae]
  misc_feature (52)..(570): NCBI GI: 119488189 Blast Desc: arylsulfatase [Neosartorya fischeri NRRL 181] gi|119410795|gb|EAW20740.1| arylsulfatase [Neosartorya fischeri NRRL 181]
  misc_feature (69)..(575): NCBI GI: 238500393 Blast Desc: arylsulfatase, [Aspergillus flavus NRRL3357] gi|220693184|gb|EED49530.1| arylsulfatase, [Aspergillus flavus NRRL3357]
  misc_feature (73)..(573): NCBI GI: 255939408 Blast Desc: Pc16g00510 [Penicillium chrysogenum Wisconsin 54-1255] gi|211585096|emb|CAP92721.1| Pc16g00510 [Penicillium chrysogenum Wisconsin 54-1255]
  misc_feature (73)..(570): NCBI GI: 119483994 Blast Desc: arylsulfatase, [Neosartorya fischeri NRRL 181] gi|119410056|gb|EAW20003.1| arylsulfatase, [Neosartorya fischeri NRRL 181]
  misc_feature (73)..(570): NCBI GI: 70982853 Blast Desc: arylsulfatase [Aspergillus fumigatus Af293] gi|66844579|gb|EAL84916.1| arylsulfatase, [Aspergillus fumigatus Af293] gi|159123838|gb|EDP48957.1| arylsulfatase, [Aspergillus
  misc_feature (55)..(570): NCBI GI: 258572460 Blast Desc: conserved [Uncinocarpus reesii 1704] gi|237905262|gb|EEP79663.1| conserved [Uncinocarpus reesii 1704]
  misc_feature (71)..(572): NCBI GI: 145251061 Blast Desc: An15g05130 [Aspergillus niger] gi|134082572|emb|CAK42487.1| protein product [Aspergillus niger]
  misc_feature (73)..(572): SWISSPROT Homolog: EC 3.1.6.1 Arylsulfatase
MDGRSASPTAGTHKSQPNSRWSWSKWKTLLFRKRVAIPGTLSIIIVIMIPILVVVLLHMARMAMGGAAGPTGKPNIVFIMSDDQDRRLGSLDRMTAVQQELIAKGTEFTNHYTNQALCCPSRSTILRGQTVHNTNLTNVVKPGGSYNKWVESGQDTNYLPHWLHKAGYRTEYIGKIMNGYGITNFDVKSKGWDWSDLLVEPYIDDFNSPVLSKNGERPVYYKGYHQTDIIRIKAPIPLQRHLELYPDVKAPRTPNFNPSDEQQANAGGWVKTLLPMNNSAVNFADFVYRSRLQAVAGVDEIVEDVIKMLEFKGVLDNTYVIFTSDNGYHVGQHRMPAGKSLFYNEDTNLPFVVRGPGVPKNVSSHIPSLHLDLAPTFLDIAGVNSSDFPVFFDGRSLLSQWHDPTSSSAAGTAAGQGNSKESINIEYWGNAGIEAPSAGKLGSPFEDTSYKTIRLLGMEQSWVYTVWCSGDKELYNTAADPYELVNLAHNTDSARLVNRLNALLMVTKSCEQNSCRDPWALLKPKVGANTVRLSSLTQAMNGTYDSFFADFEKVSFDTCLAVQLVTNERPYFPALDTLSGGGLGRAYRNETINIKAAGGARVIATPDYYGTAAQRNATIQNITAVSRVLTDEELAAR

SEQ ID NO: 6506 - DNA, 336 bp, Muscodor strobelii
  misc_feature: SGI EST ID NO. CUFF.16309.0
  misc_feature: Variant of the nucleotide sequence at SEQ ID NO 6504
atcggactgaatgtaagcatgaaggacacttgctgcttaactttacgctgaccggattcaagatatcggcaagatcatgaacggttatggtatcacgaacttcgacgtcaagtctaaagggtgggactggagcgacctcctcgtatgccatattctcaaatcctaattagtctatattctcacatattgcaggtcgaaccgtatatcgacgatttcaattctccagttctgtccaagaatggcgagcgaccggtgtattacaaaggttaccaccaaactgacattattcgcattaaggcgcttgaccggctggattatcttacaacccagtctgag

SEQ ID NO: 6507 - DNA, 564 bp, Muscodor strobelii
  misc_feature: SGI cDNA ID NO. 561913
  misc_feature: Encodes the peptide sequence at SEQ ID NO 6508
atgggtgttgctgtcacctcaagcgtcgacagcgcagtgtcgccaagccaggatggcgctaatcttcgcctaacattccctacaaccaccgtcactaaagctggcctcaatctcactaaggaagaagcgaagactaccccaacactgtcgattgccgcctcggcactcaatgccaccccaggcactaagtacattgtcgcgtctattgatctagatgccccattcacatctttcaatttcatgagcccgatcttgcatggtcttcacgccgacgtcgttgccggacctgccggcgatgacggatttgccccgctagaaggcactgccgaatggatggttccctacagaggcccaggaccgccaccacccagcgaccctcaccgttatgtcttccttgtattcgaacagcctcaggaactagacaccgccaagatcaagagcaagcttggattcggtgaggaagttggtatctggcccagaatccgctgggaccaagtaggatttgagaagaagctaggtctgggagaggctttaacggcgacttatttcctcacaaagggctaa

SEQ ID NO: 6508 - protein, 187 aa, Muscodor strobelii
  misc_feature: SGI Peptide ID NO. 561913
  misc_feature (14)..(171): Pfam Id: PF01161 Pfam Desc: Phosphatidylethanolamine-binding protein
  misc_feature (113)..(144): Pfam Id: PF01161 Pfam Desc: Phosphatidylethanolamine-binding protein
  misc_feature (21)..(185): NCBI GI: 171679179 Blast Desc: protein product [Podospora anserina] gi|170937661|emb|CAP62319.1| protein product [Podospora anserina]
  misc_feature (7)..(185): NCBI GI: 85104731 Blast Desc: NCU06524 [Neurospora crassa OR74A] gi|28923371|gb|EAA32560.1| [Neurospora crassa OR74A]
  misc_feature (41)..(183): NCBI GI: 255956099 Blast Desc: Pc21g18070 [Penicillium chrysogenum Wisconsin 54-1255] gi|211590513|emb|CAP96704.1| Pc21g18070 [Penicillium chrysogenum Wisconsin 54-1255]
  misc_feature (7)..(183): NCBI GI: 119500910 Blast Desc: protease inhibitor (Tfs1), [Neosartorya fischeri NRRL 181] gi|119415377|gb|EAW25315.1| protease inhibitor (Tfs1), [Neosartorya fischeri NRRL 181]
  misc_feature (7)..(183): NCBI GI: 70994470 Blast Desc: protease inhibitor (Tfs1) [Aspergillus fumigatus Af293] gi|66849648|gb|EAL89976.1| protease inhibitor (Tfs1), [Aspergillus fumigatus Af293] gi|159125073|gb|EDP50190.1| (Tfs1),
  misc_feature (35)..(186): NCBI GI: 212536666 Blast Desc: phosphatidylethanolamine-binding protein, [Penicillium marneffei ATCC 18224] gi|210070888|gb|EEA24978.1| phosphatidylethanolamine-binding protein, [Penicillium marneffei
  misc_feature (15)..(186): NCBI GI: 242796588 Blast Desc: protease inhibitor (Tfs1), [Talaromyces stipitatus ATCC 10500] gi|218719418|gb|EED18838.1| protease inhibitor (Tfs1), [Talaromyces stipitatus ATCC 10500]
  misc_feature (43)..(186): NCBI GI: 156053888 Blast Desc: SS1G_05792 [Sclerotinia sclerotiorum 1980] gi|154703572|gb|EDO03311.1| SS1G_05792 [Sclerotinia sclerotiorum 1980]
  misc_feature (6)..(186): NCBI GI: 238497708 Blast Desc: protease inhibitor (Tfs1), [Aspergillus flavus NRRL3357] gi|220693363|gb|EED49708.1| protease inhibitor (Tfs1), [Aspergillus flavus NRRL3357]
  misc_feature (6)..(186): NCBI GI: 169768404 Blast Desc: [Aspergillus oryzae RIB40] gi|83766530|dbj|BAE56670.1| protein product [Aspergillus oryzae]
MGVAVTSSVDSAVSPSQDGANLRLTFPTTTVTKAGLNLTKEEAKTTPTLSIAASALNATPGTKYIVASIDLDAPFTSFNFMSPILHGLHADVVAGPAGDDGFAPLEGTAEWMVPYRGPGPPPPSDPHRYVFLVFEQPQELDTAKIKSKLGFGEEVGIWPRIRWDQVGFEKKLGLGEALTATYFLTKG

SEQ ID NO: 6509 - DNA, 1379 bp, Muscodor strobelii
  misc_feature: SGI EST ID NO. CUFF.16326.0
  misc_feature: Variant of the nucleotide sequence at SEQ ID NO 6507
ggcaggtagccggtaacggtccgtagtaaccactataaattgtttcatctgccgtatctgaaccgaacccgtcttcgacacgcacagttgctgtgacattatatcatcgagcactataaaactcagtcagtgacctagtgatcatcttttcaactgatcattttcattcagctcaatctcacatccctcaattaattctacacatcggacatcacaggctcaaaatgggtgttgctgtcacctcaagcgtcgacagcgcagtgtcgccaagccaggatggcgctaatcttcgcctaacattccctacaaccaccgtcactaaagctggcctcaatctcactaaggaagaagcgaagactaccccaacactgtcgattgccgcctcggcactcaatgccaccccaggcactaagtacattgtcgcgtctattgatctagatgccccattcacatctttcaatttcatgagcccgatcttgcatggtcttcacgccgacgtcgttgccggacctgccggcgatgacggatttgccccgctagaaggcactgccgaatggatggttccctacagaggcccaggaccgccaccacccagcgaccctcaccgttatgtcttccttgtattcgaacagcctcaggaactagacaccgccaagatcaagagcaagcttggattcggtgaggaagttggtatctggcccagaatccgctgggaccaagtaggatttgagaagaagctaggtctgggagaggctttaacggcgacttatttcctcacaaagggctaatcggcttgagtcaaaaattgcacgtcaatactgaatgcaggaatgaatggacttgattgtactgggatcgtcattactgcttatttctgttcttataccctcactggcgcaatgagcaaatcgctgtctatttcaataaaatgatgaattcctacaaattaatctcttaagctcacaaatatgtgtgctattatagatgtcccacgcagttacttgtcatgtagcaaacagcatgagctctcgagaacaaatccatagtttaagatcattgttttaacatgctatttggacgacattcgccaagagtgtaaacgcgtatcaacattaagggatcctcgcggtttgcccgccgggctcaacacccgatcggtattccttttgcttcatggtgttcttgtcgggagcccttttcatattgttcactccatcagcaaactgctcgcacgtcaacacgaacccccatcctccagcacagttgaattcaacatcctgttgtgcaaatcccgggcttgttgtagccgttccgtcacttaggagaaggcagtcccagcctttgttgaaagcaccttgcagggtgcccgcgacacattg

SEQ ID NO: 6510 - DNA, 927 bp, Muscodor strobelii
  misc_feature: SGI cDNA ID NO. 561914
  misc_feature: Encodes the peptide sequence at SEQ ID NO 6511
atgagtacagatagagcagaagtcatcggccacaagaacttttggctccattccaaggaaaagggctatgatattacgcatccgctctctccaacctcatctcccattttccctcgggtaccgctggaaacgacaagtggtctcgtagcagtcgatccctctaaaacagcacttgttgtgatagacttacagaactacttcttggccccggagcttggtcgtcccacggacagtgtcggcttagaggtcaccaagaagctcctgcaatatgtagtcccttcttgcagaaaagctcggatttctatcgtctggcttgggtggggattgaccgagaacgacattgacgaaatgcccccgacaatagtcagaggatttggcgctgataccaattttgttggcaatgaaacaatcggcccgctgggagcagagattggtcgtttgaaacttggacataacggtgccattgtggatggcggccgagttctaatgaaaaatcagtggaactcggaattttaccatctgctccacgatcaagttgaagatgacgatattcaagtttacaaaaaccgtctatcgggcttttggggcgagactggcctcgaggaggcattgacctgtcgcggcatcagaactttactgttctctggttgcaacactgatcaatgtgtcgcgggcaccctgcaaggtgctttcaacaaaggctgggactgccttctcctaagtgacggaacggctacaacaagcccgggatttgcacaacaggatgttgaattcaactgtgctggaggatgggggttcgtgttgacgtgcgagcagtttgctgatggagtgaacaatatgaaaagggctcccgacaagaacaccatgaagcaaaaggaataccgatcgggtgttgagcccggcgggcaaaccgcgaggatcccttaa

SEQ ID NO: 6511 - protein, 308 aa, Muscodor strobelii
  misc_feature: SGI Peptide ID NO. 561914
  misc_feature (51)..(275): Pfam Id: PF00857 Pfam Desc: Isochorismatase family
  misc_feature (179)..(275): Pfam Id: PF00857 Pfam Desc: Isochorismatase family
  misc_feature (51)..(70): Pfam Id: PF00857 Pfam Desc: Isochorismatase family
  misc_feature (1)..(285): NCBI GI: 256731459 Blast Desc: NECHADRAFT_84930 [Nectria haematococca mpVI 77-13-4]
  misc_feature (5)..(271): NCBI GI: 189206566 Blast Desc: isochorismatase family protein [Pyrenophora tritici-repentis Pt-1C-BFP] gi|187975710|gb|EDU42336.1| isochorismatase family protein [Pyrenophora tritici-repentis
  misc_feature (49)..(271): NCBI GI: 115389282 Blast Desc: [Aspergillus terreus NIH2624] gi|114194542|gb|EAU36242.1| [Aspergillus terreus NIH2624]
  misc_feature (8)..(280): NCBI GI: 39940872 Blast Desc: MGG_05348 [Magnaporthe grisea 70-15] gi|145021976|gb|EDK05996.1| MGG_05348 [Magnaporthe grisea 70-15]
  misc_feature (56)..(279): NCBI GI: 169621227 Blast Desc: SNOG_13822 [Phaeosphaeria nodorum SN15] gi|160704208|gb|EAT78846.2| SNOG_13822 [Phaeosphaeria nodorum SN15]
  misc_feature (12)..(274): NCBI GI: 258570999 Blast Desc: [Uncinocarpus reesii 1704] gi|237904573|gb|EEP78974.1| [Uncinocarpus reesii 1704]
  misc_feature (1)..(260): NCBI GI: 169608267 Blast Desc: SNOG_07203 [Phaeosphaeria nodorum SN15] gi|111064734|gb|EAT85854.1| SNOG_07203 [Phaeosphaeria nodorum SN15]
  misc_feature (51)..(276): NCBI GI: 189204189 Blast Desc: isochorismatase hydrolase [Pyrenophora tritici-repentis Pt-1C-BFP] gi|187985529|gb|EDU51017.1| isochorismatase hydrolase [Pyrenophora tritici-repentis
  misc_feature (51)..(276): NCBI GI: 169623873 Blast Desc: SNOG_15183 [Phaeosphaeria nodorum SN15] gi|160705061|gb|EAT77408.2| SNOG_15183 [Phaeosphaeria nodorum SN15]
  misc_feature (13)..(234): NCBI GI: 189192733 Blast Desc: isochorismatase hydrolase [Pyrenophora tritici-repentis Pt-1C-BFP] gi|187978269|gb|EDU44895.1| isochorismatase hydrolase [Pyrenophora tritici-repentis
MSTDRAEVIGHKNFWLHSKEKGYDITHPLSPTSSPIFPRVPLETTSGLVAVDPSKTALVVIDLQNYFLAPELGRPTDSVGLEVTKKLLQYVVPSCRKARISIVWLGWGLTENDIDEMPPTIVRGFGADTNFVGNETIGPLGAEIGRLKLGHNGAIVDGGRVLMKNQWNSEFYHLLHDQVEDDDIQVYKNRLSGFWGETGLEEALTCRGIRTLLFSGCNTDQCVAGTLQGAFNKGWDCLLLSDGTATTSPGFAQQDVEFNCAGGWGFVLTCEQFADGVNNMKRAPDKNTMKQKEYRSGVEPGGQTARIP

SEQ ID NO: 6512 - DNA, 393 bp, Muscodor strobelii
  misc_feature: SGI EST ID NO. CUFF.16329.0
  misc_feature: Variant of the nucleotide sequence at SEQ ID NO 6510
cggagcttggtcgtcccacggacagtgtcggcttagaggtcaccaagaagctcctgcaatatgtagtcccttcttgcagaaaagctcggatttctatcgtctggcttgggtggggattgaccgagaacgacattgacgaaatgcccccgacaatagtcagaggatttggcgctgataccaattttgttggcaatgaaacaatcggcccgctgggagcagagattggtcgtttgaaacttggacataacggtgccattgtggatggcggccgagttctaatgaaaaatcagtggaactcggaattttaccatctgctccacgatcaagttgaagatgacgatattcaagtttacaaaaaccgtctatcgggcttttggggcgagactggcctcg

SEQ ID NO: 6513 - DNA, 756 bp, Muscodor strobelii
  misc_feature: SGI cDNA ID NO. 561915
  misc_feature: Encodes the peptide sequence at SEQ ID NO 6514
atggcttcgagtagaatgcgccgcatcgctaaggagctcggtgatatcgagaaggaggctcgcgagctcaccatcaagttccccaacaagagcgcttccgagctcaacatcatcaccgcccgctccgccgagagcaacggcgacctgacccacctcaagggccacatcgctggccctgccgacaccccctacgctggaggctggtttgttgtcgacatcaagatccctcaggagtatcccttcaaggctcctaccatgaagttcgacaccaaagtttggcaccccaacatcagcagccagactggtgctatctgcctggacacgcttggtaatgcctggtcgcctgtcctcaccatcaagagcgcccttctgtctgtccagtctctcttccagagtcccgagcccaaggatccccaggatgccgaggtcgccaacatgatgctgaacgacttccccaacttccagaagaaggcccatgagtgggctgtcaagcatgctggtgctccccctacccgcaagtacgacgttcgcggaggtgctcccgtcagacccatgcctcagcccgaggtagactcacgccgttacaagggctaccacaagaacctaatcgaccgtttcgttgccatgggattcgacctcgacaaagtcgttgaagctttccagcacttcggaatcgccactttcgacggtcaagactacgagctggagcccgagtacatgggagatgtcactgcccgtctccttggtgaaccctag

SEQ ID NO: 6514 - protein, 251 aa, Muscodor strobelii
  misc_feature: SGI Peptide ID NO. 561915
  misc_feature (191)..(236): Pfam Id: PF09288 Pfam Desc: Fungal ubiquitin-associated domain
  misc_feature (8)..(162): Pfam Id: PF00179 Pfam Desc: Ubiquitin-conjugating enzyme
  misc_feature (200)..(232): Pfam Id: PF09288 Pfam Desc: Fungal ubiquitin-associated domain
  misc_feature (1)..(250): NCBI GI: 169611911 Blast Desc: SNOG_09070 [Phaeosphaeria nodorum SN15] gi|111062142|gb|EAT83262.1| SNOG_09070 [Phaeosphaeria nodorum SN15]
  misc_feature (1)..(250): NCBI GI: 189189248 Blast Desc: ubiquitin-conjugating enzyme E2-24 kDa [Pyrenophora tritici-repentis Pt-1C-BFP] gi|187972569|gb|EDU40068.1| ubiquitin-conjugating enzyme E2-24 kDa [Pyrenophora Pt-1C-BFP]
  misc_feature (1)..(250): NCBI GI: 261360978 Blast Desc: ubiquitin-conjugating enzyme [Verticillium albo-atrum VaMs.102]
  misc_feature (1)..(251): NCBI GI: 169777359 Blast Desc: [Aspergillus oryzae RIB40] gi|238494490|ref|XP_002378481.1| ubiquitin conjugating enzyme (UbcA), [Aspergillus flavus NRRL3357] gi|83771882|dbj|BAE62012.1|
  misc_feature (1)..(251): NCBI GI: 119182089 Blast Desc: CIMG_06098 [Coccidioides immitis RS] gi|240109157|gb|EER27326.1| ubiquitin-conjugating enzyme, [Coccidioides posadasii C735 delta SOWgp]
  misc_feature (4)..(250): NCBI GI: 256728560 Blast Desc: NECHADRAFT_85976 [Nectria haematococca mpVI 77-13-4]
  misc_feature (3)..(250): NCBI GI: 39941132 Blast Desc: MGG_05478 [Magnaporthe grisea 70-15] gi|145022135|gb|EDK06155.1| MGG_05478 [Magnaporthe grisea 70-15]
  misc_feature (1)..(251): NCBI GI: 258571882 Blast Desc: conserved [Uncinocarpus reesii 1704] gi|237905014|gb|EEP79415.1| conserved [Uncinocarpus reesii 1704]
  misc_feature (1)..(251): NCBI GI: 67523513 Blast Desc: AN2212.2 [Aspergillus nidulans FGSC A4] gi|40744713|gb|EAA63869.1| AN2212.2 [Aspergillus nidulans FGSC A4] gi|259487597|tpe|CBF86393.1| TPA: ubiquitin conjugating FGSC
  misc_feature (1)..(250): NCBI GI: 171692601 Blast Desc: protein product [Podospora anserina] gi|170946249|emb|CAP73050.1| protein product [Podospora anserina]
  misc_feature (4)..(232): SWISSPROT Homolog: EC 6.3.2.19 Ubiquitin--protein ligase
MASSRMRRIAKELGDIEKEARELTIKFPNKSASELNIITARSAESNGDLTHLKGHIAGPADTPYAGGWFVVDIKIPQEYPFKAPTMKFDTKVWHPNISSQTGAICLDTLGNAWSPVLTIKSALLSVQSLFQSPEPKDPQDAEVANMMLNDFPNFQKKAHEWAVKHAGAPPTRKYDVRGGAPVRPMPQPEVDSRRYKGYHKNLIDRFVAMGFDLDKVVEAFQHFGIATFDGQDYELEPEYMGDVTARLLGEP

SEQ ID NO: 6515 - DNA, 2046 bp, Muscodor strobelii
  misc_feature: SGI EST ID NO. CUFF.16642.1
  misc_feature: Variant of the nucleotide sequence at SEQ ID NO 6513
ccttgctcaagcaagccaagctcgaggtagcaaccaagacgggaaccttgaagtcaggtacgaccactgtccaccagacaaacgccttctttgacttcgcaaaggcctttagtgaggctgtgatgcctcacttctcatttgtcatttctcccatttccattttctcgtcctccccctctcccatccactcgctcctgctgcccgtcactcggccctaggtccctctccattctctttggatcctaagcatacctaccttactcacttctcattcacctcccagacgctagactggccatggtccactccagctgaaaacagtggtatcaaacgaggatatcgttcagctaaaggtaatagatatcctgctgccatcgtatctcaggtgtctggtgtcactcatctgggccttgccattgtctttgtgcagtgccagccgaaattgatgctattgcctccctcatcatcggttcgatccttcctctcctctcccattcattcaccctgcgcctcggccgcttaggaaacatcgaaccttccgtaccctgtgttacaaccttataacaacacaccatccttcctccttctacggccgcctcgccttcaccttttccagactctcaagtacaacactcttacaaagtaccatcgagcattcgtttgtcgctcataccgacatcgatatcgaccgcgaaacgtctaattcccccatcgatactcgcctctgccgatagccttaaccatacaagtacatcatctccaaagctgtacacagccgacagtcacgatggcttcgagtagaatgcgccgcatcgctaaggagctcggtgatatcgagaaggaggctcgcgagctcaccatcaagttccccaacaagagcgcttccgagctcaacatcatcaccgcccgctccgccgagagcaacggcgacctgacccacctcaagggccacatcgctggccctgccgacaccccctacgctggaggctggtttgttgtcgacatcaagatccctcaggagtatcccttcaaggctcctaccatgaagttcgacaccaaagtttggcaccccaacatcagcagccagactggtgctatctgcctggacacgcttggtaatgcctggtcgcctgtcctcaccatcaagagcgcccttctgtctgtccagtctctcttccagagtcccgagcccaaggatccccaggatgccgaggtcgccaacatgatgctgaacgacttccccaacttccagaagaaggcccatgagtgggctgtcaagcatgctggtgctccccctacccgcaagtacgacgttcgcggaggtgctcccgtcagacccatgcctcagcccgaggtagactcacgccgttacaagggctaccacaagaacctaatcgaccgtttcgttgccatgggattcgacctcgacaaagtcgttgaagctttccagcacttcggaatcgccactttcgacggtcaagactacgagctggagcccgagtacatgggagatgtcactgcccgtctccttggtgaaccctaggatggtccttaggtgccatgattttccggggtcgattagtgccctatacgatcgagaacgcttttcacacgcgttggagcttcattatctgcaggcagtggctctcaacacatatctcttagccctgtattagctgaagagccccagtacgaaaattcccctcacatcaccccgtgcttcatccacttcgcgcgtatatcccatccaccctgccctgtcactccgactggtctctctacttgcatggaggatagaccagcaatgcgaaattactgctggcaaagatagtccctacggcctgaagctcacggctctatttcctcgagacactgttcgtcggactggaatacagcagcatcaccagagataggctctgtccttgtctcatcttggacatgactttgcataggcataggtcaataggtccataggttaatgagcaatgagctatgataactaaaagaacgaatagtgacaacgtgattcaatggcataataacgag

SEQ ID NO: 6516 - DNA, 1731 bp, Muscodor strobelii
  misc_feature: SGI cDNA ID NO. 561916
  misc_feature: Encodes the peptide sequence at SEQ ID NO 6517
atggccacgacgacgatgacgaccaccacgccggctggtggccgcaagaaagatgcgaatctcccgcccgagaacgaacgtttccttcgatgttgcgccgatattgccaatgccctgatcgaagaccacgagtcctccaagaacccgaagaatcctaagaaagacatcaacctcaacagcctgcgtacgaaactatcgaggaagcacaggctggccaacatcccgcctctgacggccatcatcgctgccgttcccgagcactacaagaaatacatcatgcccaagctgattgcaaagcccatccgatcctcttcaggcattgccgtggtagctgtcatgtgcaaaccccatcgatgtccccatatcgcctacaccggcaacatctgcgtctactgtcccggcggacccgactccgacttcgagtacagcacccagtcctacaccggatacgagcccacctctatgcgcgccattcgtgcccgctacgaccccttcgaacaggcccgaggtcgtgtagaccagctcaagtccctcggccactccgtcgacaaggtcgaatacatcatcatgggaggcactttcatgtctctacccatcccgtaccgagaggagttcatctctcaactccacaatgccctcagtggctaccaaactacaaacgtcgacgaggccgtagaagcaggcgagatgagcaatgccaagtgtgtcggcatcactatcgaaacgaggccagattactgcctccagccacatttgacggatatgcttcgatacggctgtacacggctcgaggttggcgtgcagtctttatacgaagatgttgcgcgtgacacgaatcgaggccacaccgttgcagctgttgcggaaactttctgtctagcaaaggatgcgggtttcaaagttgtgtcacacatgatgccagacttgcccaacgtaggaatggagcgagatctagatcagttcagagaatacttcgagaatccggctttccgaaccgacggactgaaaatctatcctacacttgtcattcgcggcacaggtctctacgaactatggcggacaggcagatatcagaactacacaccaaatgccctcatagatatcgtggcgcggatattggcacttgtcccgccatggacccgtatataccgtgttcaaagagatattccaatgcctctagtcacatcgggtgtggaaaacggcaatttgagagagttggctttggctcggatgaaggacttcggaacgacttgccgcgacgtgaggacacgagaagttggtatcaacgaggtcaaacacaagatacggccaaatcaaatcgaactcgtccgtcgagattatactgccaacgggggctgggaaacattcctggcatacgaggatccaaaacaagacatattggtcggtctccttcgactaaggaaatgcactgagaaatacacgtatcgcgaagagctcactggccaacagaccagtctggtcagagagttgcatgtctacggtacagctgtacctgttcatgctagagatccgaagaaattccaacaccagggattcggtactttattgatggaggaggccgagcgcattgcccgcgacgagcacggaagtgacaaaatcagtgtcatcagcggggtgggcgtcaggagttattatcggaaacttgggtactggctcgacggaccgtatatgagtaaatggctggatgggcgaccgcagccatcgcgttag

SEQ ID NO: 6517 - protein, 576 aa, Muscodor strobelii
  misc_feature: SGI Peptide ID NO. 561916
  misc_feature (113)..(325): Pfam Id: PF04055 Pfam Desc: Radical SAM superfamily
  misc_feature (459)..(558): Pfam Id: PF00583 Pfam Desc: Acetyltransferase (GNAT) family
  misc_feature (6)..(573): NCBI GI: 261360980 Blast Desc: elongator complex protein [Verticillium albo-atrum VaMs.102]
  misc_feature (1)..(574): NCBI GI: 85103762 Blast Desc: NCU01229 [Neurospora crassa OR74A] gi|7635787|emb|CAB88553.1| histone acetyltransferase [Neurospora crassa] gi|28923142|gb|EAA32359.1| NCU01229 [Neurospora crassa
  misc_feature (4)..(572): NCBI GI: 39941138 Blast Desc: conserved [Magnaporthe grisea 70-15] gi|145022138|gb|EDK06158.1| conserved [Magnaporthe grisea 70-15]
  misc_feature (15)..(574): NCBI GI: 171692605 Blast Desc: protein product [Podospora anserina] gi|170946251|emb|CAP73052.1| protein product [Podospora anserina]
  misc_feature (1)..(574): NCBI GI: 46110316 Blast Desc: FG02040.1 [Gibberella zeae PH-1]
  misc_feature (9)..(574): NCBI GI: 256728573 Blast Desc: histone acetyltransferase [Nectria haematococca mpVI 77-13-4]
  misc_feature (1)..(568): NCBI GI: 156052232 Blast Desc: conserved [Sclerotinia sclerotiorum 1980] gi|154705301|gb|EDO05040.1| conserved [Sclerotinia sclerotiorum 1980]
  misc_feature (1)..(568): NCBI GI: 154312748 Blast Desc: conserved [Botryotinia fuckeliana B05.10] gi|150849777|gb|EDN24970.1| conserved [Botryotinia fuckeliana B05.10]
  misc_feature (1)..(569): NCBI GI: 239610148 Blast Desc: histone acetyltransferase [Ajellomyces dermatitidis ER-3]
  misc_feature (1)..(569): NCBI GI: 261198351 Blast Desc: histone acetyltransferase [Ajellomyces dermatitidis SLH14081] gi|239594729|gb|EEQ77310.1| histone acetyltransferase [Ajellomyces dermatitidis SLH14081]
  misc_feature (13)..(566): SWISSPROT Homolog: EC 2.3.1.48 Histone acetyltransferase
MATTTMTTTTPAGGRKKDANLPPENERFLRCCADIANALIEDHESSKNPKNPKKDINLNSLRTKLSRKHRLANIPPLTAIIAAVPEHYKKYIMPKLIAKPIRSSSGIAVVAVMCKPHRCPHIAYTGNICVYCPGGPDSDFEYSTQSYTGYEPTSMRAIRARYDPFEQARGRVDQLKSLGHSVDKVEYIIMGGTFMSLPIPYREEFISQLHNALSGYQTTNVDEAVEAGEMSNAKCVGITIETRPDYCLQPHLTDMLRYGCTRLEVGVQSLYEDVARDTNRGHTVAAVAETFCLAKDAGFKVVSHMMPDLPNVGMERDLDQFREYFENPAFRTDGLKIYPTLVIRGTGLYELWRTGRYQNYTPNALIDIVARILALVPPWTRIYRVQRDIPMPLVTSGVENGNLRELALARMKDFGTTCRDVRTREVGINEVKHKIRPNQIELVRRDYTANGGWETFLAYEDPKQDILVGLLRLRKCTEKYTYREELTGQQTSLVRELHVYGTAVPVHARDPKKFQHQGFGTLLMEEAERIARDEHGSDKISVISGVGVRSYYRKLGYWLDGPYMSKWLDGRPQPSR

SEQ ID NO: 6518 - DNA, 2055 bp, Muscodor strobelii
  misc_feature: SGI EST ID NO. CUFF.16348.0
  misc_feature: Variant of the nucleotide sequence at SEQ ID NO 6516
ttgatctcaagtgtcacaccccgccatcaaacaatattcgagcttaattgaggaaacaaatgggcagagttgacactctctagtttcactacgtacacagcatcttcagtcagctagaagcaaagaatcgaaaccggaacattggatagcatcaaatagtcgatgagctatcttccatcatggccacgacgacgatgacgaccaccacgccggctggtggccgcaagaaagatgcgaatctcccgcccgagaacgaacgtttccttcgatgttgcgccgatattgccaatgccctgatcgaagaccacgagtcctccaagaacccgaagaatcctaagaaagacatcaacctcaacagcctgcgtacgaaactatcgaggaagcacaggctggccaacatcccgcctctgacggccatcatcgctgccgttcccgagcactacaagaaatacatcatgcccaagctgattgcaaagcccatccgatcctcttcaggcattgccgtggtagctgtcatgtgcaaaccccatcgatgtccccatatcgcctacaccggcaacatctgcgtctactgtcccggcggacccgactccgacttcgagtacagcacccagtcctacaccggatacgagcccacctctatgcgcgccattcgtgcccgctacgaccccttcgaacaggcccgaggtcgtgtagaccagctcaagtccctcggccactccgtcgacaaggtcgaatacatcatcatgggaggcactttcatgtctctacccatcccgtaccgagaggagttcatctctcaactccacaatgccctcagtggctaccaaactacaaacgtcgacgaggccgtagaagcaggcgagatgagcaatgccaagtgtgtcggcatcactatcgaaacgaggccagattactgcctccagccacatttgacggatatgcttcgatacggctgtacacggctcgaggttggcgtgcagtctttatacgaagatgttgcgcgtgacacgaatcgaggccacaccgttgcagctgttgcggaaactttctgtctagcaaaggatgcgggtttcaaagttgtgtcacacatgatgccagacttgcccaacgtaggaatggagcgagatctagatcagttcagagaatacttcgagaatccggctttccgaaccgacggactgaaaatctatcctacacttgtcattcgcggcacaggtctctacgaactatggcggacaggcagatatcagaactacacaccaaatgccctcatagatatcgtggcgcggatattggcacttgtcccgccatggacccgtatataccgtgttcaaagagatattccaatgcctctagtcacatcgggtgtggaaaacggcaatttgagagagttggctttggctcggatgaaggacttcggaacgacttgccgcgacgtgaggacacgagaagttggtatcaacgaggtcaaacacaagatacggccaaatcaaatcgaactcgtccgtcgagattatactgccaacgggggctgggaaacattcctggcatacgaggatccaaaacaagacatattggtcggtctccttcgactaaggaaatgcactgagaaatacacgtatcgcgaagagctcactggccaacagaccagtctggtcagagagttgcatgtctacggtacagctgtacctgttcatgctagagatccgaagaaattccaacaccagggattcggtactttattgatggaggaggccgagcgcattgcccgcgacgagcacggaagtgacaaaatcagtgtcatcagcggggtgggcgtcaggagttattatcggaaacttgggtactggctcgacggaccgtatatgagtaaatggctggatgggcgaccgcagccatcgcgttagggtgtcattcgattaaactggaaatttgcaaatcatttgagagactagcaacccacaggttgctgcactacattgtatatagtatgacatgcaaaatgtatataaaagcatatgacgaagtcaagaattgtcaacacatgaaaac

SEQ ID NO: 6519 - DNA, 858 bp, Muscodor strobelii
  misc_feature: SGI cDNA ID NO. 561917
  misc_feature: Encodes the peptide sequence at SEQ ID NO 6520
atgttttcagacatgatcaggagatatctgggcgctcacaaatacgaatatgaaccaatcggcaagaatgagagcttcaagagggtcaccacggacagatttgggcgcttttctacagacaggccactgctatggatgatatctaccattgcattcgcttgcatgttcgctgcctcgcttgtctttatcacaatcaccgagcgccagcgccgggtcactggaaccttctcgaccggcttctcaaccgaaatgactcggcctctctatggcacggcgctcagacagaataggttcacaggcgggttgatctataatgagagcggatccctcataatggaccaaaagccgggtgaagcagcttgggttggcccgccaaacccggatatcgacgctttatggaacacgatcgaggctgcagctatcatatacctacaagggtccgaagcagacatggttcgggaagagactgcactgtcagacggatattgggtcacgggactggacgtattccaccagctacattgccttaacaagttgcgcaaagccctcgacccggaatactacatgaaaggggcatctaaccgagtacatcggctccacatagaccactgtctagattacatccgtcaagtgttgacctgccatgcagaccttactccggtgaagatgacgtggcagccgtccgtgagctattttgggcctgcctttgacaccactcacacatgtcgcgactttgaccagatccttcaatggtcacaagcccgcagtgacatcactgcgctcggtactggggtagagacagcacgggatcaaacgctcgtcgtgacggatgagagacatttcgtgcctcctaggtag

SEQ ID NO: 6520 - protein, 285 aa, Muscodor strobelii
  misc_feature: SGI Peptide ID NO. 561917
  misc_feature (16)..(255): NCBI GI: 189204938 Blast Desc: conserved [Pyrenophora tritici-repentis Pt-1C-BFP] gi|187985903|gb|EDU51391.1| conserved [Pyrenophora tritici-repentis Pt-1C-BFP]
  misc_feature (75)..(255): NCBI GI: 212531891 Blast Desc: conserved [Penicillium marneffei ATCC 18224] gi|210071466|gb|EEA25555.1| conserved [Penicillium marneffei ATCC 18224]
  misc_feature (44)..(255): NCBI GI: 242774243 Blast Desc: conserved [Talaromyces stipitatus ATCC 10500] gi|218722021|gb|EED21439.1| conserved [Talaromyces stipitatus ATCC 10500]
  misc_feature (41)..(244): NCBI GI: 212536326 Blast Desc: conserved [Penicillium marneffei ATCC 18224] gi|210070718|gb|EEA24808.1| conserved [Penicillium marneffei ATCC 18224]
  misc_feature (41)..(244): NCBI GI: 212536324 Blast Desc: conserved [Penicillium marneffei ATCC 18224] gi|210070717|gb|EEA24807.1| conserved [Penicillium marneffei ATCC 18224]
  misc_feature (74)..(258): NCBI GI: 189204936 Blast Desc: [Pyrenophora tritici-repentis Pt-1C-BFP] gi|187985902|gb|EDU51390.1| [Pyrenophora tritici-repentis Pt-1C-BFP]
  misc_feature (18)..(244): NCBI GI: 242795396 Blast Desc: conserved [Talaromyces stipitatus ATCC 10500] gi|218719167|gb|EED18587.1| conserved [Talaromyces stipitatus ATCC 10500]
  misc_feature (55)..(255): NCBI GI: 189204942 Blast Desc: [Pyrenophora tritici-repentis Pt-1C-BFP] gi|187985905|gb|EDU51393.1| [Pyrenophora tritici-repentis Pt-1C-BFP]
  misc_feature (123)..(256): NCBI GI: 242809279 Blast Desc: conserved [Talaromyces stipitatus ATCC 10500] gi|218715961|gb|EED15383.1| conserved [Talaromyces stipitatus ATCC 10500]
  misc_feature (16)..(252): NCBI GI: 46140017 Blast Desc: FG11523.1 [Gibberella zeae PH-1]
MFSDMIRRYLGAHKYEYEPIGKNESFKRVTTDRFGRFSTDRPLLWMISTIAFACMFAASLVFITITERQRRVTGTFSTGFSTEMTRPLYGTALRQNRFTGGLIYNESGSLIMDQKPGEAAWVGPPNPDIDALWNTIEAAAIIYLQGSEADMVREETALSDGYWVTGLDVFHQLHCLNKLRKALDPEYYMKGASNRVHRLHIDHCLDYIRQVLTCHADLTPVKMTWQPSVSYFGPAFDTTHTCRDFDQILQWSQARSDITALGTGVETARDQTLVVTDERHFVPPR

SEQ ID NO: 6521 - DNA, 715 bp, Muscodor strobelii
  misc_feature: SGI EST ID NO. CUFF.16355.0
  misc_feature: Variant of the nucleotide sequence at SEQ ID NO 6519
ggcgctcagacagaataggttcacaggcgggttgatctataatgagagcggatccctcataatggaccaaaagccgggtgaagcagcttgggttggcccgccaaacccggatatcgacgctttatggaacacgatcgaggctgcagctatcatatacctacaagggtccgaagcagacatggttcgggaagagactgcactgtcagacggatattgggtcacgggactggacgtattccaccagctacattgccttgtatgccaatatcacctttcgtcgggtcgcagaagagaattaggctgatttgctaaaagaacaagttgcgcaaagccctcgacccggaatactacatgaaaggggcatctaaccgagtacatcggctccacataggtgagatctaactgctttaccaacgtctgatcccacagactttagctaacgacctacacaagaccactgtctagattacatccgtcaagtgttgacctgccatgcagaccttactccggtgaagatgacgtggcagccgtccgtgagctattttgggcctgcctttgacaccactcacacatgtcgcgactttgaccagatccttcaatggtcacaagcccgcagtgacatcactgcgctcggtactggggtagagacagcacgggatcaaacgctcgtcgtgacggatgagagacatttcgtgcctcctaggtagctaaagcg

SEQ ID NO: 6522 - DNA, 846 bp, Muscodor strobelii
  misc_feature: SGI cDNA ID NO. 561918
  misc_feature: Encodes the peptide sequence at SEQ ID NO 6523
atgctgtatgctcagaagaagagagagaataagaaggattcgttttcgtgtgaaagtgaggtcaccttcaccgagcacgacacgtttctagaagagaccataataccacagcgttctaagtggctccattctcttcgagcctcaagcactttatatttcattggggcggtgctgtgggcatcgtcactttttctcgtttactggaccaccgtctcgttccatcgcagcgaaaggggctcgttcgagaggggatttgatactgaccttgagcccctcaaggcggtactctcggtcgagagagttaagtttactggagggctggaatttgacgagaatggtaccctttaccgagtcactgaacccggcgctcgcgagtatgttggaccaccaagcccagaaatcgaccgggcgtggcatgatctcctggaagtggacggtgtcgatctcataggagatgaggccagctcagttgtgggcaagacattccagaagccaaatggagggtggtcccttgttggggtagacgccatgcatcaaattcattgtctcaatatgctatataagtcgagccacagggactactacacatttgcggattcaccagagattgtggcgctacacctagatcactgcatcgactacctccggcaggccgtcatgtgctcagccgacatcacccctatgtacatcaactggtcagaccgatggaaccgcttgtttccgcagttcgacaactggcacacctgccgtagttacgcaaaggtcaaggagtggatgctcccacgcagcggcctcaaacacccggtccctccaatcggacacgcgtggccagatgatagttcatag

SEQ ID NO: 6523 - protein, 281 aa, Muscodor strobelii
  misc_feature: SGI Peptide ID NO. 561918
  misc_feature (51)..(262): NCBI GI: 242774243 Blast Desc: conserved [Talaromyces stipitatus ATCC 10500] gi|218722021|gb|EED21439.1| conserved [Talaromyces stipitatus ATCC 10500]
  misc_feature (2)..(262): NCBI GI: 212531891 Blast Desc: conserved [Penicillium marneffei ATCC 18224] gi|210071466|gb|EEA25555.1| conserved [Penicillium marneffei ATCC 18224]
  misc_feature (47)..(262): NCBI GI: 189204938 Blast Desc: conserved [Pyrenophora tritici-repentis Pt-1C-BFP] gi|187985903|gb|EDU51391.1| conserved [Pyrenophora tritici-repentis Pt-1C-BFP]
  misc_feature (29)..(257): NCBI GI: 242795396 Blast Desc: conserved [Talaromyces stipitatus ATCC 10500] gi|218719167|gb|EED18587.1| conserved [Talaromyces stipitatus ATCC 10500]
  misc_feature (29)..(257): NCBI GI: 212536326 Blast Desc: conserved [Penicillium marneffei ATCC 18224] gi|210070718|gb|EEA24808.1| conserved [Penicillium marneffei ATCC 18224]
  misc_feature (29)..(257): NCBI GI: 212536324 Blast Desc: conserved [Penicillium marneffei ATCC 18224] gi|210070717|gb|EEA24807.1| conserved [Penicillium marneffei ATCC 18224]
  misc_feature (49)..(266): NCBI GI: 189204936 Blast Desc: [Pyrenophora tritici-repentis Pt-1C-BFP] gi|187985902|gb|EDU51390.1| [Pyrenophora tritici-repentis Pt-1C-BFP]
  misc_feature (118)..(258): NCBI GI: 212534390 Blast Desc: conserved [Penicillium marneffei ATCC 18224] gi|210069750|gb|EEA23840.1| conserved [Penicillium marneffei ATCC 18224]
  misc_feature (126)..(255): NCBI GI: 242215559 Blast Desc: POSPLDRAFT_130143 [Postia placenta Mad-698-R] gi|220727314|gb|EED81237.1| POSPLDRAFT_130143 [Postia placenta Mad-698-R]
  misc_feature (95)..(279): NCBI GI: 238505104 Blast Desc: conserved [Aspergillus flavus NRRL3357] gi|220689895|gb|EED46245.1| conserved [Aspergillus flavus NRRL3357]
MLYAQKKRENKKDSFSCESEVTFTEHDTFLEETIIPQRSKWLHSLRASSTLYFIGAVLWASSLFLVYWTTVSFHRSERGSFERGFDTDLEPLKAVLSVERVKFTGGLEFDENGTLYRVTEPGAREYVGPPSPEIDRAWHDLLEVDGVDLIGDEASSVVGKTFQKPNGGWSLVGVDAMHQIHCLNMLYKSSHRDYYTFADSPEIVALHLDHCIDYLRQAVMCSADITPMYINWSDRWNRLFPQFDNWHTCRSYAKVKEWMLPRSGLKHPVPPIGHAWPDDSS

SEQ ID NO: 6524 - DNA, 460 bp, Muscodor strobelii
  misc_feature: SGI EST ID NO. CUFF.16361.0
  misc_feature: Variant of the nucleotide sequence at SEQ ID NO 6522
gatgaggccagctcagttgtgggcaagacattccagaagccaaatggagggtggtcccttgttggggtagacgccatgcatcaaattcattgtctcaatatgctatataagtcgagccacagggactactacacatttgcggattcaccagagattgtggcgctacacctagatcactgcatcgactacctccggcaggccgtcatgtgctcagccgacatcacccctatgtacatcaactggtcagaccgatggaaccgcttgtttccgcagttcgacaactggcacacctgccgtagttacgcaaaggtcaaggagtggatgctcccacgcagcggcctcaaacacccggtccctccaatcggacacgcgtggccagatgatagttcatagtgaccagacctcacaggattatgtagagcgcaatttccaaaggctaaatgtggttttgtttttgtaa

SEQ ID NO: 6525 - DNA, 477 bp, Muscodor strobelii
  misc_feature: SGI cDNA ID NO. 561919
  misc_feature: Encodes the peptide sequence at SEQ ID NO 6526
atgaagttcacaatcgtagcaatttccatgatcatcggtgctgccgtcgcggctcctatgttgaacgccaacaaggaagccagggacgagtcctcaacccaaacattcatctacaacaagtacggcgacaaagatacgagggatgagtccgctattcaaactctcggctacgccaaatacgccgacaaggagactagaagcgagtcctccatccaaaccactggttacgccaattatgccgataaggatgcaagagacgagtcatcaactcaaacatatatctacactaagtacgcggataaagacgccagggatgagtccgctattcaaaccactggctacgccaattatgccgagaatgacgcaagggacgaatcctctactcaaacatatatctacactaaatacgccgacaaggacacaagagacgagtcagccattgagactatcggctacgccaagtacgccgaagagtag

SEQ ID NO: 6526 - protein, 158 aa, Muscodor strobelii
  misc_feature: SGI Peptide ID NO. 561919
  misc_feature (24)..(157): NCBI GI: 260817738 Blast Desc: BRAFLDRAFT_97615 [Branchiostoma floridae] gi|229289065|gb|EEN59753.1| BRAFLDRAFT_97615 [Branchiostoma floridae]
  misc_feature (24)..(157): NCBI GI: 260817738 Blast Desc: BRAFLDRAFT_97615 [Branchiostoma floridae] gi|229289065|gb|EEN59753.1| BRAFLDRAFT_97615 [Branchiostoma floridae]
  misc_feature (24)..(157): NCBI GI: 260817738 Blast Desc: BRAFLDRAFT_97615 [Branchiostoma floridae] gi|229289065|gb|EEN59753.1| BRAFLDRAFT_97615 [Branchiostoma floridae]
  misc_feature (29)..(157): NCBI GI: 260817738 Blast Desc: BRAFLDRAFT_97615 [Branchiostoma floridae] gi|229289065|gb|EEN59753.1| BRAFLDRAFT_97615 [Branchiostoma floridae]
MKFTIVAISMIIGAAVAAPMLNANKEARDESSTQTFIYNKYGDKDTRDESAIQTLGYAKYADKETRSESSIQTTGYANYADKDARDESSTQTYIYTKYADKDARDESAIQTTGYANYAENDARDESSTQTYIYTKYADKDTRDESAIETIGYAKYAEE

SEQ ID NO: 6527 - DNA, 1327 bp, Muscodor strobelii
  misc_feature: SGI EST ID NO. CUFF.16363.0
  misc_feature: Variant of the nucleotide sequence at SEQ ID NO 6525
cgacttggcagtgcgatactacgatatctcatcctaacatgcagaacatgcgatctcctaatcgccgtcattgtttcacggtcctaaaggatgcgaattaccatgggaggtgtgccgactatactatcagggtttccactatgggattagtcaaccaaggcttcctttctatcgccagaacagcagttggcctcgagagatagtccgtactgtcgcagaacccggacaggactttgtgtctctaaaccggttgccagcgccgttcacggacatgcgcaaaatcgtcggatgaggctttgagcccaacgacaggttcgtatataaaaagagtcttgtcctcccatactcgacgaggttatattgaatatcatcgtttcacttctgcaggcaacgtccaaaactactattaaatctactcttctatctgccaaagcacatccccttctggaagactctagtttcccacaagaaagattaacactattcagttaactctatgaaaatgaagttcacaatcgtagcaatttccatgatcatcggtgctgccgtcgcggctcctatgttgaacgccaacaaggaagccagggacgagtcctcaacccaaacattcatctacaacaagtacggcgacaaagatacgagggatgagtccgctattcaaactctcggctacgccaaatacgccgacaaggagactagaagcgagtcctccatccaaaccactggttacgccaattatgccgataaggatgcaagagacgagtcatcaactcaaacatatatctacactaagtacgcggataaagacgccagggatgagtccgctattcaaaccactggctacgccaattatgccgagaatgacgcaagggacgaatcctctactcaaacatatatctacactaaatacgccgacaaggacacaagagacgagtcagccattgagactatcggctacgccaagtacgccgaagagtagtcgtccaatcgatctcacagccatatctatcattcagaaatggctttcaatccatcgccaaaccttactcggattgggagaccaccacgtctaatattagatcacggtgtcagaaaggggctgatagcttaagtgatacgaaattgagcatcttggttatataggtctatatcaggaagcgagagagcaatatcgaggggctacgtgggtgctttgtgaaatagtttggcttgggtcacagtttgaagtgcatttgttcgatttatcttcgatagcagcacgcgagagacgaaatcatgacacacattcactcaaatatgataaaaatatgaattaatggaagtcttg

SEQ ID NO: 6528 - DNA, 4488 bp, Muscodor strobelii
  misc_feature: SGI cDNA ID NO. 561920
  misc_feature: Elevated expression when VOC is produced
  misc_feature: Encodes the peptide sequence at SEQ ID NO 6529
atggaaagatccgcatgtgtggcagattcagagtttgagaggctgttgtctgagttcaaaattgttcaccagaacggccttgaaaggctgcgacactatgttgaaactgccgccgatattgttcagcaaaacctttccaggacgtttcaagtagaacataagaaagtcgaaccgtcattaaagaacgcagccaaggccattgaaacgcttcggcgacggcaacgggaacgcataactctcggggaattgcggaccgagattgaacgccgtggcgagaactgggtcgatcactgcaagaagtggaatcttcgagataaggagcatgatgtcgaacgttttaggaacgtggaagagatgttcgatgccatgcatgatcttgctcgctttcgcatacttatcaggtacgaaagtgacactgacaaggtcgtaaattttctcagcatccatttcgagcttatcgacgggcccaaagagaagggtggtcaacagaaagacatacagcgtattcacaagcaaattgagcaatatggaactgtctcgacacacaagtcctctgtgtttcctggatatagagcaactcacgtcgtcgtacggcacaaaataggacaacccctgcttcgtgccgatgaccagcgtgctcattggaacatggtcatcgaggtccaaattggcaccgttggcatgtacgaatggtctgatattgagcatgacgtgatatataagccgtccgaagtctctcagctcccagacgatgcggagcgtatcttggacatgatcaatggcatcacgctggtcggagacatgatgaaagaccattttaggaagcttctgagaccagcggagaccgagcagggagtttcattaacccgaccacccatgcaagaggtcgcccgtaactctccgcccaccctttctgagaaagatcgaagagacctgggtgagtttgggggtaccaatccatcgctggataaaatcaggatcgaggagacgaaaggtacgctcctgagggattcgtacaagtggattctaactaacggagaatacttgaaatggtacaaccgctttgagcttcgccaagacgaaggaggttgccggcttctctgggttcgaggcgatcccggaaagggcaagaccatgatcttgtgcggtgtcatcacagagctggcgcaagacttatcgtcggactatggcctctgctatttcttttgccaggctgccgacagccgcttgaacagcgcaacatcagtgctacgcgggctgatgtatatgttagtccatcagcagccttcactcatgtcttatgttcgagactacgtcagtagtgggagccttggggcgtttgacgggccaaatgcttttttggggctcaggaccacctgcactcgcatgcttcacgataaagcgctcaagaatacatatatcatcattgacgcactcgatgaatgccagacgaacaggacagaacttatcgactggattgcagagcgatcgcaagactgtccacgagcgaaatggatagtgtcgagccgcaactggccgcctaccgccgaaaatatagagacgatccgagacaagataatagtatcacttgagctcaatgcacattccatatcggatgctgtggatgtttacatccagaatcaaatcagctcattgacccagctgaaggcctattcgggctttacgagtgctgcggtcgaacagtatctgaagtcaaaggcagacaacacgtttctatgggtggctcttgcctgtcaacaactcgcaaggacgcgcctcttggaggaagaggttcgcgagaggctgcctaccctgatccctccgggtcttgatcagctctacgccaggatgcttctcatgatctccgaagaccaccacgacttcgatggcgtagcagatcagtgcctgagcatcctggctgtcatggcagtatcctatgcgcctttgactttgaaagagctcgtggcacttacgaagcctgatcggatattctacagcgatgctaacatcatccgaagtagaattgagtactgtggttcattcctagctcaaagaggcgatactgtctactttgttcaccagtcagcccaagattacctgatcaaagacggtcgcaagcacatttttcactccggtccgcaggaagagcactatcgaatcttggttcaatctctagacgccctgaatcgcgtgctatatcggaatatgcatggagtatcggccgaggactttgggtgtcaattgcgcgacataaggaaatctcaaccggatcctttggatggaatacgatacttgatagttcattgggctgaccacttcctgtgctcgagctccgctaggcattcagaaggcttcagggaggggggcgaagtacatatgtttttgcggacaaaattccttttctggatcgaggctttgagcctggagtcaagcgtatacgacggcgtgattgcaatggaaaggcttgaaaatctttctaagaacaatacgtgtacggaaacctataaaatgttacgggatttccgaaagttcatccaggcatatgcctcattgatagctgaggcaccactccaggtttacgtatcggcactagtattttcaccgtcggagagcatactccgccgtctattttcggatcaagagccacatatcctccccaatatgccgctcacaaggaaatcgtggagtgcctggcactgtcacctggagcacatcatcaaggcacggtgccttgtattttcgccggactcacagctactcgctagttcttcggacactgaagttgtcttttcaagcgtcggtacgggtagagtacattttaaagtcacgcgcaataacttttccgcggaatatcctatccttcctattctattttccgcagactcgaaagtagcggcgctctcagaccacaatggtgaagtactcttttacaacaccgagacagctgacctcatgtatcgtacgcgtctactcgataagggatggattctaaaagacctagccatgtctccaaaggcaaactggcttgcaggtcttgtaagacaccaggacgacaattccaagatccccgttgattatgtgtgttcctggactaccagcggacaggttcgaggccaaagtctacgatgcgactctgaggcccaagcaatcgcaatcaaccagaatccatctctgaactatccagatattgcggtagcttggcgtgacagtgtgacagtgtttcaaagcaaccttaaacctctcagaaacttcaaggtggaaagcactggtttcggcgcagcattctcgcccacccttgagacttttgccacatctaacgatgaaaccattgatatttatgatgttcctagagggtcacttgtccaaaagctagaggattatactttcggacacttttctcgaatcgcgttttcaaacacttccctactaatcgcaggcgctgtagacgaagtcatcatatgggatttgcgcaatagcaccttgctttggaaatcggagcaaaacaatatgaacgatgtggcaatctcgatgtgctcgaagttgtttgctgtttcataccggcacgcctatatcggacgaatggatgagctacctcaaggttcagagaggaatgctttcatcttttgtaaattggacctgaagctggctccaaattcgaaatggcttgcctcaacgagcctcatccacgagtcagtaaatatttggagcactgattctggtcagattgagcagaccttgccggtctgcgggcaggtcacagccatggaattctctgcagactcatctctgcttgctattctatacggatacgatggtcagtgggcagtggctactccctccagaattcaaatatgggacgtacggagcggaacccaaattcgcgagatctccgacgaaatcgatcaaaatgaaatgacggactcaccagtccactttgcttggaccgagaaacacattgtcatcgccgtatcggttccggagaaacagggcgtggagcttcggattctggataaagaaactgggaataaggtgtattctctacccattcagaccacaatccaggatgtaaacctgtctacgaacttcgagctcattgccgtaagctatcgtgttgcgggaatcgaaccaggggaattcaaaatactcatagtggacttgccaaccgggtctacttttggacaatgggccgtacctggagtgcgcttgggtggtactttgaagttcacgtccaacaaaacattgtggactggtcgtggcgagatcgatttggaacggtctacacctggagatgagccagtctggagcccgcccactgtttacgcaatggatgagaagacgaaatggataaataagaatgggaaacgctggctgtgtctcccagcccttgaagtgataggggactggatctcgaaaggttctattatagtgatacagcatgcatctgggattgtaggggatcctgataatctctcgatttttaaagattga

SEQ ID NO: 6529 - protein, 1495 aa, Muscodor strobelii
  misc_feature: SGI Peptide ID NO. 561920
  misc_feature (365)..(548): Pfam Id: PF05729 Pfam Desc: NACHT domain
  misc_feature (60)..(244): Pfam Id: PF04607 Pfam Desc: Region found in RelA / SpoT proteins
  misc_feature (365)..(510): Pfam Id: PF05729 Pfam Desc: NACHT domain
  misc_feature (310)..(1290): NCBI GI: 154936836 Blast Desc: HNWD1 [Podospora anserina]
  misc_feature (310)..(1297): NCBI GI: 171677548 Blast Desc: protein product [Podospora anserina] gi|170936842|emb|CAP61500.1| protein product [Podospora anserina]
  misc_feature (276)..(1291): NCBI GI: 171685532 Blast Desc: protein product [Podospora anserina] gi|170942727|emb|CAP68380.1| protein product [Podospora anserina]
  misc_feature (307)..(1384): NCBI GI: 17225204 Blast Desc: AF323582_1 beta transducin-like protein HET-E2C [Podospora anserina]
  misc_feature (276)..(1291): NCBI GI: 154936832 Blast Desc: HNWD3 [Podospora anserina]
  misc_feature (307)..(1384): NCBI GI: 17225208 Blast Desc: AF323584_1 beta transducin-like protein HET-E2C*40 [Podospora anserina]
  misc_feature (306)..(1296): NCBI GI: 154936830 Blast Desc: NWD1 [Podospora anserina]
  misc_feature (307)..(1384): NCBI GI: 17225206 Blast Desc: AF323583_1 beta transducin-like protein HET-E2C*4 [Podospora anserina]
  misc_feature (307)..(1384): NCBI GI: 3023956 Blast Desc: HETE1_PODAN RecName: Full=Vegetative incompatibility protein HET-E-1 gi|607003|gb|AAA85775.1| beta transducin-like protein [Podospora anserina]
  misc_feature (307)..(1095): NCBI GI: 17225202 Blast Desc: AF323581_1 beta transducin-like protein HET-E4s [Podospora anserina]
  misc_feature: Useful for introducing or modulating the production of volatile compounds
MERSACVADSEFERLLSEFKIVHQNGLERLRHYVETAADIVQQNLSRTFQVEHKKVEPSLKNAAKAIETLRRRQRERITLGELRTEIERRGENWVDHCKKWNLRDKEHDVERFRNVEEMFDAMHDLARFRILIRYESDTDKVVNFLSIHFELIDGPKEKGGQQKDIQRIHKQIEQYGTVSTHKSSVFPGYRATHVVVRHKIGQPLLRADDQRAHWNMVIEVQIGTVGMYEWSDIEHDVIYKPSEVSQLPDDAERILDMINGITLVGDMMKDHFRKLLRPAETEQGVSLTRPPMQEVARNSPPTLSEKDRRDLGEFGGTNPSLDKIRIEETKGTLLRDSYKWILTNGEYLKWYNRFELRQDEGGCRLLWVRGDPGKGKTMILCGVITELAQDLSSDYGLCYFFCQAADSRLNSATSVLRGLMYMLVHQQPSLMSYVRDYVSSGSLGAFDGPNAFLGLRTTCTRMLHDKALKNTYIIIDALDECQTNRTELIDWIAERSQDCPRAKWIVSSRNWPPTAENIETIRDKIIVSLELNAHSISDAVDVYIQNQISSLTQLKAYSGFTSAAVEQYLKSKADNTFLWVALACQQLARTRLLEEEVRERLPTLIPPGLDQLYARMLLMISEDHHDFDGVADQCLSILAVMAVSYAPLTLKELVALTKPDRIFYSDANIIRSRIEYCGSFLAQRGDTVYFVHQSAQDYLIKDGRKHIFHSGPQEEHYRILVQSLDALNRVLYRNMHGVSAEDFGCQLRDIRKSQPDPLDGIRYLIVHWADHFLCSSSARHSEGFREGGEVHMFLRTKFLFWIEALSLESSVYDGVIAMERLENLSKNNTCTETYKMLRDFRKFIQAYASLIAEAPLQVYVSALVFSPSESILRRLFSDQEPHILPNMPLTRKSWSAWHCHLEHIIKARCLVFSPDSQLLASSSDTEVVFSSVGTGRVHFKVTRNNFSAEYPILPILFSADSKVAALSDHNGEVLFYNTETADLMYRTRLLDKGWILKDLAMSPKANWLAGLVRHQDDNSKIPVDYVCSWTTSGQVRGQSLRCDSEAQAIAINQNPSLNYPDIAVAWRDSVTVFQSNLKPLRNFKVESTGFGAAFSPTLETFATSNDETIDIYDVPRGSLVQKLEDYTFGHFSRIAFSNTSLLIAGAVDEVIIWDLRNSTLLWKSEQNNMNDVAISMCSKLFAVSYRHAYIGRMDELPQGSERNAFIFCKLDLKLAPNSKWLASTSLIHESVNIWSTDSGQIEQTLPVCGQVTAMEFSADSSLLAILYGYDGQWAVATPSRIQIWDVRSGTQIREISDEIDQNEMTDSPVHFAWTEKHIVIAVSVPEKQGVELRILDKETGNKVYSLPIQTTIQDVNLSTNFELIAVSYRVAGIEPGEFKILIVDLPTGSTFGQWAVPGVRLGGTLKFTSNKTLWTGRGEIDLERSTPGDEPVWSPPTVYAMDEKTKWINKNGKRWLCLPALEVIGDWISKGSIIVIQHASGIVGDPDNLSIFKD

SEQ ID NO: 6530 - DNA, 2498 bp, Muscodor strobelii
  misc_feature: SGI EST ID NO. CUFF.16373.0
  misc_feature: Variant of the nucleotide sequence at SEQ ID NO 6528
cgcaggaagagcactatcgaatcttggttcaatctctagacgccctgaatcgcgtgctatatcggaatatgcatggagtatcggccgaggactttgggtgtcaattgcgcgacataaggaaatctcaaccggatcctttggatggaatacgatacttgatagttcattgggctgaccacttcctgtgctcgagctccgctaggcattcagaaggcttcagggaggggggcgaagtacatatgtttttgcggacaaaattccttttctggatcgaggctttgagcctggagtcaagcgtatacgacggcgtgattgcaatggaaaggcttgaaaatctttctaagaacaatacgtgtacggaaacctataaaatgttacgggatttccgaaagttcatccaggcatatgcctcattgatagctgaggcaccactccaggtttacgtatcggcactagtattttcaccgtcggagagcatactccgccgtctattttcggatcaagagccacatatcctccccaatatgccgctcacaaggaaatcgtggagtgcctggcactgtcacctggagcacatcatcaaggcacggtgccttgtattttcgccggactcacagctactcgctagttcttcggacactgaagttgtcttttcaagcgtcggtacgggtagagtacattttaaagtcacgcgcaataacttttccgcggaatatcctatccttcctattctattttccgcagactcgaaagtagcggcgctctcagaccacaatggtgaagtactcttttacaacaccgagacagctgacctcatgtatcgtacgcgtctactcgataagggatggattctaaaagacctagccatgtctccaaaggcaaactggcttgcaggtcttgtaagacaccaggacgacaattccaagatccccgttgattatgtgtgttcctggactaccagcggacaggttcgaggccaaagtctacgatgcgactctgaggcccaagcaatcgcaatcaaccagaatccatctctgaactatccagatattgcggtagcttggcgtgacagtgtgacagtgtttcaaagcaaccttaaacctctcagaaacttcaaggtggaaagcactggtttcggcgcagcattctcgcccacccttgagacttttgccacatctaacgatgaaaccattgatatttatgatgttcctagagggtcacttgtccaaaagctagaggattatactttcggacacttttctcgaatcgcgttttcaaacacttccctactaatcgcaggcgctgtagacgaagtcatcatatgggatttgcgcaatagcaccttgctttggaaatcggagcaaaacaatatgaacgatgtggcaatctcgatgtgctcgaagttgtttgctgtttcataccggcacgcctatatcggacgaatggatgagctacctcaaggttcagagaggaatgctttcatcttttgtaaattggacctgaagctggctccaaattcgaaatggcttgcctcaacgagcctcatccacgagtcagtaaatatttggagcactgattctggtcagattgagcagaccttgccggtctgcgggcaggtcacagccatggaattctctgcagactcatctctgcttgctattctatacggatacgatggtcaggtagtgatttccgactgtaaatactggaattcaaggcaatttcaaattgaggacgaattgaggtacttataccgatctgtctcgttttcggctgactcatcgcagtgggcagtggctactccctccagaattcaaatatgggacgtacggagcggaacccaaattcgcgagatctccgacgaaatcgatcaaaatgaaatgacggactcaccagtccactttgcttggaccgagaaacacattgtcatcgccgtatcggttccggagaaacagggcgtggagcttcggattctggataaagaaactgggaataaggtgtattctctacccattcagaccacaatccaggatgtaaacctgtctacgaacttcgagctcattgccgtaagctatcgtgttgcgggaatcgaaccaggggaattcaaaatactcatagtggacttgccaaccgggtctacttttggacaatgggccgtacctggagtgcgcttgggtggtactttgaagttcacgtccaacaaaacattgtggactggtcgtggcgagatcgatttggaacggtctacacctggagatgagccagtctggagcccgcccactgtttacgcaatggatgagaagacgaaatggataaataagaatgggaaacgctggctgtgtctcccagcccttgaagtgataggggactggatctcgaaaggttctattatagtgatacagcatgcatctgggattgtaggggatcctgataatctctcgatttttaaagattgaatcttgtatttcaacttgatgagaaggcaatgccattcgtca

SEQ ID NO: 6531 - DNA, 1527 bp, Muscodor strobelii
  misc_feature: SGI cDNA ID NO. 561921
  misc_feature: Elevated expression when VOC is produced
  misc_feature: Encodes the peptide sequence at SEQ ID NO 6532
atgacatggccaggaccacctcagtcctttcccacaattccgcacggcattcgggagcttgctgaaacaccgtctatgccttcagattactctacacttgtccagcaagccgcatctcaagatcccaacctagagtgcttggctgcatttctcacccgtgaccggtcgcaagcaaaattcaagagtatcgtcaattgcattagacacccgtccaccgttaactccagggaaactctttgtaccggtctcaaggctgctttacattgtgtcgatgaggttgctagtgttccgcctgccgcctctggttgttacatcatcatcgaggacccacgcccagaagacattgaagaactcggcaccgggctggacttgaacccgctgtttttcgctggccatgtggatacggcatatggcgacattggcaaagactctgcgcctcattcggcattgctatacccgagccagctgtcctcccaggagtttgtcaatattcactatcaacgagtaattaagtcacctcggcacctttgtagaaggcagcgtaaagtctccgttcctggaaacgttggccgccttctgcggtggtcgatttccattggaaattatcaatttggccttgctcgagggtgttgctcggtctatcgcaaagtcctgggaagcgggcagtggatctgtctcatactagttgacacagagctgggattccagggatctgggcagctgggcagatgcaacgacccatttgctacgtttcgaggctttattttccaagactgtagaaccacacccacgagttcaagctcttctcgaaaatatgacttgcccgaccgagccccccaatcgttccgcgaacatcttcttgagcttctctggcttaaccctgcgggtattttgcctacccagcacagcacattgagtttggtacactatcctgccaggctggtcctagctgagtggatgatgtacacgcacctgatggatcgctgcgtgaaatatttcgaacatgcattcaaggaaacgaaagagtgcagctccacctcagcgcatggcgaaatcgaagaactgcatcggtggcgtcgccgcagtaggcagagtcttcataaacttcacgtttttggcgagtttgtgcgattctggtgtacaagcgagcccgactacggcaccttcaaatcgatagaccgagatattcaattcataacacgaaagatcgaggattgcgatgattccttcaaatcaacagtgtctaacttgatcgccatgctgcagattctcgactcgcgaaaatcgattgaagaaagttccaatattaaacgacttactaccattgcaatgattttcacgccactagcgtatactgcttccttatttagtatggatccactgtacttaccaggccgcgttggtttctgggtttactttgttgttgcttttcctatgttactgctagtatttgctatagtcggctggccacagatctcaaggcttctgggatcggctcgggagaggctcaaacggggaatttcttag

SEQ ID NO: 6532 - protein, 508 aa, Muscodor strobelii
  misc_feature: SGI Peptide ID NO. 561921
  misc_feature (105)..(476): NCBI GI: 171678527 Blast Desc: protein product [Podospora anserina] gi|170937333|emb|CAP61991.1| protein product [Podospora anserina]
  misc_feature (26)..(487): NCBI GI: 242763409 Blast Desc: conserved [Talaromyces stipitatus ATCC 10500] gi|218723765|gb|EED23182.1| conserved [Talaromyces stipitatus ATCC 10500]
  misc_feature (23)..(486): NCBI GI: 145607946 Blast Desc: MGG_09963 [Magnaporthe grisea 70-15] gi|145015420|gb|EDJ99956.1| MGG_09963 [Magnaporthe grisea 70-15]
  misc_feature (26)..(486): NCBI GI: 46120426 Blast Desc: FG04860.1 [Gibberella zeae PH-1]
  misc_feature (115)..(486): NCBI GI: 46127773 Blast Desc: FG08264.1 [Gibberella zeae PH-1]
  misc_feature (55)..(459): NCBI GI: 256728154 Blast Desc: NECHADRAFT_54193 [Nectria haematococca mpVI 77-13-4]
  misc_feature (115)..(486): NCBI GI: 256725035 Blast Desc: NECHADRAFT_26045 [Nectria haematococca mpVI 77-13-4]
  misc_feature (105)..(504): NCBI GI: 171687743 Blast Desc: protein product [Podospora anserina] gi|170943833|emb|CAP69485.1| protein product [Podospora anserina]
  misc_feature (388)..(501): NCBI GI: 212543973 Blast Desc: conserved [Penicillium marneffei ATCC 18224] gi|210067048|gb|EEA21141.1| conserved [Penicillium marneffei ATCC 18224]
  misc_feature (386)..(487): NCBI GI: 46107996 Blast Desc: FG00880.1 [Gibberella zeae PH-1]
  misc_feature: Useful for introducing or modulating the production of volatile compounds
MTWPGPPQSFPTIPHGIRELAETPSMPSDYSTLVQQAASQDPNLECLAAFLTRDRSQAKFKSIVNCIRHPSTVNSRETLCTGLKAALHCVDEVASVPPAASGCYIIIEDPRPEDIEELGTGLDLNPLFFAGHVDTAYGDIGKDSAPHSALLYPSQLSSQEFVNIHYQRVIKSPRHLCRRQRKVSVPGNVGRLLRWSISIGNYQFGLARGCCSVYRKVLGSGQWICLILVDTELGFQGSGQLGRCNDPFATFRGFIFQDCRTTPTSSSSSRKYDLPDRAPQSFREHLLELLWLNPAGILPTQHSTLSLVHYPARLVLAEWMMYTHLMDRCVKYFEHAFKETKECSSTSAHGEIEELHRWRRRSRQSLHKLHVFGEFVRFWCTSEPDYGTFKSIDRDIQFITRKIEDCDDSFKSTVSNLIAMLQILDSRKSIEESSNIKRLTTIAMIFTPLAYTASLFSMDPLYLPGRVGFWVYFVVAFPMLLLVFAIVGWPQISRLLGSARERLKRGIS

SEQ ID NO: 6533 - DNA, 1933 bp, Muscodor strobelii
  misc_feature: SGI EST ID NO. CUFF.16381.0
  misc_feature: Variant of the nucleotide sequence at SEQ ID NO 6531
caagattctagtgaaagatgagagcattatatatttgtttagttctaaggcattccgcttcctaaatccggagccaactgcaccgactcgcctctatgacatggccaggaccacctcagtcctttcccacaattccgcacggcattcgggagcttgctgaaacaccgtctatgccttcagattactctacacttgtccagcaagccgcatctcaagatcccaacctagagtgcttggctgcatttctcacccgtgaccggtcgcaagcaaaattcaagagtatcgtcaattgcattagacacccgtccaccgttaactccagggaaactctttgtaccggtctcaaggctgctttacattgtgtcgatgaggttgctagtgttccgcctgccgcctctggttgttacatcatcatcgaggacccacgcccagaagacattgaagaactcggcaccgggctggacttgaacccgctgtttttcgctggccatgtggatacggcatatggcgacattggcaaagactctgcgcctcattcggcattgctatacccgagccagctgtcctcccaggagtttgtcaatattcactatcaacgagtaattaagtcacctcggcacctttgtagaaggcagcgtaaagtctccgttcctggaaacgttggccgccttctgcggtggtcgatttccattggaaattatcaatttggccttgctcgagggtgttgctcggtctatcgcaaagtcctgggaagcgggcagtggatctgtctcatactagttgacacagagctgggattccagggatctgggcagctgggcagatgcaacgacccatttgctacgtttcgaggctttattttccaagactgtagaaccacacccacgagttcaagctcttctcgaaaatatgacttgcccgaccgagccccccaatcgttccgcgaacatcttcttgagcttctctggcttaaccctgcgggtattttgcctacccagcacagcacattgagtttggtacactatcctgccaggctggtcctagctgagtggatgatgtacacgcacctgatggatcgctgcgtgaaatatttcgaacatgcattcaaggaaacgaaagagtgcagctccacctcagcgcatggcgaaatcgaagaactgcatcggtggcgtcgccgcagtaggcagagtcttcataaacttcacgtttttggcgagtttgtgcgattctggtgtacaagcgagcccgactacggcaccttcaaatcgatagaccgagatattcaattcataacacgaaagatcgaggattgcgatgattccttcaaatcaacagtgtctaacttgatcgccatgctgcagattctcgactcgcgaaaatcgattgaagaaagttccaatattaaacgacttactaccattgcaatgattttcacgccactagcgtatactgcttccttatttagtatggatccactgtacttaccaggccgcgttggtttctgggtttactttgttgttgcttttcctatgttactgctagtatttgctatagtcggctggccacagatctcaaggcttctgggatcggctcgggagaggctcaaacggggaatttcttagatccacctatggctaactagatattacgtcctgtattgcgttataattgttaagattgctaatactgctagtaatattagctccgcagaggttaagatatggcagatatacgtcgcagcaggcattatctccctcgtagtggtgctcatcatcgatggtagcccaccgtttagaaagacggaattagacatggtaataggggttcgatgagtcagtgaaactagtggagggcaggtagcatgacttggatagctcagttctcgttgtgtcttagaaaaccagcaggaatttacactcttttcagttggggg

SEQ ID NO: 6534 - DNA, 1794 bp, Muscodor strobelii
  misc_feature: SGI cDNA ID NO. 561922
  misc_feature: Encodes the peptide sequence at SEQ ID NO 6535
atggccgaagaaacaataaagcgagactccgcacattccgcgtccaattcaacgccagacatagatcaagttgaacaccaagatagcagtaacccagagatcgaaaaacaggttgagaagtcaccatatagggactcggaaattgtgccgcttgaacaggaagcagttgaaaatgcctatcacatcaaattgagctggagatcatggctagtggtcttcattacgtgcttcgctgtcctagcccaggtcttcgtcgtcgtagccgctggctcagtaatagcgttcatcatccgagatctgggcgatgcctcactcgcaggatggattatccaaggccccctgctcctacaatccgtactctcacccatcatcggccgactatccgacgtcctagatcgtaaatatctcgccgcgattccaccattaatagcattcgtcggggcagtcgtatccgctacggcgaagtcaatgtctgttctcattggcggtggggtcttgataggaactacgctctcgactattagcattgtccaggctattccgtctgagatcctgccgttgaaattcagggcgttggcgaatgggtttgcttttgttggtggggctttgggcggcttggccggtgccttggtagcaggcgcagtgacaaacatcaacgcccatggctggcgatacatattctggatccaagccgcgctgcacggcattacatctctcgggctgctcttattctattggccaccgaaacaaaatcgtccaacactgagttggagggagatagtctgggcctgtgatccgatcggaagcgcgttattcgtgagcagtgcaacgctcatgctcctcgctcttgattgggcgggaggcgcatatgcatggtctgatccgcacgtcgctgtgccgttgagtttaggattggtgttgcttgttggtttcgctggatacgaatacaaaggacgcaccgacggcctagtagcccacatattcttccgccgcaacgcgaacttcgcatacgcagtgttcgccttcgccgtggaaggctggatattctactccgcagtgaattccgtcgttcccctagtcatcctgaatctcgggttcgagaccaattcatggcagatctccatcagacaacttagctaccagttccctgtgttattcgcttcgatccctattacgtggtatgcaacgcgatataaggatcttcaaagtccacttttggtcactttcactatattcctcgttgtaacgatagcgtacgcaacaataaaaccctcatggaacagcgcacagatcggcatcgcagtcctaacaggaatcggacaatcgggtcccctaacgctcctcgtagcatgtgttcaattcaccgctccccacgctttcctctccaccgccaccggtctagcattttctgctcgtgcaattggaggagcgttcggctctgccgtgcttgacgcaatcatcaacgggtatctctccggacattatgcgccggctatttcgaaagctgccatcaatgccggattgcctgaatctagcgttcctggtttgttggaggcattatctgcgggtgagattggctcgaatagtgtggacggagtgaatgacgcaatttggggagaggtgttgagtacgagccattggcagtatgcttatgcgtatagattagcgtattcgagtattataccttttgttgttctggctattgtggcggtcgcgttgcttaagggggttaaggagcttatgactgagaaggttgaggctactgttgaggttgttgggaagaaagagggctga

SEQ ID NO: 6535 - protein, 597 aa, Muscodor strobelii
  misc_feature: SGI Peptide ID NO. 561922
  misc_feature (75)..(480): Pfam Id: PF07690 Pfam Desc: Major Facilitator Superfamily
  misc_feature (27)..(590): NCBI GI: 256721117 Blast Desc: NECHADRAFT_88027 [Nectria haematococca mpVI 77-13-4]
  misc_feature (37)..(596): NCBI GI: 189195610 Blast Desc: [Pyrenophora tritici-repentis Pt-1C-BFP] gi|187980022|gb|EDU46648.1| [Pyrenophora tritici-repentis Pt-1C-BFP]
  misc_feature (6)..(590): NCBI GI: 212544290 Blast Desc: conserved [Penicillium marneffei ATCC 18224] gi|210065268|gb|EEA19362.1| conserved [Penicillium marneffei ATCC 18224]
  misc_feature (159)..(590): NCBI GI: 169605059 Blast Desc: SNOG_05545 [Phaeosphaeria nodorum SN15] gi|160706698|gb|EAT86609.2| SNOG_05545 [Phaeosphaeria nodorum SN15]
  misc_feature (35)..(590): NCBI GI: 85089953 Blast Desc: NCU07736 [Neurospora crassa OR74A] gi|28919522|gb|EAA28951.1| [Neurospora crassa OR74A]
  misc_feature (19)..(596): NCBI GI: 154295059 Blast Desc: BC1G_13658 [Botryotinia fuckeliana B05.10] gi|150844434|gb|EDN19627.1| BC1G_13658 [Botryotinia fuckeliana B05.10]
  misc_feature (80)..(590): NCBI GI: 256719817 Blast Desc: NECHADRAFT_30516 [Nectria haematococca mpVI 77-13-4]
  misc_feature (62)..(596): NCBI GI: 261359939 Blast Desc: transmembrane efflux protein [Verticillium albo-atrum VaMs.102]
  misc_feature (63)..(592): NCBI GI: 256724055 Blast Desc: NECHADRAFT_86247 [Nectria haematococca mpVI 77-13-4]
  misc_feature (63)..(592): NCBI GI: 242808928 Blast Desc: siderophore iron transporter, [Talaromyces stipitatus ATCC 10500] gi|218715888|gb|EED15310.1| siderophore iron transporter, [Talaromyces stipitatus ATCC 10500]
MAEETIKRDSAHSASNSTPDIDQVEHQDSSNPEIEKQVEKSPYRDSEIVPLEQEAVENAYHIKLSWRSWLVVFITCFAVLAQVFVVVAAGSVIAFIIRDLGDASLAGWIIQGPLLLQSVLSPIIGRLSDVLDRKYLAAIPPLIAFVGAVVSATAKSMSVLIGGGVLIGTTLSTISIVQAIPSEILPLKFRALANGFAFVGGALGGLAGALVAGAVTNINAHGWRYIFWIQAALHGITSLGLLLFYWPPKQNRPTLSWREIVWACDPIGSALFVSSATLMLLALDWAGGAYAWSDPHVAVPLSLGLVLLVGFAGYEYKGRTDGLVAHIFFRRNANFAYAVFAFAVEGWIFYSAVNSVVPLVILNLGFETNSWQISIRQLSYQFPVLFASIPITWYATRYKDLQSPLLVTFTIFLVVTIAYATIKPSWNSAQIGIAVLTGIGQSGPLTLLVACVQFTAPHAFLSTATGLAFSARAIGGAFGSAVLDAIINGYLSGHYAPAISKAAINAGLPESSVPGLLEALSAGEIGSNSVDGVNDAIWGEVLSTSHWQYAYAYRLAYSSIIPFVVLAIVAVALLKGVKELMTEKVEATVEVVGKKEG

SEQ ID NO: 6536 - DNA, 1128 bp, Muscodor strobelii
  misc_feature: SGI EST ID NO. CUFF.16388.0
  misc_feature: Variant of the nucleotide sequence at SEQ ID NO 6534
gcttgaacaggaagcagttgaaaatgcctatcacatcaaattgagctggagatcatggctagtggtcttcattacgtgcttcgcgtaagtctccaaaatcaatcttacgcagtagaaagaaactagaagtctgaccttgagacgagccgcaaagtgtcctagcccaggtcttcgtcgtcgtagccgctggctcagtaatagcgttcatcatccgagatctgggcgatgcctcactcgcaggatggattatccaaggccccctgctcctacaatccgtactctcacccatcatcggccgactatccgacgtcctagatcgtaaatatctcgccgcgattccaccattaatagcattcgtcggggcagtcgtatccgctacggcgaagtcaatgtctgttctcattggcggtggggtcttgataggaactacgctctcgactattagcattgtccaggctattccgtctgagatcctgccgttgaaattcagggcgttggcgaatgggtttgcttttgttggtggggctttgggcggcttgtaagtcgttcaagttattgggggctagaggaagagcagatgttacgcgagggaaatcaacgaggtatgctgatatgtcgaccttgtagggccggtgccttggtagcaggcgcagtgacaaacatcaacgcccatggctggcgatacatattctggatccaagccgcgctgcacggcattacatctctcgggctgctcttattctattggccaccgaaacaaaatcgtccaacactgagttggagggagatagtctgggcctgtgatccgatcggaagcgcgttattcgtgagcagtgcaacgctcatgctcctcgctcttgattgggcgggaggcgcatatgcatggtctgatccgcacgtcgctgtgccgttgagtttaggattggtgttgcttgttggtttcgctggatacgaatacaaaggacgcaccgacggcctagtagcccacatattcttccgccgcaacgcgaacttcgcatacgcagtgttcgccttcgccgtggaaggctggatattctactccgcagtgaattccgtcgttcccctagtcatcctgaatctcgggttcgagaccaattcatggcagat

SEQ ID NO: 6537 - DNA, 1899 bp, Muscodor strobelii
  misc_feature: SGI cDNA ID NO. 561923
  misc_feature: Encodes the peptide sequence at SEQ ID NO 6538
atggccgaagaaacaataaagcgagactccgcacattccgcgtccaattcaacgccagacatagatcaagttgaacaccaagatagcagtaacccagagatcgaaaaacaggttgagaagtcaccatatagggactcggaaattgtgccgcttgaacaggaagcagttgaaaatgcctatcacatcaaattgagctggagatcatggctagtggtcttcattacgtgcttcgctgtcctagcccaggtcttcgtcgtcgtagccgctggctcagtaatagcgttcatcatccgagatctgggcgatgcctcactcgcaggatggattatccaagtaactcttcccttccctcttcccccaatacttcaaatcaccatccattgcctcccccaacatcctgtttacatacctcacctcccaccacctaacaatccacagggccccctgctcctacaatccgtactctcacccatcatcggccgactatccgacgtcctagatcgtaaatatctcgccgcgattccaccattaatagcattcgtcggggcagtcgtatccgctacggcgaagtcaatgtctgttctcattggcggtggggtcttgataggaactacgctctcgactattagcattgtccaggctattccgtctgagatcctgccgttgaaattcagggcgttggcgaatgggtttgcttttgttggtggggctttgggcggcttggccggtgccttggtagcaggcgcagtgacaaacatcaacgcccatggctggcgatacatattctggatccaagccgcgctgcacggcattacatctctcgggctgctcttattctattggccaccgaaacaaaatcgtccaacactgagttggagggagatagtctgggcctgtgatccgatcggaagcgcgttattcgtgagcagtgcaacgctcatgctcctcgctcttgattgggcgggaggcgcatatgcatggtctgatccgcacgtcgctgtgccgttgagtttaggattggtgttgcttgttggtttcgctggatacgaatacaaaggacgcaccgacggcctagtagcccacatattcttccgccgcaacgcgaacttcgcatacgcagtgttcgccttcgccgtggaaggctggatattctactccgcagtgaattccgtcgttcccctagtcatcctgaatctcgggttcgagaccaattcatggcagatctccatcagacaacttagctaccagttccctgtgttattcgcttcgatccctattacgtggtatgcaacgcgatataaggatcttcaaagtccacttttggtcactttcactatattcctcgttgtaacgatagcgtacgcaacaataaaaccctcatggaacagcgcacagatcggcatcgcagtcctaacaggaatcggacaatcgggtcccctaacgctcctcgtagcatgtgttcaattcaccgctccccacgctttcctctccaccgccaccggtctagcattttctgctcgtgcaattggaggagcgttcggctctgccgtgcttgacgcaatcatcaacgggtatctctccggacattatgcgccggctatttcgaaagctgccatcaatgccggattgcctgaatctagcgttcctggtttgttggaggcattatctgcgggtgagattggctcgaatagtgtggacggagtgaatgacgcaatttggggagaggtgttgagtacgagccattggcagtatgcttatgcgtatagattagcgtattcgagtattataccttttgttgttctggctattgtggcggtcgcgttgcttaagggggttaaggagcttatgactgagaaggttgaggctactgttgaggttgttgggaagaaagagggctga

SEQ ID NO: 6538 - protein, 632 aa, Muscodor strobelii
  misc_feature: SGI Peptide ID NO. 561923
  misc_feature (75)..(515): Pfam Id: PF07690 Pfam Desc: Major Facilitator Superfamily
  misc_feature (27)..(625): NCBI GI: 256721117 Blast Desc: NECHADRAFT_88027 [Nectria haematococca mpVI 77-13-4]
  misc_feature (37)..(631): NCBI GI: 189195610 Blast Desc: [Pyrenophora tritici-repentis Pt-1C-BFP] gi|187980022|gb|EDU46648.1| [Pyrenophora tritici-repentis Pt-1C-BFP]
  misc_feature (6)..(625): NCBI GI: 212544290 Blast Desc: conserved [Penicillium marneffei ATCC 18224] gi|210065268|gb|EEA19362.1| conserved [Penicillium marneffei ATCC 18224]
  misc_feature (194)..(625): NCBI GI: 169605059 Blast Desc: SNOG_05545 [Phaeosphaeria nodorum SN15] gi|160706698|gb|EAT86609.2| SNOG_05545 [Phaeosphaeria nodorum SN15]
  misc_feature (35)..(625): NCBI GI: 85089953 Blast Desc: NCU07736 [Neurospora crassa OR74A] gi|28919522|gb|EAA28951.1| [Neurospora crassa OR74A]
  misc_feature (155)..(625): NCBI GI: 256719817 Blast Desc: NECHADRAFT_30516 [Nectria haematococca mpVI 77-13-4]
  misc_feature (19)..(625): NCBI GI: 154295059 Blast Desc: BC1G_13658 [Botryotinia fuckeliana B05.10] gi|150844434|gb|EDN19627.1| BC1G_13658 [Botryotinia fuckeliana B05.10]
  misc_feature (150)..(627): NCBI GI: 242808928 Blast Desc: siderophore iron transporter, [Talaromyces stipitatus ATCC 10500] gi|218715888|gb|EED15310.1| siderophore iron transporter, [Talaromyces stipitatus ATCC 10500]
  misc_feature (63)..(627): NCBI GI: 256724055 Blast Desc: NECHADRAFT_86247 [Nectria haematococca mpVI 77-13-4]
  misc_feature (234)..(559): NCBI GI: 256720197 Blast Desc: NECHADRAFT_56320 [Nectria haematococca mpVI 77-13-4]
MAEETIKRDSAHSASNSTPDIDQVEHQDSSNPEIEKQVEKSPYRDSEIVPLEQEAVENAYHIKLSWRSWLVVFITCFAVLAQVFVVVAAGSVIAFIIRDLGDASLAGWIIQVTLPFPLPPILQITIHCLPQHPVYIPHLPPPNNPQGPLLLQSVLSPIIGRLSDVLDRKYLAAIPPLIAFVGAVVSATAKSMSVLIGGGVLIGTTLSTISIVQAIPSEILPLKFRALANGFAFVGGALGGLAGALVAGAVTNINAHGWRYIFWIQAALHGITSLGLLLFYWPPKQNRPTLSWREIVWACDPIGSALFVSSATLMLLALDWAGGAYAWSDPHVAVPLSLGLVLLVGFAGYEYKGRTDGLVAHIFFRRNANFAYAVFAFAVEGWIFYSAVNSVVPLVILNLGFETNSWQISIRQLSYQFPVLFASIPITWYATRYKDLQSPLLVTFTIFLVVTIAYATIKPSWNSAQIGIAVLTGIGQSGPLTLLVACVQFTAPHAFLSTATGLAFSARAIGGAFGSAVLDAIINGYLSGHYAPAISKAAINAGLPESSVPGLLEALSAGEIGSNSVDGVNDAIWGEVLSTSHWQYAYAYRLAYSSIIPFVVLAIVAVALLKGVKELMTEKVEATVEVVGKKEG

SEQ ID NO: 6539 - DNA, 1128 bp, Muscodor strobelii; identical to SEQ ID NO: 6536
  misc_feature: SGI EST ID NO. CUFF.16388.0
  misc_feature: Variant of the nucleotide sequence at SEQ ID NO 6537

SEQ ID NO: 6540 - DNA, 987 bp, Muscodor strobelii
  misc_feature: SGI cDNA ID NO. 561924
  misc_feature: Encodes the peptide sequence at SEQ ID NO 6541
atgcaggctttccgacacatgcggccagcagccctgcgccagctctcaaaacgatcatactcctcctccgcctacgcccagacgatcgagaacttgcgcatcaacggcgacaccaaggtcatcttccagggcttcactggaaagcagggaactttccacgccgagcaggccatcgcctacggcaccaaggttgtaggaggcacaaaccccaagaaggccggtcagacacatctcgacctccctgtcttcgctaaggttgaggatgccgtcaaggagaccggcgcaaatgccaccgccatcttcgtccccccaccgctggctgctgccggtatcgaggaggccattgccgctgagattcccctcgtagtatgcattactgagggtatcccccagcacgacatggtccgcatcaccgatatcctcaagacgcaatccaagacccgcctcgtcggccccaactgccccggaattatcgcccctggccagtgcaagatcggtatcatgcctggtttcatccacaagcgcggtcgcatcggtattgtctcccgatccggtaccctcacctacgaggccgtcaatcagaccactcaggccggtctaggccagtctctcgtcgttggtattggtggtgacccgttcagcggcaccaacttcatcgactgcctcaacgtcttcctcaaggacgaggagacggacggaatcatcatgatcggtgagatcggtggatctgctgaggaggatgctgccgacttcctcaaggccaataacacggtcaacggcggcaagcccgttgtcagcttcattgccggtatcagtgctcccccaggacgccgcatgggtcacgccggtgccatcgtcgccggtggcaagggtggtgccgactccaagatcaaggccctggaggctgccggtgtcgttgtcgagcgctctcctgctggtcttggacgtgctatgcgtgaggctttcgtcaagagagatctgttgtaa

SEQ ID NO: 6541 - protein, 328 aa, Muscodor strobelii
  misc_feature: SGI Peptide ID NO. 561924
  misc_feature (33)..(129): Pfam Id: PF02629 Pfam Desc: CoA binding domain
  misc_feature (163)..(308): Pfam Id: PF00549 Pfam Desc: CoA-ligase
  misc_feature (1)..(328): NCBI GI: 171692603 Blast Desc: protein product [Podospora anserina] gi|170946250|emb|CAP73051.1| protein product [Podospora anserina]
  misc_feature (1)..(328): NCBI GI: 39941136 Blast Desc: MGG_05480 [Magnaporthe grisea 70-15] gi|145022137|gb|EDK06157.1| MGG_05480 [Magnaporthe grisea 70-15]
  misc_feature (1)..(328): NCBI GI: 85103754 Blast Desc: succinyl-CoA ligase alpha-chain, mitochondrial precursor [Neurospora crassa OR74A] gi|74665374|sp|Q9P727.1|SUCA_NEUCR RecName: Full= succinyl-CoA
  misc_feature (1)..(328): NCBI GI: 256728732 Blast Desc: [Nectria haematococca mpVI 77-13-4]
  misc_feature (1)..(328): NCBI GI: 116198547 Blast Desc: CHGG_07429 [Chaetomium globosum CBS 148.51] gi|88178708|gb|EAQ86176.1| CHGG_07429 [Chaetomium globosum CBS 148.51]
  misc_feature (1)..(328): NCBI GI: 46110296 Blast Desc: FG02030.1 [Gibberella zeae PH-1]
  misc_feature (1)..(328): NCBI GI: 145253767 Blast Desc: An17g01670 [Aspergillus niger] gi|134083968|emb|CAK43063.1| protein product [Aspergillus niger]
  misc_feature (1)..(328): NCBI GI: 169765193 Blast Desc: [Aspergillus oryzae RIB40] gi|238503510|ref|XP_002382988.1| succinyl-CoA synthetase alpha subunit, [Aspergillus flavus NRRL3357] protein product oryzae]
  misc_feature (1)..(328): NCBI GI: 67523679 Blast Desc: AN2295.2 [Aspergillus nidulans FGSC A4] gi|40745250|gb|EAA64406.1| conserved [Aspergillus nidulans FGSC A4] gi|259487689|tpe|CBF86553.1| TPA: succinyl-CoA synthetase A4]
  misc_feature (1)..(328): NCBI GI: 121712676 Blast Desc: succinyl-CoA synthetase alpha subunit, [Aspergillus clavatus NRRL 1] gi|119402102|gb|EAW12523.1| succinyl-CoA synthetase alpha subunit, [Aspergillus clavatus NRRL 1]
  misc_feature (1)..(328): SWISSPROT Homolog: EC 6.2.1.4 Succinate--CoA ligase (GDP-forming)
MQAFRHMRPAALRQLSKRSYSSSAYAQTIENLRINGDTKVIFQGFTGKQGTFHAEQAIAYGTKVVGGTNPKKAGQTHLDLPVFAKVEDAVKETGANATAIFVPPPLAAAGIEEAIAAEIPLVVCITEGIPQHDMVRITDILKTQSKTRLVGPNCPGIIAPGQCKIGIMPGFIHKRGRIGIVSRSGTLTYEAVNQTTQAGLGQSLVVGIGGDPFSGTNFIDCLNVFLKDEETDGIIMIGEIGGSAEEDAADFLKANNTVNGGKPVVSFIAGISAPPGRRMGHAGAIVAGGKGGADSKIKALEAAGVVVERSPAGLGRAMREAFVKRDLL

SEQ ID NO: 6542 - DNA, 1486 bp, Muscodor strobelii
  misc_feature: SGI EST ID NO. CUFF.16890.0
  misc_feature: Variant of the nucleotide sequence at SEQ ID NO 6540
gcgcgttttgccggggctgtttgaagctgtctgtcaaattgttgccaattgcgactcgaagctttcgccgacgtaaatcacgctcccatctaataattcatcaccaaccgcaccgccgcgcctcccatctcccctctcgccgatctgctgcagtcgactagtatttgtcgctgctgcacataagcctcgcctcggcctacgtagaatattctcccctttacgcagtcccatcctccacacaatgcaggctttccgacacatgcggccagcagccctgcgccagctctcaaaacgatcatactcctcctccgcctacgcccagacgatcgagaacttgcgcatcaacggcgacaccaaggtcatcttccagggcttcactggaaagcagggaactttccacgccgagcaggccatcgcctacggcaccaaggttgtaggaggcacaaaccccaagaaggccggtcagacacatctcgacctccctgtcttcgctaaggttgaggatgccgtcaaggagaccggcgcaaatgccaccgccatcttcgtccccccaccgctggctgctgccggtatcgaggaggccattgccgctgagattcccctcgtagtatgcattactgagggtatcccccagcacgacatggtccgcatcaccgatatcctcaagacgcaatccaagacccgcctcgtcggccccaactgccccggaattatcgcccctggccagtgcaagatcggtatcatgcctggtttcatccacaagcgcggtcgcatcggtattgtctcccgatccggtaccctcacctacgaggccgtcaatcagaccactcaggccggtctaggccagtctctcgtcgttggtattggtggtgacccgttcagcggcaccaacttcatcgactgcctcaacgtcttcctcaaggacgaggagacggacggaatcatcatgatcggtgagatcggtggatctgctgaggaggatgctgccgacttcctcaaggccaataacacggtcaacggcggcaagcccgttgtcagcttcattgccggtatcagtgctcccccaggacgccgcatgggtcacgccggtgccatcgtcgccggtggcaagggtggtgccgactccaagatcaaggccctggaggctgccggtgtcgttgtcgagcgctctcctgctggtcttggacgtgctatgcgtgaggctttcgtcaagagagatctgttgtaaaaatgtggttgatgtctgatggttgtctgagctctctgatcgggtgtaatggtcggtggttggtgtataaataacttaactaagatagaggtttccctggcatctggcggtctttcataactcatctgtcaaatacagcaaagcatgatcaattccgtctcttcgtgcacttctacatgtgctacttacgggtatgattaccctgcggctgaccagtgccttgaactcagtattgccagaaacgtcacgagaccattc

SEQ ID NO: 6543 - DNA, 1383 bp, Muscodor strobelii
  misc_feature: SGI cDNA ID NO. 561925
  misc_feature: Reduced expression when VOC is produced
  misc_feature: Encodes the peptide sequence at SEQ ID NO 6544
atgggtcaaaaccagtctggaatgggtggtggcggccaagatggcagggatgacaaggataagaagaaagacaagcccaagtatgagccacccccacggccgaccacccgcatcggccgcaagaagagaaaggctgccggcacttctgccgctgctaagctccccgccgtctaccccacgagtcgatgcaagctccgactgctccgcatgcagcgcatccacgaccacctgctgctggaggaggagtatgtcgagaaccaagagcgcctgcgaaaggccaaggctgccaaggacaacaccggccctgcccccgatcccgaggctggcgacagaatggccgatgagcgcggacgagtcgacgacatgcgcggcagcccaatgggggttggcacgttggaggagatgatcgatgatgaccacgccatcgtgtccagcactactggtcccgaatactatgttagcatcatgagcttcgtcgacaaggatctgctcgagcccggtgcctccgtgttgctgcatcataagagtgtatctatagtaggagtgctcactgatgacacagatccggccgtcaacgttatgaagctggacaaggccccgaccgagtcctacgccgatattggaggtctggagcaacagattcaagaggtgcgagagtctgtcgagctgccactcttacatcccgaactctacgaggagatgggtatcaagccgcccaagggtgtcattctctacggtgctcccggcaccggaaagacattacttgccaaggccgtcgccaaccagacttcggctacgttcttacgtatcgttggtagtgagcttatccagaaatatctgggtgatggacctcgtcttgttcgtcaactcttccaggtggctgccgaaaatgccccctccattgtctttatcgacgagatcgatgctattggcacgaagcgatatgactctacgtccggcggagagcgtgagattcaacgaaccatgttggagttgctcaatcaactagacggtttcgatgaccgtggtgacgtcaaggtgatcatggccaccaacaagatcgagactttagatcctgctctcatccgtcctggtcgtattgatcgtaagattctctttgagaaccccgatcaaatcacgaaacgcaagattttcaacttgcacactagcaagatgagcctgaacgaggatgtcgatcttgatgagttcatcagccagaaggatgatctttcaggtgccgacatcaaggctatctgctcggaggctgggctgatggccctgcgggagcgtcgtatgcgtgtacagatggccgacttcagagctgcacgcgagagagtcctgcgtaccaagcaagagggagagccggagggcttgtacttgtag

SEQ ID NO: 6544 - protein, 460 aa, Muscodor strobelii
  misc_feature: SGI Peptide ID NO. 561925
  misc_feature (241)..(428): Pfam Id: PF00004 Pfam Desc: ATPase family associated with various cellular activities (AAA)
  misc_feature (242)..(270): Pfam Id: PF07726 Pfam Desc: ATPase family associated with various cellular activities (AAA)
  misc_feature (28)..(460): NCBI GI: 39941130 Blast Desc: proteasome regulatory particle subunit Rpt2 [Magnaporthe grisea 70-15] gi|145022133|gb|EDK06153.1| proteasome regulatory particle subunit Rpt2 [Magnaporthe grisea 70-15]
  misc_feature (1)..(460): NCBI GI: 171692599 Blast Desc: protein product [Podospora anserina] gi|170946248|emb|CAP73049.1| protein product [Podospora anserina]
  misc_feature (1)..(460): NCBI GI: 164426106 Blast Desc: 26S protease regulatory subunit 4 [Neurospora crassa OR74A] gi|16415979|emb|CAB88559.2| 26S ATP/ubiquitin-dependent proteinase chain S4 [Neurospora crassa] 26S protease regulatory 4
  misc_feature (23)..(460): NCBI GI: 261360977 Blast Desc: 26S protease regulatory subunit 4 [Verticillium albo-atrum VaMs.102]
  misc_feature (23)..(460): NCBI GI: 256728729 Blast Desc: [Nectria haematococca mpVI 77-13-4]
  misc_feature (1)..(460): NCBI GI: 154316053 Blast Desc: conserved [Botryotinia fuckeliana B05.10] gi|150846398|gb|EDN21591.1| conserved [Botryotinia fuckeliana B05.10]
  misc_feature (8)..(460): NCBI GI: 238844480 Blast Desc: 26S protease regulatory subunit 4 [Microsporum canis CBS 113480]
  misc_feature (1)..(460): NCBI GI: 156051284 Blast Desc: SS1G_07049 [Sclerotinia sclerotiorum 1980] gi|154704827|gb|EDO04566.1| SS1G_07049 [Sclerotinia sclerotiorum 1980]
  misc_feature (28)..(460): NCBI GI: 169611913 Blast Desc: SNOG_09071 [Phaeosphaeria nodorum SN15] gi|160702396|gb|EAT83263.2| SNOG_09071 [Phaeosphaeria nodorum SN15]
  misc_feature (28)..(460): NCBI GI: 189189246 Blast Desc: 26S protease regulatory subunit 6B [Pyrenophora tritici-repentis Pt-1C-BFP] gi|187972568|gb|EDU40067.1| 26S protease regulatory subunit 6B [Pyrenophora tritici-repentis
  misc_feature (180)..(430): SWISSPROT Homolog: EC 3.6.1.3 Adenosinetriphosphatase
  misc_feature: Useful for introducing or modulating the production of volatile compounds
MGQNQSGMGGGGQDGRDDKDKKKDKPKYEPPPRPTTRIGRKKRKAAGTSAAAKLPAVYPTSRCKLRLLRMQRIHDHLLLEEEYVENQERLRKAKAAKDNTGPAPDPEAGDRMADERGRVDDMRGSPMGVGTLEEMIDDDHAIVSSTTGPEYYVSIMSFVDKDLLEPGASVLLHHKSVSIVGVLTDDTDPAVNVMKLDKAPTESYADIGGLEQQIQEVRESVELPLLHPELYEEMGIKPPKGVILYGAPGTGKTLLAKAVANQTSATFLRIVGSELIQKYLGDGPRLVRQLFQVAAENAPSIVFIDEIDAIGTKRYDSTSGGEREIQRTMLELLNQLDGFDDRGDVKVIMATNKIETLDPALIRPGRIDRKILFENPDQITKRKIFNLHTSKMSLNEDVDLDEFISQKDDLSGADIKAICSEAGLMALRERRMRVQMADFRAARERVLRTKQEGEPEGLYL

SEQ ID NO: 6545 - DNA, 2023 bp, Muscodor strobelii
  misc_feature: SGI EST ID NO. CUFF.17095.0
  misc_feature: Variant of the nucleotide sequence at SEQ ID NO 6543
gttggctttgtcttggctcgttcgcttttgcacgcgttgcctctgggagcctgattacagcattggcctggagctaattgtctgagctcctactaacctccggagccttgtccacgaccatccatccacatctatcgcctgcctcgccccctcgctgagaacgcagccgtcgttgttgatcgtcggtagcatctcacacccgcctgacatcgcctgcatacctctgagttattttctatcatcacttccgatcagagccacactgcacagaggttcagtgttttacccagcttgcgacccgtttcgcaccgcctaactcacaatgggtcaaaaccagtctggaatgggtggtggcggccaagatggcagggatgacaaggataagaagaaagacaagcccaagtatgagccacccccacggccgaccacccgcatcggccgcaagaagagaaaggctgccggcacttctgccgctgctaagctccccgccgtctaccccacgagtcgatgcaagctccgactgctccgcatgcagcgcatccacgaccacctgctgctggaggaggagtatgtcgagaaccaagagcgcctgcgaaaggccaaggctgccaaggacaacaccggccctgcccccgatcccgaggctggcgacagaatggccgatgagcgcggacgagtcgacgacatgcgcggcagcccaatgggggttggcacgttggaggagatgatcgatgatgaccacgccatcgtgtccagcactactggtcccgaatactatgttagcatcatgagcttcgtcgacaaggatctgctcgagcccggtgcctccgtgttgctgcatcataagagtgtatctatagtaggagtgctcactgatgacacagatccggccgtcaacgttatgaagctggacaaggccccgaccgagtcctacgccgatattggaggtctggagcaacagattcaagaggtgcgagagtctgtcgagctgccactcttacatcccgaactctacgaggagatgggtatcaagccgcccaagggtgtcattctctacggtgctcccggcaccggaaagacattacttgccaaggccgtcgccaaccagacttcggctacgttcttacgtatcgttggtagtgagcttatccagaaatatctgggtgatggacctcgtcttgttcgtcaactcttccaggtggctgccgaaaatgccccctccattgtctttatcgacgagatcgatgctattggcacgaagcgatatgactctacgtccggcggagagcgtgagattcaacgaaccatgttggagttgctcaatcaactagacggtttcgatgaccgtggtgacgtcaaggtgatcatggccaccaacaagatcgagactttagatcctgctctcatccgtcctggtcgtattgatcgtaagattctctttgagaaccccgatcaaatcacgaaacgcaagattttcaacttgcacactagcaagatgagcctgaacgaggatgtcgatcttgatgagttcatcagccagaaggatgatctttcaggtgccgacatcaaggctatctgctcggaggctgggctgatggccctgcgggagcgtcgtatgcgtgtacagatggccgacttcagagctgcacgcgagagagtcctgcgtaccaagcaagagggagagccggagggcttgtacttgtagttaagatgtgtaacttattgcgtgcagcacaggatggggatgggagctatgaagattgggggtgcatctgaagcattgcatagacgctacaccgcgatgcttcctctaattaggtaacccttcaaccagaaaatgctcaacacaaacaggaatgcatgtaaatgagatgtgctacgtaattatggtttctcaatattattactacgagctctactatgggcatggagagacgtgaacaccaacgaacttgtcaatctacagctgattattgttaacgcttgccaagacttaagttgcgatctggaccccgaggttccc

SEQ ID NO: 6546 - DNA, 1176 bp, Muscodor strobelii
  misc_feature: SGI cDNA ID NO. 561926
  misc_feature: Encodes the peptide sequence at SEQ ID NO 6547
atgcagcgcatccacgaccacctgctgctggaggaggagtatgtcgagaaccaagagcgcctgcgaaaggccaaggctgccaaggacaacaccggccctgcccccgatcccgaggctggcgacagaatggccgatgagcgcggacgagtcgacgacatgcgcggcagcccaatgggggttggcacgttggaggagatgatcgatgatgaccacgccatcgtgtccagcactactggtcccgaatactatgttagcatcatgagcttcgtcgacaaggatctgctcgagcccggtgcctccgtgttgctgcatcataagagtgtatctatagtaggagtgctcactgatgacacagatccggccgtcaacgttatgaagctggacaaggccccgaccgagtcctacgccgatattggaggtctggagcaacagattcaagaggtgcgagagtctgtcgagctgccactcttacatcccgaactctacgaggagatgggtatcaagccgcccaagggtgtcattctctacggtgctcccggcaccggaaagacattacttgccaaggccgtcgccaaccagacttcggctacgttcttacgtatcgttggtagtgagcttatccagaaatatctgggtgatggacctcgtcttgttcgtcaactcttccaggtggctgccgaaaatgccccctccattgtctttatcgacgagatcgatgctattggcacgaagcgatatgactctacgtccggcggagagcgtgagattcaacgaaccatgttggagttgctcaatcaactagacggtttcgatgaccgtggtgacgtcaaggtgatcatggccaccaacaagatcgagactttagatcctgctctcatccgtcctggtcgtattgatcgtaagattctctttgagaaccccgatcaaatcacgaaacgcaagattttcaacttgcacactagcaagatgagcctgaacgaggatgtcgatcttgatgagttcatcagccagaaggatgatctttcaggtgccgacatcaaggctatctgctcggaggctgggctgatggccctgcgggagcgtcgtatgcgtgtacagatggccgacttcagagctgcacgcgagagagtcctgcgtaccaagcaagagggagagccggagggcttgtacttgtag

SEQ ID NO: 6547 - protein, 391 aa, Muscodor strobelii
  misc_feature: SGI Peptide ID NO. 561926
  misc_feature (172)..(359): Pfam Id: PF00004 Pfam Desc: ATPase family associated with various cellular activities (AAA)
  misc_feature (173)..(201): Pfam Id: PF07726 Pfam Desc: ATPase family associated with various cellular activities (AAA)
  misc_feature (1)..(391): NCBI GI: 261360977 Blast Desc: 26S protease regulatory subunit 4 [Verticillium albo-atrum VaMs.102]
  misc_feature (1)..(391): NCBI GI: 169611913 Blast Desc: SNOG_09071 [Phaeosphaeria nodorum SN15] gi|160702396|gb|EAT83263.2| SNOG_09071 [Phaeosphaeria nodorum SN15]
  misc_feature (1)..(391): NCBI GI: 154316053 Blast Desc: conserved [Botryotinia fuckeliana B05.10] gi|150846398|gb|EDN21591.1| conserved [Botryotinia fuckeliana B05.10]
  misc_feature (1)..(391): NCBI GI: 156051284 Blast Desc: SS1G_07049 [Sclerotinia sclerotiorum 1980] gi|154704827|gb|EDO04566.1| SS1G_07049 [Sclerotinia sclerotiorum 1980]
  misc_feature (1)..(391): NCBI GI: 189189246 Blast Desc: 26S protease regulatory subunit 6B [Pyrenophora tritici-repentis Pt-1C-BFP] gi|187972568|gb|EDU40067.1| 26S protease regulatory subunit 6B [Pyrenophora tritici-repentis
  misc_feature (1)..(391): NCBI GI: 256728729 Blast Desc: [Nectria haematococca mpVI 77-13-4]
  misc_feature (1)..(391): NCBI GI: 238844480 Blast Desc: 26S protease regulatory subunit 4 [Microsporum canis CBS 113480]
  misc_feature (1)..(391): NCBI GI: 226278284 Blast Desc: 26S protease regulatory subunit 4 [Paracoccidioides brasiliensis Pb01]
  misc_feature (1)..(391): NCBI GI: 226291110 Blast Desc: 26S protease regulatory subunit 4 [Paracoccidioides brasiliensis Pb18]
  misc_feature (1)..(391): NCBI GI: 239607630 Blast Desc: proteasome regulatory particle subunit Rpt2 [Ajellomyces dermatitidis ER-3]
  misc_feature (111)..(361): SWISSPROT Homolog: EC 3.6.1.3 Adenosinetriphosphatase
MQRIHDHLLLEEEYVENQERLRKAKAAKDNTGPAPDPEAGDRMADERGRVDDMRGSPMGVGTLEEMIDDDHAIVSSTTGPEYYVSIMSFVDKDLLEPGASVLLHHKSVSIVGVLTDDTDPAVNVMKLDKAPTESYADIGGLEQQIQEVRESVELPLLHPELYEEMGIKPPKGVILYGAPGTGKTLLAKAVANQTSATFLRIVGSELIQKYLGDGPRLVRQLFQVAAENAPSIVFIDEIDAIGTKRYDSTSGGEREIQRTMLELLNQLDGFDDRGDVKVIMATNKIETLDPALIRPGRIDRKILFENPDQITKRKIFNLHTSKMSLNEDVDLDEFISQKDDLSGADIKAICSEAGLMALRERRMRVQMADFRAARERVLRTKQEGEPEGLYL

SEQ ID NO: 6548 - DNA, 2023 bp, Muscodor strobelii; identical to SEQ ID NO: 6545
  misc_feature: SGI EST ID NO. CUFF.17095.0
  misc_feature: Variant of the nucleotide sequence at SEQ ID NO 6546

SEQ ID NO: 6549 - DNA, 1797 bp, Muscodor strobelii
  misc_feature: SGI cDNA ID NO. 561927
  misc_feature: Reduced expression when VOC is produced
  misc_feature: Encodes the peptide sequence at SEQ ID NO 6550
atgagcccacagaccaatgcaccatatgatcaacgcccctacatccagtcgccaatgtcaagcacaaaacataacgaggaacagacatatttcccacctccaccttcagggccacctccttcgggagccaagcaccagtataaggcgtatgtgccaccgcctgctgtaccaccaaaggagagaaatgaggatgaatactatccaccacctcccgccggcgcgccgccgtctcacgcccacagcgatgagaagcctccggcattcgccccgccgccgccgccatctgcacacactgatgagaaaccgcccgagtatcctccaccgccatctgcatatacaccatctggatataccgatgagaagcgatcggatatcccaccacctccctcagcgcataccgacgagaaggcaccggaattcccgccaccgccatctgcataccctaatgacaaaccagcaaattcccccccaccacctagctacaccgaagaattcggtcatatccaagaacacgtatacgaagaccacaaggcccccgtgctccctccacgtcccgtctcatcacaaggagcatcacagtatttcccgcctccgcccatctcaccatctcagggtccaccgcaattcgcacccccaccggcttcgccatctcaagctgcggcgggttcatcctcgtctgctcataaatcgggcggatggtcacagaagctctacgagctgagcttgaaagcatcaggtcctattaataagctcacgaataagttgggcagtgaggctttctggcctagtagtttggacacggagtgtgataaggcggcgaggattttgaagagtttctgtaaagatggtttctacacctccaccacgccgtcacgtcccacaacaccaggcgataaactacctcgctccccgggcccaagcagtacttctaaaaccctcgtcaagatccccacatcggtgatagcgaacgcaaagggtcttgcgatcttcacgacgttccgaaccggtctgcatatttcgggagcaggcggctccggtatagtcgtctcccgccttccagatggatcttggagtcctccagcgggattcttggttcataccctaggcgctgggtttatgattggcttcgatgtatatgactgtgtttgcgtgctgaatactcagcaagctgttgaggcgttcatgaaatccgccagactatctctcggcggtgaacttgcagtagtagcagggccagtgggcgcaggcagaggcttggaaggcgccggaggtttcggtcgatcggcaagtcctacgacccaagagaaagacagactacaagtccaggacaagaactcaagaccgggcagcccaagcgggaagaaggaatgtgatgggaagccggtgtggagttacatgaagtcccgcggcttctacgcgggtgtgcaagctgatggcacggttattgtcaatcgaccaggtgctaatgatgctttctatggcgagaggggtatcacggtggagaggattctgaagggacaggtcaactcccgacctgacccgaattggaatgggaagggaaaagagaagggtgatgagattgtcatgtggccggggggcggacgccagcttatggaggtcctcaaggctgcggaaggacggcgggcagatgataaggtgttgagggatttggggaatgggcctacgcctggggatcttgcgccggaggggggaagggggtgcatgagggtggtgttgcgaagtaattgcgtggcgaagagagggtggtttgtgggttggaggatgatggatgggtga

SEQ ID NO: 6550 - protein, 598 aa, Muscodor strobelii
  misc_feature: SGI Peptide ID NO. 561927
  misc_feature (365)..(526): Pfam Id: PF04366 Pfam Desc: Family of function (DUF500)
  misc_feature (368)..(430): Pfam Id: PF04366 Pfam Desc: Family of function (DUF500)
  misc_feature (461)..(508): Pfam Id: PF04366 Pfam Desc: Family of function (DUF500)
  misc_feature (229)..(566): NCBI GI: 154313579 Blast Desc: BC1G_05639 [Botryotinia fuckeliana B05.10] gi|150849221|gb|EDN24414.1| BC1G_05639 [Botryotinia fuckeliana B05.10]
  misc_feature (229)..(566): NCBI GI: 156061125 Blast Desc: SS1G_02705 [Sclerotinia sclerotiorum 1980] gi|154700109|gb|EDN99847.1| SS1G_02705 [Sclerotinia sclerotiorum 1980]
  misc_feature (204)..(548): NCBI GI: 261357104 Blast Desc: LAS seventeen-binding protein [Verticillium albo-atrum VaMs.102]
  misc_feature (229)..(566): NCBI GI: 256728407 Blast Desc: NECHADRAFT_102170 [Nectria haematococca mpVI 77-13-4]
  misc_feature (205)..(553): NCBI GI: 39974047 Blast Desc: MGG_00830 [Magnaporthe grisea 70-15] gi|145018231|gb|EDK02510.1| MGG_00830 [Magnaporthe grisea 70-15]
  misc_feature (229)..(566): NCBI GI: 46115442 Blast Desc: FG03563.1 [Gibberella zeae PH-1]
  misc_feature (243)..(566): NCBI GI: 156059064 Blast Desc: SS1G_03544 [Sclerotinia sclerotiorum 1980] gi|154701331|gb|EDO01070.1| SS1G_03544 [Sclerotinia sclerotiorum 1980]
  misc_feature (195)..(548): NCBI GI: 85094359 Blast Desc: NCU05881 [Neurospora crassa OR74A] gi|28921328|gb|EAA30636.1| [Neurospora crassa OR74A]
  misc_feature (206)..(566): NCBI GI: 154290779 Blast Desc: BC1G_15588 [Botryotinia fuckeliana B05.10] gi|150847425|gb|EDN22618.1| BC1G_15588 [Botryotinia fuckeliana B05.10]
  misc_feature (229)..(566): NCBI GI: 238494384 Blast Desc: DUF500 domain protein [Aspergillus flavus NRRL3357] gi|220695078|gb|EED51421.1| DUF500 domain protein [Aspergillus flavus NRRL3357]
  misc_feature: Useful for introducing or modulating the production of volatile compounds
MSPQTNAPYDQRPYIQSPMSSTKHNEEQTYFPPPPSGPPPSGAKHQYKAYVPPPAVPPKERNEDEYYPPPPAGAPPSHAHSDEKPPAFAPPPPPSAHTDEKPPEYPPPPSAYTPSGYTDEKRSDIPPPPSAHTDEKAPEFPPPPSAYPNDKPANSPPPPSYTEEFGHIQEHVYEDHKAPVLPPRPVSSQGASQYFPPPPISPSQGPPQFAPPPASPSQAAAGSSSSAHKSGGWSQKLYELSLKASGPINKLTNKLGSEAFWPSSLDTECDKAARILKSFCKDGFYTSTTPSRPTTPGDKLPRSPGPSSTSKTLVKIPTSVIANAKGLAIFTTFRTGLHISGAGGSGIVVSRLPDGSWSPPAGFLVHTLGAGFMIGFDVYDCVCVLNTQQAVEAFMKSARLSLGGELAVVAGPVGAGRGLEGAGGFGRSASPTTQEKDRLQVQDKNSRPGSPSGKKECDGKPVWSYMKSRGFYAGVQADGTVIVNRPGANDAFYGERGITVERILKGQVNSRPDPNWNGKGKEKGDEIVMWPGGGRQLMEVLKAAEGRRADDKVLRDLGNGPTPGDLAPEGGRGCMRVVLRSNCVAKRGWFVGWRMMDG

SEQ ID NO: 6551 - DNA, 2568 bp, Muscodor strobelii
  misc_feature: SGI EST ID NO. CUFF.17649.0
  misc_feature: Variant of the nucleotide sequence at SEQ ID NO 6549
ccagggtcttgacaggatctcactttgacactgttctgtttcagtccgacatccatttctcgcggaatatagctgcctgtcagataaatagtctaatagtccatcacagctcgagactgcgccactttgaagtacgcgtgatggaaataggcgaaaggtcccaagaatcgcgacgactgctctgataaatactacttcacatctttctgacttggcaaatttgtgaatactaagcattcacaaacttccgccatcaagctattacatataactggatctcaataactacctataaattcgccaaattgccttttgaagctcaataagacatagcgcaacttatcgcgtcttgagcttagtcaattacactttccagttcacttcgcaacgaaagcaggaatgagtgctcatccagaccacgccggagtatctggcaataacccagactaccaaaatgagccggcagagctggacggtgcttctccatggcccaaaccattgcagtctcatcctcgacctctacaatctcatcctgtcggcaccatgagcccacagaccaatgcaccatatgatcaacgcccctacatccagtcgccaatgtcaagcacaaaacataacgaggaacagacatatttcccacctccaccttcagggccacctccttcgggagccaagcaccagtataaggcgtatgtgccaccgcctgctgtaccaccaaaggagagaaatgaggatgaatactatccaccacctcccgccggcgcgccgccgtctcacgcccacagcgatgagaagcctccggcattcgccccgccgccgccgccatctgcacacactgatgagaaaccgcccgagtatcctccaccgccatctgcatatacaccatctggatataccgatgagaagcgatcggatatcccaccacctccctcagcgcataccgacgagaaggcaccggaattcccgccaccgccatctgcataccctaatgacaaaccagcaaattcccccccaccacctagctacaccgaagaattcggtcatatccaagaacacgtatacgaagaccacaaggcccccgtgctccctccacgtcccgtctcatcacaaggagcatcacagtatttcccgcctccgcccatctcaccatctcagggtccaccgcaattcgcacccccaccggcttcgccatctcaagctgcggcgggttcatcctcgtctgctcataaatcgggcggatggtcacagaagctctacgagctgagcttgaaagcatcaggtcctattaataagctcacgaataagttgggcagtgaggctttctggcctagtagtttggacacggagtgtgataaggcggcgaggattttgaagagtttctgtaaagatggtttctacacctccaccacgccgtcacgtcccacaacaccaggcgataaactacctcgctccccgggcccaagcagtacttctaaaaccctcgtcaagatccccacatcggtgatagcgaacgcaaagggtcttgcgatcttcacgacgttccgaaccggtctgcatatttcgggagcaggcggctccggtatagtcgtctcccgccttccagatggatcttggagtcctccagcgggattcttggttcataccctaggcgctgggtttatgattggcttcgatgtatatgactgtgtttgcgtgctgaatactcagcaagctgttgaggcgttcatgaaatccgccagactatctctcggcggtgaacttgcagtagtagcagggccagtgggcgcaggcagaggcttggaaggcgccggaggtttcggtcgatcggcaagtcctacgacccaagagaaagacagactacaagtccaggacaagaactcaagaccgggcagcccaagcgggaagaaggaatgtgatgggaagccggtgtggagttacatgaagtcccgcggcttctacgcgggtgtgcaagctgatggcacggttattgtcaatcgaccaggtgctaatgatgctttctatggcgagaggggtatcacggtggagaggattctgaagggacaggtcaactcccgacctgacccgaattggaatgggaagggaaaagagaagggtgatgagattgtcatgtggccggggggcggacgccagcttatggaggtcctcaaggctgcggaaggacggcgggcagatgataaggtgttgagggatttggggaatgggcctacgcctggggatcttgcgccggaggggggaagggggtgcatgagggtggtgttgcgaagtaattgcgtggcgaagagagggtggtttgtgggttggaggatgatggatgggtgaacgtttttgtctatgtgagtaatgaggtgagagggggtttcagtgattttgcttgacgatggtatagactacgagatatgaaacacttatctttccttgggcttatcttcagtcagacgtatccttgcagttgatgattgttgttgttattccgatgatcggttattaatgctaaactacttaatacaatatagtacaatatgcaaaccctacagcatctgcaaaggc

SEQ ID NO: 6552 - DNA, 1167 bp, Muscodor strobelii
  misc_feature: SGI cDNA ID NO. 561928
  misc_feature: Encodes the peptide sequence at SEQ ID NO 6553
atgcccatcctcaattacacgcagagggaatgggatactgtccaaagatggcggagagaacgccggcctgacatagacggcaagattgttttactgtcgagtcacaaagtcacttgcattacagtacactctgcttcagacccaagtcgcataatctacgcgggctactcgttgcagccccattcgctcagagatatctgtagcttagaagatgctgcatatcggagaatcaccaataagagaatggcgacagaatctgatatctccgttccagcttttgagccgggacaacatcaacgagacttcgacatagatttaagccaacagctttatgactacatcgagtattgcgaaaaatcggcggttcgccgagacaagtacttgagacggactttgcccgcatatcgactgtggaaattatgggaagatggaaagattgatgctgcctctgaattaactaaaagtggtaaaaagcaagagcgctctgggttatggacactgggcatcgatcaaattgtaacaccggggcgagagatcgaagctcagcgagcacaacattcgccgcagactgatgagccgacgcagtctcataccgaacaggccgcatcgagagtttctgccgaggcttcagaggacagggattcaggcgcgcaaaagcggaggagaagcagcaatgaggaagatgcgaaggctcctaagaaaatccgtcgcaaaagcagaaaagccaatgagcagaccttggtcaaggtggagagcgaagagcatggcgaggacgcccgtcgggaaaaaccagcccacaagagtggaaaagacaatgaacaggcattggccaaagagatgaggagcgatgaacacggccaggtcaaccccaacggcccttgcggacattgccaggtcaaaggcgaagtctgtcgcgtacacaaaaatccgaggaggtcgaagcgctgcgcaaaatgtgtagagcgacaaggccccgctcgcgagtgtaatttgctgaccccagaggagagagagaaagaccggagcaaaaaaccgagtaagggcaaaatcacaagctccttctcgggcctcttcgtcgctgccttcctcatcccaaccttcatcggggaagtcacacccagttccgccctctgctcagcaggatcaacgaggggctcaacaatctga

SEQ ID NO: 6553 - protein, 388 aa, Muscodor strobelii
  misc_feature: SGI Peptide ID NO. 561928
MPILNYTQREWDTVQRWRRERRPDIDGKIVLLSSHKVTCITVHSASDPSRIIYAGYSLQPHSLRDICSLEDAAYRRITNKRMATESDISVPAFEPGQHQRDFDIDLSQQLYDYIEYCEKSAVRRDKYLRRTLPAYRLWKLWEDGKIDAASELTKSGKKQERSGLWTLGIDQIVTPGREIEAQRAQHSPQTDEPTQSHTEQAASRVSAEASEDRDSGAQKRRRSSNEEDAKAPKKIRRKSRKANEQTLVKVESEEHGEDARREKPAHKSGKDNEQALAKEMRSDEHGQVNPNGPCGHCQVKGEVCRVHKNPRRSKRCAKCVERQGPARECNLLTPEEREKDRSKKPSKGKITSSFSGLFVAAFLIPTFIGEVTPSSALCSAGSTRGSTI

SEQ ID NO: 6554 - DNA, 307 bp, Muscodor strobelii
  misc_feature: SGI EST ID NO. CUFF.16394.0
  misc_feature: Variant of the nucleotide sequence at SEQ ID NO 6552
caagagtggaaaagacaatgaacaggcattggccaaagagatgaggagcgatgaacacggccaggtcaaccccaacggcccttgcggacattgccaggtcaaaggcgaagtctgtcgcgtacacaaaaatccgaggaggtcgaagcgctgcgcaaaatgtgtagagcgacaaggccccgctcgcgagtgtaatttgctgaccccagaggagagagagaaagaccggagcaaaaaaccgagtaagggcaaaatcacaagctccttctcgggcctcttcgtcgctgccttcctcatcccaaccttcatc

SEQ ID NO: 6555 - DNA, 528 bp, Muscodor strobelii
  misc_feature: SGI cDNA ID NO. 561929
  misc_feature: Encodes the peptide sequence at SEQ ID NO 6556
atgcagcctcgatacttcctcatcgcttcaatcgctactgcgattgaacttgaaccgcgcctatcgtatgacccggatcgagaaccaggctcttgtcttacacatgatgaagcacttgctatttccacgagatggttaagcatatttagcacaatcggtgtgtccaagacggagcttcgtacaattgtttcgaccgacatcgcgagctacgactacacattcggtcctccaactttcgggctcgatgccttatacgatgcagtgaatgcgccaggcaagaaaacgaccaccaacgttactcagtttcccttgtggcttttccagtcttgcagtcaaattggtctacgatggcaatatacgggagtgactacgggatataattcaactgtcgccaaaggcactacggttggattcgagggaaacgactttctgcatattgatctgaagacccgtctgataactaacgcgacatcatcgggagactggattctacttgcgcagcagcttggtgacaattgcaatgtttag

SEQ ID NO: 6556 - protein, 175 aa, Muscodor strobelii
  misc_feature: SGI Peptide ID NO. 561929
MQPRYFLIASIATAIELEPRLSYDPDREPGSCLTHDEALAISTRWLSIFSTIGVSKTELRTIVSTDIASYDYTFGPPTFGLDALYDAVNAPGKKTTTNVTQFPLWLFQSCSQIGLRWQYTGVTTGYNSTVAKGTTVGFEGNDFLHIDLKTRLITNATSSGDWILLAQQLGDNCNV

SEQ ID NO: 6557 - DNA, 1149 bp, Muscodor strobelii
  misc_feature: SGI cDNA ID NO. 561930
  misc_feature: Elevated expression when VOC is produced
  misc_feature: Encodes the peptide sequence at SEQ ID NO 6558
atggccaaatttacagacattccgctcgacctattgttagaactgtgtcggtggatggatcgagacgctttggccagattgtcacggacaaacaaggctctcatggcaattgtgacgccgatactttggcacagcattgatttcgttgccctcagagacgagaatgactttgatggagaagacattctctgggagcaagcggttttctttcaggcatgtaatcatcttattgagaccaggccagcgcgatggcttgagctggctcacctagtccgacgactgcgactggtcaagatcccgggcttccgtatacctgcagatgatgacggaagcgaaggcgagctggcctggttctatataatgaatggacggaagaaagatagtgccagaagcatcggagggaacttgtccgtggacatgatcctcgcaatcttgtcgaggccagaaacggttgagagtctggtttgcatgaacctacaggacggatcagctgggcagtcggatctttttttcaaccccatcttcttccacgatatcgcacatcgatttgtgcgcctggagaggctccatctttctatgctcgcagagctgtccggaaacggtaatgatactggccttctctgggattgggaccgagataatgatattgcgtgcttggaagactgggctacacttttggaatgcgttgcgcctactcttgttgaattgacgctcgaaagttgttacctcagctgttatggcgcagacgaaatatcaataaaatacgatgacgacgaagatggtcaagcttcgcgttgggctacaaagggagctgcctcaagtcaaagatttcgcgacgtaatattaccggcgctagctgcacagaattggccaaggcctcggaacctcacattcgctggcattcatgtagggcagaacgctcttggcagggcaggaattttacaaaggattcatccgtatgtaaacatcaagattgttacgggcttgagagtgcagtttgatgatgtcgtttatccgatcgccatttcccctcccaacggtagtacttttcaagatgtccaaacacagagcggatctcatcgcaaagagcacgtcatttccgaggaggctattctcgaaagccttcagcgctatgaaactgtacggtaa

SEQ ID NO: 6558 - protein, 382 aa, Muscodor strobelii
  misc_feature: SGI Peptide ID NO. 561930
  misc_feature: Useful for introducing or modulating the production of volatile compounds
MAKFTDIPLDLLLELCRWMDRDALARLSRTNKALMAIVTPILWHSIDFVALRDENDFDGEDILWEQAVFFQACNHLIETRPARWLELAHLVRRLRLVKIPGFRIPADDDGSEGELAWFYIMNGRKKDSARSIGGNLSVDMILAILSRPETVESLVCMNLQDGSAGQSDLFFNPIFFHDIAHRFVRLERLHLSMLAELSGNGNDTGLLWDWDRDNDIACLEDWATLLECVAPTLVELTLESCYLSCYGADEISIKYDDDEDGQASRWATKGAASSQRFRDVILPALAAQNWPRPRNLTFAGIHVGQNALGRAGILQRIHPYVNIKIVTGLRVQFDDVVYPIAISPPNGSTFQDVQTQSGSHRKEHVISEEAILESLQRYETVR

SEQ ID NO: 6559 - DNA, 1360 bp, Muscodor strobelii
  misc_feature: SGI EST ID NO. CUFF.16403.0
  misc_feature: Variant of the nucleotide sequence at SEQ ID NO 6557
ctgaattcttccctgccaatctgtactctagttttgtaggttaatcgaactgtactcgccaatatggccaaatttacagacattccgctcgacctattgttagaactgtgtcggtggatggatcgagacgctttggccagattgtcacggacaaacaaggctctcatggcaattgtgacgccgatactttggcacagcattgatttcgttgccctcagagacgagaatgactttgatggagaagacattctctgggagcaagcggttttctttcaggcatgtaatcatcttattgagaccaggccagcgcgatggcttgagctggctcacctagtccgacgactgcgactggtcaagatcccgggcttccgtatacctgcagatgatgacggaagcgaaggcgagctggcctggttctatataatgaatggacggaagaaagatagtgccagaagcgttttttcacatttttgcttgtctgaagaatctcgagcatctgcatttctacatcaaacaatcgctggactacggcatcgttgtcgaaccaatcggggttatgcgaggaacattgctgaatctcaagacaattcagatcggagggaacttgtccgtggacatgatcctcgcaatcttgtcgaggccagaaacggttgagagtctggtttgcatgaacctacaggacggatcagctgggcagtcggatctttttttcaaccccatcttcttccacgatatcgcacatcgatttgtgcgcctggagaggctccatctttctatgctcgcagagctgtccggaaacggtaatgatactggccttctctgggattgggaccgagataatgatattgcgtgcttggaagactgggctacacttttggaatgcgttgcgcctactcttgttgaattgacgctcgaaagttgttacctcagctgttatggcgcagacgaaatatcaataaaatacgatgacgacgaagatggtcaagcttcgcgttgggctacaaagggagctgcctcaagtcaaagatttcgcgacgtaatattaccggcgctagctgcacagaattggccaaggcctcggaacctcacattcgctggcattcatgtagggcagaacgctcttggcagggcaggaattttacaaaggattcatccgtatgtaaacatcaagattgttacgggcttgagagtgcagtttgatgatgtcgtttatccgatcgccatttcccctcccaacggtagtacttttcaagatgtccaaacacagagcggatctcatcgcaaagagcacgtcatttccgaggaggctattctcgaaagccttcagcgctatgaaactgtacggtaaacaagaaaagcg

SEQ ID NO: 6560 - DNA, 441 bp, Muscodor strobelii
  misc_feature: SGI cDNA ID NO. 561931
  misc_feature: Elevated expression when VOC is produced
  misc_feature: Encodes the peptide sequence at SEQ ID NO 6561
atggacaaccaggaagctccaccgccggcgtacgcggagaacagtccaattgatgatcgactcgaagagacaccaactgaagatggagcaccacccacgtatgactttacagaaagcgggcggccagttcctaaagagaaaggtcgctccgtcgctgtcgacacatctgaaagcgcccatgtatctgcatcttcatcatctacctctacttccatgccacgctcttcattgtcattcttagctactgccaagaaaaagtacgacgaaaagaagagggcgaaaggaatagacaaaaaggtcgactattaccaaaagatctacggtttcgtgccgaagaatgttatgacagaggctgagtggaagaaagcacgcgatgcagccccgaagacgaagaagaaagggcagttgaaggcaacagtgtacggagcacatgagctatga

SEQ ID NO: 6561 - protein, 146 aa, Muscodor strobelii
  misc_feature: SGI Peptide ID NO. 561931
  misc_feature (89)..(141): NCBI GI: 261357665 Blast Desc: VDBG_06202 [Verticillium albo-atrum VaMs.102]
  misc_feature: Useful for introducing or modulating the production of volatile compounds
MDNQEAPPPAYAENSPIDDRLEETPTEDGAPPTYDFTESGRPVPKEKGRSVAVDTSESAHVSASSSSTSTSMPRSSLSFLATAKKKYDEKKRAKGIDKKVDYYQKIYGFVPKNVMTEAEWKKARDAAPKTKKKGQLKATVYGAHEL

SEQ ID NO: 6562 - DNA, 861 bp, Muscodor strobelii
  misc_feature: SGI EST ID NO. CUFF.16406.0
  misc_feature: Variant of the nucleotide sequence at SEQ ID NO 6560
cgcatcttggcatttctgcgtcgaacataggtatataacgcccatggtccgtcgatcctgcccgtccaacgaaacatggggacaaatctaagcctacgaaacagaattaatcaatgtaattgaaattctaattgggctcgagagtggagagtcgggcgtgtacgaaaacaccagcaagtcaattggcaagggaaaccatggacaaccaggaagctccaccgccggcgtacgcggagaacagtccaattgatgatcgactcgaagagacaccaactgaagatggagcaccacccacgtatgactttacagaaagcgggcggccagttcctaaagagaaaggtcgctccgtcgctgtcgacacatctgaaagcgcccatgtatctgcatcttcatcatctacctctacttccatgccacgctcttcattgtcattcttagctactgccaagaaaaagtacgacgaaaagaagagggcgaaaggaatagacaaaaaggtcgactattaccaaaagatctacggtttcgtgccgaagaatgttatgacagaggctgagtggaagaaagcacgcgatgcagccccgaagacgaagaagaaagggcagttgaaggcaacagtgtacggagcacatgagctatgataaggtgcgatttattagggaatctctagtcgtttcttctcaatcgttcatgggcattagacaagccctctccgcagagcattgaagtatcgaagactcgggcgataatttgtggctctgacgccgctacaagtcagcggtactggtatgacgaatgaatataacaaacaccagacggactgcagtcatcttgtgcatgtagagtctcaacttgaacaccctt

SEQ ID NO: 6563 - DNA, 1458 bp, Muscodor strobelii
  misc_feature: SGI cDNA ID NO. 561932
  misc_feature: Encodes the peptide sequence at SEQ ID NO 6564
atgttccttgccgcggctgttggcatcttagttggggaaggggtaatgtcgtgggacgatcccattcaaaaatatgttcctgacttgaatcctgtggacgatcttcacatcggggaacatgcgacaatccaaaatgctttatctcataccagtggcttggggagaccgcagaccattgcttggggcccgaattcttcttcaatagttgaagaatcatgttttgtacagtttctgaaccatgcttgcgcaaaagacgacgacggaccaaggtttccaaggaaaaagttttgctatagcaaccaggcattcggagttgtagcccttgctcttcagaatgcatccggcagccgtttcgcagatttcctcatagatcgcatattcaagccgttaggaatgcatgatacagttacggattttggcgatctcgaaacacatcccaactatgcacatggctatgcaatgttggaagatgactcatgtattgagatcgacacatccggtttcactaataatacgaattcgcccggtctcgcggcgttgggaattcgtagctccatcagggacatgctcaccttcattacagcacttctcaacagccaaggcgaaaacgcagtgaatatcccagaagtgcgagagctttcagaaatatggaaaccacaggcagacattggcccagacctttcctattgtcttggttggtatcgtggtcatctgcccagcactggattcggtggcatcggcctaaataaagagacgttggtcgacgactacgatcaatatgaaagggaatatgttcttggccgcaacagtccccgtctagagttcatcggtcacagtgggaacattagtgggtttgcctgttcaacatacgtgtttcccgctacgtctagtgcgattgtggctatgacaaatggcatggatcttggtgatgccgccgattttgcggtaaagattctcacacaggctttatttgatcttcaaccaactgtgaagattcttgatctggtcgaaatcgaggcaatgcaccatcaacaatcgtttgaaaatatgctgctgagctggttgaggttcagggatattagcgcccgtgagttagacatcaaggattatgttggcgcttatgagggcttctcaatcaacatcgaagtgtttattcgagcagagacgggccgacttgctctgaatttcaactcgctcgacagatcgacgtgcgatttagagttctataacaacgatggcaaattcgagatatatagcttctttcctctgaaacgagatgagtggctcaaaaaaggcatgagagactgggacaatcatggagtcgggctcttctatttctctagagaaaccgatactcgcaaggtagatgcgttagcgtggttatatgagcctggagaaccgatggcatggtttacgaggagtagtagcgagtgctatgctaggccgatgattggctag

SEQ ID NO: 6564 - protein, 485 aa, Muscodor strobelii
  misc_feature: SGI Peptide ID NO. 561932
  misc_feature (1)..(322): Pfam Id: PF00144 Pfam Desc: Beta-lactamase
  misc_feature (2)..(473): NCBI GI: 46126743 Blast Desc: FG07749.1 [Gibberella zeae PH-1]
  misc_feature (2)..(476): NCBI GI: 238501352 Blast Desc: penicillin-binding protein, [Aspergillus flavus NRRL3357] gi|220692147|gb|EED48494.1| penicillin-binding protein, [Aspergillus flavus NRRL3357]
  misc_feature (2)..(476): NCBI GI: 169768922 Blast Desc: [Aspergillus oryzae RIB40] gi|83766789|dbj|BAE56929.1| protein product [Aspergillus oryzae]
  misc_feature (2)..(468): NCBI GI: 46119880 Blast Desc: FG04809.1 [Gibberella zeae PH-1]
  misc_feature (2)..(460): NCBI GI: 258570013 Blast Desc: [Uncinocarpus reesii 1704] gi|237904080|gb|EEP78481.1| [Uncinocarpus reesii 1704]
  misc_feature (2)..(467): NCBI GI: 256723834 Blast Desc: NECHADRAFT_37243 [Nectria haematococca mpVI 77-13-4]
  misc_feature (4)..(415): NCBI GI: 242821692 Blast Desc: D-aminoacylase, [Talaromyces stipitatus ATCC 10500] gi|218712653|gb|EED12078.1| D-aminoacylase, [Talaromyces stipitatus ATCC 10500]
  misc_feature (2)..(374): NCBI GI: 46102717 Blast Desc: FG00057.1 [Gibberella zeae PH-1]
  misc_feature (2)..(432): NCBI GI: 256722709 Blast Desc: NECHADRAFT_53115 [Nectria haematococca mpVI 77-13-4]
  misc_feature (5)..(412): NCBI GI: 46119888 Blast Desc: FG04813.1 [Gibberella zeae PH-1]
MFLAAAVGILVGEGVMSWDDPIQKYVPDLNPVDDLHIGEHATIQNALSHTSGLGRPQTIAWGPNSSSIVEESCFVQFLNHACAKDDDGPRFPRKKFCYSNQAFGVVALALQNASGSRFADFLIDRIFKPLGMHDTVTDFGDLETHPNYAHGYAMLEDDSCIEIDTSGFTNNTNSPGLAALGIRSSIRDMLTFITALLNSQGENAVNIPEVRELSEIWKPQADIGPDLSYCLGWYRGHLPSTGFGGIGLNKETLVDDYDQYEREYVLGRNSPRLEFIGHSGNISGFACSTYVFPATSSAIVAMTNGMDLGDAADFAVKILTQALFDLQPTVKILDLVEIEAMHHQQSFENMLLSWLRFRDISARELDIKDYVGAYEGFSINIEVFIRAETGRLALNFNSLDRSTCDLEFYNNDGKFEIYSFFPLKRDEWLKKGMRDWDNHGVGLFYFSRETDTRKVDALAWLYEPGEPMAWFTRSSSECYARPMIG

SEQ ID NO: 6565 - DNA, 1086 bp, Muscodor strobelii
  misc_feature: SGI cDNA ID NO. 561933
  misc_feature: Encodes the peptide sequence at SEQ ID NO 6566
atggccgaggtttttggtacgtttgtggccggagcccaggtcttacaatatacgttacaaatttgcgaagccatcaacagcatcgctcaggccgctgggaataaaaagcgataccagaagacaggccaacagctaaaagacatcatactacaaatacgccagagcccccatcttcaaacgcccatgatcctagattgtacggatcatttgatcgatacgatcaacgatacccatcaccagctatgtcgacaaagcaggaaccagttcatggcttctgtatccttcgtaatgaaacagaaaaaatatgacagcatcttcagtgactttgaacgacaaaagaccaccctagcgctctacatatcccagctcaataacgacaaacttggggagatcactcctacggtcaataaaatttggaccaaacttcaaggcaatcttgagcagcaaatgacagatgaggaggttcatcgaaaggaacaggacacaatattatccattcaagcatgccacagacctatagagtgtcttaaggagcagaagcaagagcctatctatcatcaggtccagaattgctataacgaatcatcacgtatatcaggacggaatacacctcaactaagaagagttccattatgtacagcatccttagaaggagatgccaagcaggatagtgcagtctgccaagccgacgactactcggcacgaagggagacgcaccatggggattctatagagctaccgcctcccattttcccaatatcgtctgtcgacgagacgcaggagatgtgtacctccaatgtgctgaagcccagccccgtcacagagttcacagcgaacgtctatgagggcggcggcacgcaaagtataggtgtacaactaggaccaaacgcccgagtgacagacgcagacatgctgaagttgacgtcgagcttcctagcgcatgcgaacatatgtacgggaaatggtacacaagtcataggacagctagtacagtccggggctacgcctgttcagttctctggccgttactataataactttcataagggatccggcgaccagatcattggaatttccttcgaatga

SEQ ID NO: 6566 - protein, 361 aa, Muscodor strobelii
  misc_feature: SGI Peptide ID NO. 561933
MAEVFGTFVAGAQVLQYTLQICEAINSIAQAAGNKKRYQKTGQQLKDIILQIRQSPHLQTPMILDCTDHLIDTINDTHHQLCRQSRNQFMASVSFVMKQKKYDSIFSDFERQKTTLALYISQLNNDKLGEITPTVNKIWTKLQGNLEQQMTDEEVHRKEQDTILSIQACHRPIECLKEQKQEPIYHQVQNCYNESSRISGRNTPQLRRVPLCTASLEGDAKQDSAVCQADDYSARRETHHGDSIELPPPIFPISSVDETQEMCTSNVLKPSPVTEFTANVYEGGGTQSIGVQLGPNARVTDADMLKLTSSFLAHANICTGNGTQVIGQLVQSGATPVQFSGRYYNNFHKGSGDQIIGISFE

SEQ ID NO: 6567 - DNA, 1642 bp, Muscodor strobelii
  misc_feature: SGI EST ID NO. CUFF.16409.0
  misc_feature: Variant of the nucleotide sequence at SEQ ID NO 6565
tttttaaataaaggccttaaatatatcattttgcctctatcacccccacttaacacgacttggtatcagaactagggtagtgtgaaagaatggccgaggtttttggtacgtttgtggccggagcccaggtcttacaatatacgttacaaatttgcgaagccatcaacagcatcgctcaggccgctgggaataaaaagcgataccagaagacaggccaacagctaaaagacatcatactacaaatacgccagagcccccatcttcaaacgcccatgatcctagattgtacggatcatttgatcgatacgatcaacgatacccatcaccagctatgtcgacaaagcaggaaccagttcatggcttctgtatccttcgtaatgaaacagaaaaaatatgacagcatcttcagtgactttgaacgacaaaagaccaccctagcgctctacatatcccagctcaataacgacaaacttggggagatcactcctacggtcaataaaatttggaccaaacttcaaggcaatcttgagcagcaaatgacagatgaggaggttcatcgaaaggaacaggacacaatattatccattcaagcatgccacagacctatagagtgtcttaaggagcagaagcaagagcctatctatcatcaggtccagaattgctataacgaatcatcacgtatatcaggacggaatacacctcaactaagaagagttccattatgtacagcatccttagaaggagatgccaagcaggatagtgcagtctgccaagccgacgactactcggcacgaagggagacgcaccatggggattctatagagctaccgcctcccattttcccaatatcgtctgtcgacgagacgcaggagatgtgtacctccaatgtgctgaagcccagccccgtcacagagttcacagcgaacgtctatgagggcggcggcacgcaaagtataggtgtacaactaggaccaaacgcccgagtgacagacgcagacatgctgaagttgacgtcgagcttcctagcgcatgcgaacatatgtacgggaaatggtacacaagtcataggacagctagtacagtccggggctacgcctgttcagttctctggccgttactataataactttcataagggatccggcgaccagatcattggaatttccttcgaatgacaggaaatgtagaggattaaggtctaccctgattcaggatgtgacactcatcaaacaggactcgccttttcatcttgtggcctccttaagccctagtcttccgtggtggtgtcaattcgggactctcacccttgtagagcccttgcatgccttgcttgtttcgtacggacgaggcccaccagagtgcgcgctggcttgttcctagagcaactcaccgccttggccacgttaagagaaagcctacacttattgacacattgggactgtttcatccatagtaatgggagccatggtcttggtttaatacgacccggggttgactggtctatgttctggaggtagagttagatatagggatcgtaacttgggccataagggttatatatacagacttctctcgtatgtagagaatctattgatttggcaagacattgtctattcacaaagaatcctagaatcagtgaaaa

SEQ ID NO: 6568 - DNA, 1182 bp, Muscodor strobelii
  misc_feature: SGI cDNA ID NO. 561934
  misc_feature: Encodes the peptide sequence at SEQ ID NO 6569
atgccggccactgctgctgccactgcggccgcgtctgcgtccaagggcgctctggacgtggactcgttcaagcggctccttctgacggggtacgccaacatccccgcgccggcccagcccgtgggcagtgccaagaacaacgacggcgccagcagcaccgacgcgagctccatatccaagcactccattctcgacgccgtgcaggagaccccgaggacgtcccacgagatctccgaggcagaggacgccgggcagcggaggactgcagccccctcccgcctgcccccagcccggtctgcctccctgcgccagaagccgccgccgcccagttccagacacggcaagctgatcaagatcgagctgggcgtcgacggcaccccgcgcgaggccatgagtccatccgctacgtctacccaagacctcccttccccggcattcccgccgccacgcaagtccagttcgggaagcagcacatcgctgcactctccaccagctgccaccgatgtcaataaaccactaccagctcccccagtgcgcacatccgtagaggaggagatagagtctcccttcgatcgtgaagcagctggaaaggtaccggaggccttcgcagagctgcaatccagcccgcgaccacccacgcctccccctccgactcgcgatcgctcgggatctcagacaagtacccattcccgaaaacccgctgctcctccaccgcgtcggcatggtcgcaatgatagcaaaatgtcgcccgctggcccggtcggtgccgaggaggagcctgcgaggtcatctatggaatctgctcggtctcgcaccgacagtcttcggcccgcgaccaatctggatagggcctctcatcctcccgcacctcctccgccacgtaggcccacccataatcgacagaatagtattctcacaagtcccagccagcctggtcactctaccgctttgagccctggtgtgaacgaaaaagagcgaagccctcttagcaccagctccaccccattgacctccccgggtgcgcctagtgtagaaaacacaactgggtttgctaatgctgcacttaccaaggatggtcctgttaagctgcaacctccaccccctcccccgcgcgaaagcaaagcacgaggcggccaccgagcattcgaagtgtggagagtagccactctgtcaggagagtga

SEQ ID NO: 6569 - protein, 393 aa, Muscodor strobelii
  misc_feature: SGI Peptide ID NO. 561934
  misc_feature (3)..(200): NCBI GI: 39977321 Blast Desc: MGG_06563 [Magnaporthe grisea 70-15] gi|145015996|gb|EDK00486.1| MGG_06563 [Magnaporthe grisea 70-15]
  misc_feature (12)..(247): NCBI GI: 116203623 Blast Desc: CHGG_09695 [Chaetomium globosum CBS 148.51] gi|88175823|gb|EAQ83291.1| CHGG_09695 [Chaetomium globosum CBS 148.51]
  misc_feature (3)..(377): NCBI GI: 156042554 Blast Desc: SS1G_11075 [Sclerotinia sclerotiorum 1980] gi|154695461|gb|EDN95199.1| SS1G_11075 [Sclerotinia sclerotiorum 1980]
  misc_feature (9)..(200): NCBI GI: 171679489 Blast Desc: protein product [Podospora anserina] gi|170939370|emb|CAP64598.1| protein product [Podospora anserina]
  misc_feature (53)..(204): NCBI GI: 164424690 Blast Desc: NCU06862 [Neurospora crassa OR74A] gi|157070620|gb|EAA28792.2| [Neurospora crassa OR74A]
  misc_feature (10)..(181): NCBI GI: 225555308 Blast Desc: conserved [Ajellomyces capsulatus G186AR]
  misc_feature (7)..(303): NCBI GI: 46138573 Blast Desc: FG10801.1 [Gibberella zeae PH-1]
  misc_feature (7)..(252): NCBI GI: 256729131 Blast Desc: NECHADRAFT_104351 [Nectria haematococca mpVI 77-13-4]
MPATAAATAAASASKGALDVDSFKRLLLTGYANIPAPAQPVGSAKNNDGASSTDASSISKHSILDAVQETPRTSHEISEAEDAGQRRTAAPSRLPPARSASLRQKPPPPSSRHGKLIKIELGVDGTPREAMSPSATSTQDLPSPAFPPPRKSSSGSSTSLHSPPAATDVNKPLPAPPVRTSVEEEIESPFDREAAGKVPEAFAELQSSPRPPTPPPPTRDRSGSQTSTHSRKPAAPPPRRHGRNDSKMSPAGPVGAEEEPARSSMESARSRTDSLRPATNLDRASHPPAPPPPRRPTHNRQNSILTSPSQPGHSTALSPGVNEKERSPLSTSSTPLTSPGAPSVENTTGFANAALTKDGPVKLQPPPPPPRESKARGGHRAFEVWRVATLSGE

SEQ ID NO: 6570 - DNA, 1905 bp, Muscodor strobelii
  misc_feature: SGI EST ID NO. CUFF.16418.0
  misc_feature: Variant of the nucleotide sequence at SEQ ID NO 6568
cgtcgaaccaggccccgatgccggccactgctgctgccactgcggccgcgtctgcgtccaagggcgctctggacgtggactcgttcaagcggctccttctgacggggtacgccaacatccccgcgccggcccagcccgtgggcagtgccaagaacaacgacggcgccagcagcaccgacgcgagctccatatccaagcactccattctcgacgccgtgcaggagaccccgaggacgtcccacgagatctccgaggcagaggacgccgggcagcggaggactgcagccccctcccgcctgcccccagcccggtctgcctccctgcgccagaagccgccgccgcccagttccagacacggcaagctgatcaagatcgagctgggcgtcgacggcaccccgcgcgaggccatgagtccatccgctacgtctacccaagacctcccttccccggcattcccgccgccacgcaagtccagttcgggaagcagcacatcgctgcactctccaccagctgccaccgatgtcaataaaccactaccagctcccccagtgcgcacatccgtagaggaggagatagagtctcccttcgatcgtgaagcagctggaaaggtaccggaggccttcgcagagctgcaatccagcccgcgaccacccacgcctccccctccgactcgcgatcgctcgggatctcagacaagtacccattcccgaaaacccgctgctcctccaccgcgtcggcatggtcgcaatgatagcaaaatgtcgcccgctggcccggtcggtgccgaggaggagcctgcgaggtcatctatggaatctgctcggtctcgcaccgacagtcttcggcccgcgaccaatctggatagggcctctcatcctcccgcacctcctccgccacgtaggcccacccataatcgacagaatagtattctcacaagtcccagccagcctggtcactctaccgctttgagccctggtgtgaacgaaaaagagcgaagccctcttagcaccagctccaccccattgacctccccgggtgcgcctagtgtagaaaacacaactgggtttgctaatgctgcacttaccaaggatggtcctgttaagctgcaacctccaccccctcccccgcgcgaaagcaaagcacgaggcggccaccgagcattcgaagtgtggagagtagccactctgtcaggagagtgagcagagaaaaggacggtggcgtaatgcctccgcctccacctccgccgaggtctagaaaagctgggaagccaatacccgatggggtgcggcagggaagtgaagagaatgtattgcccgctaccgacccaacgtcaccggcgatgggtacggctggcaggcaaggcgaagaaatcctggcagatctagatgccttgaaaagagaggtggatgcgctgatgaagaaatccggtggcagctgatccttttcgaccagagcacgtggcatgagtgaaagtctttgcatccgcttgttcggcgttcttgtacattatattataacttgcattgttggtccgtgtttcgcatcgaaaatgcctggggaaaagagcacggcatgggatgcaagaggaaccgagtattattagagttctctgtgcacggaatggatatagatgggttgcttcgggtaaaaatatatcgtactcgtggtggtcgtcacaacacagcgagtgctctcaacgcggatgtttaaattaatttcatatcgttaaaaaaggttacccatctagaagcttggagagggacacttctacgggcatgcaaatctatacatgctagaagctttactaaaatcggggaaagcagcccaacatattatactgcctctcattagctgttgtgatgctagcgtttagtctatctacaatagatacgaaataaattcgca

SEQ ID NO: 6571 - DNA, 714 bp, Muscodor strobelii
  misc_feature: SGI cDNA ID NO. 561935
  misc_feature: Encodes the peptide sequence at SEQ ID NO 6572
atggaagacctccgtgacgcagagcgcactgtgacatcgttcgctacactgatccagaatcttcgccctaagaaggatcaccaacacaaaggagaagactctgcctcgctatcgagacgccagggttccaacagctcggagaagagcaccaagagctctattagctcgcgatggctacataagaagaaggagtgggacgagacgatcgagggagccttgtggaatgaactagagaaaccgcaaagcgacgtagcacagaagtttcaggtcgatcagacggcgctcaaagaatatattagctcgccggagatgatgcatatcggatgcgaattcgcgcaacattaccatggagagtccgccggagaaaacgcatactgggttgccgaggacctgttcttcgacctgcaagcagtgaaacaaggagacgcggaggcaacgcgttggacaggatcaaaagcacctaagaagacctgggacctagccgatcatcttacacgctttgtgttgctctctgagcagcgccgtctgagctccggccaggaaaaatggatggcttgggagtggaactttgctatcaaggtcggcttctatctcagcgtactccgctgctacacgattcgacatgccaaacagaaacaactggcaaagggcttgggcggctcgccgcgatcatcacgcggtagtatgagtccgaggaaaggcctgtcgccgtga

SEQ ID NO: 6572 - protein, 237 aa, Muscodor strobelii
  misc_feature: SGI Peptide ID NO. 561935
MEDLRDAERTVTSFATLIQNLRPKKDHQHKGEDSASLSRRQGSNSSEKSTKSSISSRWLHKKKEWDETIEGALWNELEKPQSDVAQKFQVDQTALKEYISSPEMMHIGCEFAQHYHGESAGENAYWVAEDLFFDLQAVKQGDAEATRWTGSKAPKKTWDLADHLTRFVLLSEQRRLSSGQEKWMAWEWNFAIKVGFYLSVLRCYTIRHAKQKQLAKGLGGSPRSSRGSMSPRKGLSP

SEQ ID NO: 6573 - DNA, 1851 bp, Muscodor strobelii
  misc_feature: SGI cDNA ID NO. 561936
  misc_feature: Encodes the peptide sequence at SEQ ID NO 6574
atgtcggacgaatcagattctcaggacgacatgggttcggttgtagccgaatatgaagaatacgactccgacagttctgaggctgaagaaggaaatgctcttgttgatgacgaggctgaggaatcagatggttatggccacgatgatgacgatgatcaggatgggtatgacgatgatggagattccgaatttaatcatgatcgccaacctctttacgagttcccacagttcacgcgtttgccaggtgaactacgtgtcatgatatgggaactcgttgacccgtacttaaaatctaaacagagggtcgcggagctccaagttgtcgctggtacaaaagaaaccaccaatttgtggccttgggtgttcctggaacaacagactgaaggggccagaactctactcgctgtcaaccgtgagagtcgcgagttggctttgaagtattatcccgacgtcatcaaactcgcgggccgaatgggtcacgtacgctataacaaatcaaaagatatagtgctcctgcacatcgactccaaggattttccagttctgcatctccgagattggtgtgatggactgaaatatcttgcgattgacttatcgagatggagtgggattggccgccccccaactctccggtcaaagccagatgggagcgatagtatcgaggtagtattttactgctttgacccgactcacgagatgatctcagagggtgaactggattgggtgatgtcgaaatcgacgaatacatttatggtggaaacttttgaggaatcacctggcgttggggaggatatcaagcacacatattactggccggatttgaatggaccagatctttctctagatgaaacaatacctttccactatggaatctggcccaacgtacttgacggaccttgccgaattttgccgatggccatattcgattttgaccaagaccgtgagagatacagtgcactgagacgcagggttgcaaagcaaaatggaggatcatctcctgcatcatcatcagatggtacttccgtgtacgagtcggaagtcgacgactacgagattggcgattttgttgtcaatacgcctccagaacagagcgaaaattcgagtgacgacgaagaagacaacagcagtgatgttgatgatcatctagactcaagccttttgcaagttggaccaggagatgattggggaaacggggttgattttaatggcttttcgccagtacataagaactcgagcgatgacgaagagactggagagctccataaagctgccttctctagcgttgaaccagaatcacctcgggaaaaagtgaccatatcttccgacgatgacgagctacacgtgccgaagcagccagttcgaggcaagcgtcggatcgtatctgatgacgaagatgaagagtcagaggcagaggatagggatgatggagatgccgcgaaaattcattcacgacctacaaaacgcgcaagggttgtgctgtcggatagcgaagaggaagaagaactgcccgtccgtaatcgtagacaaagagctgcgccgattgagctgagtgaagacagcagcggagaggaagatgtcttggaggacgatgatgctgaggaggacgatggggaggaaagcgatgaagacgaagaggaggaggaagagcaaccaaaatcgatgtctctaatggagcgacttcgtcaattccgctcggataatcccatttcaccagaagatgaagattcaaaccagagcggagaagacgaggagggcggcgaatttggacacgaggatgagtttgaggaacaacctggagcccactataatgatgaatttcccgagtcggatgacgatcaggaaagttattaa

SEQ ID NO: 6574 - protein, 616 aa, Muscodor strobelii
  misc_feature: SGI Peptide ID NO. 561936
  misc_feature (66)..(338): NCBI GI: 116205732 Blast Desc: CHGG_02159 [Chaetomium globosum CBS 148.51] gi|88182756|gb|EAQ90224.1| CHGG_02159 [Chaetomium globosum CBS 148.51]
  misc_feature (74)..(370): NCBI GI: 171678253 Blast Desc: protein product [Podospora anserina] gi|170937196|emb|CAP61853.1| protein product [Podospora anserina]
  misc_feature (72)..(173): NCBI GI: 39977303 Blast Desc: MGG_06554 [Magnaporthe grisea 70-15] gi|145016005|gb|EDK00495.1| MGG_06554 [Magnaporthe grisea 70-15]
  misc_feature (74)..(276): NCBI GI: 261360960 Blast Desc: conserved [Verticillium albo-atrum VaMs.102]
MSDESDSQDDMGSVVAEYEEYDSDSSEAEEGNALVDDEAEESDGYGHDDDDDQDGYDDDGDSEFNHDRQPLYEFPQFTRLPGELRVMIWELVDPYLKSKQRVAELQVVAGTKETTNLWPWVFLEQQTEGARTLLAVNRESRELALKYYPDVIKLAGRMGHVRYNKSKDIVLLHIDSKDFPVLHLRDWCDGLKYLAIDLSRWSGIGRPPTLRSKPDGSDSIEVVFYCFDPTHEMISEGELDWVMSKSTNTFMVETFEESPGVGEDIKHTYYWPDLNGPDLSLDETIPFHYGIWPNVLDGPCRILPMAIFDFDQDRERYSALRRRVAKQNGGSSPASSSDGTSVYESEVDDYEIGDFVVNTPPEQSENSSDDEEDNSSDVDDHLDSSLLQVGPGDDWGNGVDFNGFSPVHKNSSDDEETGELHKAAFSSVEPESPREKVTISSDDDELHVPKQPVRGKRRIVSDDEDEESEAEDRDDGDAAKIHSRPTKRARVVLSDSEEEEELPVRNRRQRAAPIELSEDSSGEEDVLEDDDAEEDDGEESDEDEEEEEEQPKSMSLMERLRQFRSDNPISPEDEDSNQSGEDEEGGEFGHEDEFEEQPGAHYNDEFPESDDDQESY

SEQ ID NO: 6575 - DNA, 1708 bp, Muscodor strobelii
  misc_feature: SGI EST ID NO. CUFF.16433.0
  misc_feature: Variant of the nucleotide sequence at SEQ ID NO 6573
gtgagagtcgcgagttggctttgaagtattatcccgacgtcatcaaactcgcgggccgaatgggtcacgtacgctataacaaatcaaaagatatagtgctcctgcacatcgactccaaggattttccagttctgcatctccgagattggtgtgatggactgaaatatcttgcgattgacttatcgagatggagtgggattggccgccccccaactctccggtcaaagccagatgggagcgatagtatcgaggtagtattttactgctttgacccgactcacgagatgatctcagagggtgaactggattgggtgatgtcgaaatcgacgaatacatttatggtggaaacttttgaggaatcacctggcgttggggaggatatcaagcacacatattactggccggatttgaatggaccagatctttctctagatgaaacaatacctttccactatggaatctggcccaacgtacttgacggaccttgccgaattttgccgatggccatattcgattttgaccaagaccgtgagagatacagtgcactgagacgcagggttgcaaagcaaaatggaggatcatctcctgcatcatcatcagatggtacttccgtgtacgagtcggaagtcgacgactacgagattggcgattttgttgtcaatacgcctccagaacagagcgaaaattcgagtgacgacgaagaagacaacagcagtgatgttgatgatcatctagactcaagccttttgcaagttggaccaggagatgattggggaaacggggttgattttaatggcttttcgccagtacataagaactcgagcgatgacgaagagactggagagctccataaagctgccttctctagcgttgaaccagaatcacctcgggaaaaagtgaccatatcttccgacgatgacgagctacacgtgccgaagcagccagttcgaggcaagcgtcggatcgtatctgatgacgaagatgaagagtcagaggcagaggatagggatgatggagatgccgcgaaaattcattcacgacctacaaaacgcgcaagggttgtgctgtcggatagcgaagaggaagaagaactgcccgtccgtaatcgtagacaaagagctgcgccgattgagctgagtgaagacagcagcggagaggaagatgtcttggaggacgatgatgctgaggaggacgatggggaggaaagcgatgaagacgaagaggaggaggaagagcaaccaaaatcgatgtctctaatggagcgacttcgtcaattccgctcggataatcccatttcaccagaagatgaagattcaaaccagagcggagaagacgaggagggcggcgaatttggacacgaggatgagtttgaggaacaacctggagcccactataatgatgaatttcccgagtcggatgacgatcaggaaagttattaacacccagcaaggtgaatatcttacactcatctcacattcatatcctgttaatgttctcggggtaatggaggtagtagataccaaatgatagtcgggcggaggcataccaagatgtagacatatattcttgagatagcacaaaaggaacgaatcgacaaacacgttgtgtcattcaactctcactttgcccactcgcagcacaaggccgattccgtattctgtccattgacgggtcgggtcgttggtctgacgtttagtggcacggcgca

SEQ ID NO: 6576 - DNA, 2055 bp, Muscodor strobelii
  misc_feature: SGI cDNA ID NO. 561937
  misc_feature: Elevated expression when VOC is produced
  misc_feature: Encodes the peptide sequence at SEQ ID NO 6577
atggactccgatgcaacatggagacagcatttgtatcaccaaacaagattgaaggagaagaataatcgcattcgtcttctcaccatccagcctcgccagtacgctgcttcgagaccagaggcgccgccggaagccatccatggcttcttaagactagcgcaactgcaggatcaaccaaaattcacggtcgtctcacatcggtggcgagcaacagatgcaatcgatgagagtaaagctgtcttggtcaatggcacgtcagtcccggtgtcggctggtctcttcgatgtcctttcatgtgtccagaacgagaccgagcccgtggtcatctggatcaactcactatgcattaatcatgcagacgaagatgagaaagaaaaatctatccatgtttcccagcttccacagatatatgtcgccgcggaaaagacactcatctggttggggccctcagccgacaagagtgatgaggcgataaaggtgttgaggcgcctcgccgatgaacagttaaccttgagctcatacgtggcagcttggacgccgcagataggacatcagatcgcacagaagattttacctttaaaggccaacgatgcaaatacgcaagcatcatcaagcacgaataaagaaaaacccgagctggagaccgagttagaatcgcttcgagagccgctgaaagttctcatggaacgcgactactggacgaatctgtggtcgcttatcgagctatcgttgtcttataaggcattcatagcttgtggaaagcagagcctagaaatcgaccagttctacgcagcggcaaaagcgcttgatcacatcataaaccatttaacgtactcgaagtggttgaaggcacacaccaaccctgcaccaaccagcccttcaagtgatgcgctaaatccaggagaaatatcaaatcttgctcgatcacccgcagtgcgaatccttggccggcgcgaggattatcgtcgagatgctactgcctggctacgatctcacgaaaacccgctattcaaaattctgagcaatttcttcgctgccaagtctagcgatcaagagccgctaagaattgacgatgctagagatagggtctatgctcttacgtgtctagccaccgatgttactgatcttggccttgtggtagattatagcaaacgagttgatgaagtgtatgccgaatcttctgcagcattgcttcagaaacatccaagggtattgcaattggcacaaggcaccagtgttgtaaacagcagtagcaacgccataccgtcatgggctattgactgggaaaatgtcagacaacccccgtctgatattggaacttcagaaagaccattcgatgcgtgtgggccggcagatattcgcttctatcgtgcagacaccagtaaaccaggtcaggtttccttaaaaacgtctgttgtagatacagtcgaggctgttggcgcacagtacgagccaagcgaatcagtcaaaacggacggaggactgtctttcctgtcacaaattaaacagttctgggaagactcaaccgcgtcaataagttcgccttatttcgtagaacaagcggcagtttcgttggccaagattgctgtgggtgatatcgaagcgggagatggatccaatacctgtaaaagggcctcttcgtctacaattacagcttacaaaagcacattcgatgcattatctgccgccaaggcaaccacagatgcttcgtccgcggactcagacgggaaccatgacgacaatcaacagtcttcggagcccaagacctccgactctggtgtgagcttgccttacattgccgcaatggctcgcatggcaggacgaagaccgttcaaaacgcagaacggatacgttggtctaggaccgtctgacctcgcggcaggggatacacttgcgattccctacggagctcctgttcctttcgccttcaggccagtcaaggacggcgaggatgctacctcgtaccgccttgtaggcgagacatatgtatttggtatcatggatggcgagtttatggtcgttcatcgcagcgagactgtactacagattatatga

SEQ ID NO: 6577 - protein, 684 aa, Muscodor strobelii
  misc_feature: SGI Peptide ID NO. 561937
  misc_feature (3)..(671): NCBI GI: 6578961 Blast Desc: heterokaryon incompatibility protein [Neurospora crassa]
  misc_feature (12)..(671): NCBI GI: 30315956 Blast Desc: HET6_NEUCR RecName: Full=Heterokaryon incompatibility protein 6, OR allele; Short=Het-6(OR) gi|6578941|gb|AAF18141.1| heterokaryon incompatibility protein [Neurospora crassa] protein
  misc_feature (109)..(683): NCBI GI: 171678824 Blast Desc: protein product [Podospora anserina] gi|170937482|emb|CAP62140.1| protein product [Podospora anserina]
  misc_feature (61)..(670): NCBI GI: 171677506 Blast Desc: protein product [Podospora anserina] gi|170936821|emb|CAP61479.1| protein product [Podospora anserina]
  misc_feature (1)..(683): NCBI GI: 171690382 Blast Desc: protein product [Podospora anserina] gi|170945139|emb|CAP71250.1| protein product [Podospora anserina]
  misc_feature (13)..(669): NCBI GI: 168042194 Blast Desc: [Physcomitrella patens subsp. patens] gi|162675113|gb|EDQ61612.1| [Physcomitrella patens subsp. patens]
  misc_feature (24)..(670): NCBI GI: 256730293 Blast Desc: NECHADRAFT_82646 [Nectria haematococca mpVI 77-13-4]
  misc_feature (50)..(617): NCBI GI: 154290002 Blast Desc: BC1G_15813 [Botryotinia fuckeliana B05.10] gi|150848508|gb|EDN23701.1| BC1G_15813 [Botryotinia fuckeliana B05.10]
  misc_feature (53)..(670): NCBI GI: 46135655 Blast Desc: FG09350.1 [Gibberella zeae PH-1]
  misc_feature (61)..(672): NCBI GI: 39976177 Blast Desc: MGG_05985 [Magnaporthe grisea 70-15] gi|145011741|gb|EDJ96397.1| MGG_05985 [Magnaporthe grisea 70-15]
  misc_feature: Useful for introducing or modulating the production of volatile compounds
MDSDATWRQHLYHQTRLKEKNNRIRLLTIQPRQYAASRPEAPPEAIHGFLRLAQLQDQPKFTVVSHRWRATDAIDESKAVLVNGTSVPVSAGLFDVLSCVQNETEPVVIWINSLCINHADEDEKEKSIHVSQLPQIYVAAEKTLIWLGPSADKSDEAIKVLRRLADEQLTLSSYVAAWTPQIGHQIAQKILPLKANDANTQASSSTNKEKPELETELESLREPLKVLMERDYWTNLWSLIELSLSYKAFIACGKQSLEIDQFYAAAKALDHIINHLTYSKWLKAHTNPAPTSPSSDALNPGEISNLARSPAVRILGRREDYRRDATAWLRSHENPLFKILSNFFAAKSSDQEPLRIDDARDRVYALTCLATDVTDLGLVVDYSKRVDEVYAESSAALLQKHPRVLQLAQGTSVVNSSSNAIPSWAIDWENVRQPPSDIGTSERPFDACGPADIRFYRADTSKPGQVSLKTSVVDTVEAVGAQYEPSESVKTDGGLSFLSQIKQFWEDSTASISSPYFVEQAAVSLAKIAVGDIEAGDGSNTCKRASSSTITAYKSTFDALSAAKATTDASSADSDGNHDDNQQSSEPKTSDSGVSLPYIAAMARMAGRRPFKTQNGYVGLGPSDLAAGDTLAIPYGAPVPFAFRPVKDGEDATSYRLVGETYVFGIMDGEFMVVHRSETVLQII

SEQ ID NO: 6578 - DNA, 4650 bp, Muscodor strobelii
  misc_feature: SGI EST ID NO. CUFF.16436.0
  misc_feature: Variant of the nucleotide sequence at SEQ ID NO 6576
tgggacccgaaggagaggacgaggcaatgcaaaagccaacgttgtgattatggatgggatcgtcaagacttcttagtagcacaggctgtgggctgtgactccttcatttttaggcaagcatccggaaattttgccttacgtcttataaagcatctatccttcctttagctcacagaacgtatttcgacgaggttgaccccacaatctgaatactacacgaacaccgggatgacttaggcggtcaactttgaacaacccaagctcatcgatcagctgaaaaggcacagttttcttaatcgtaaagacatcactatggactccgatgcaacatggagacagcatttgtatcaccaaacaagattgaaggagaagaataatcgcattcgtcttctcaccatccagcctcgccagtacgctgcttcgagaccagaggcgccgccggaagccatccatggcttcttaagactagcgcaactgcaggatcaaccaaaattcacggtcgtctcacatcggtggcgagcaacagatgcaatcgatgagagtaaagctgtcttggtcaatggcacgtcagtcccggtgtcggctggtctcttcgatgtcctttcatgtgtccagaacgagaccgagcccgtggtcatctggatcaactcactatgcattaatcatgcagacgaagatgagaaagaaaaatctatccatgtttcccagcttccacagatatatgtcgccgcggaaaagacactcatctggttggggccctcagccgacaagagtgatgaggcgataaaggtgttgaggcgcctcgccgatgaacagttaaccttgagctcatacgtggcagcttggacgccgcagataggacatcagatcgcacagaagattttacctttaaaggccaacgatgcaaatacgcaagcatcatcaagcacgaataaagaaaaacccgagctggagaccgagttagaatcgcttcgagagccgctgaaagttctcatggaacgcgactactggacgaatctgtggtcgcttatcgagctatcgttgtcttataaggcattcatagcttgtggaaagcagagcctagaaatcgaccagttctacgcagcggcaaaagcgcttgatcacatcataaaccatttaacgtactcgaagtggttgaaggcacacaccaaccctgcaccaaccagcccttcaagtgatgcgctaaatccaggagaaatatcaaatcttgctcgatcacccgcagtgcgaatccttggccggcgcgaggattatcgtcgagatgctactgcctggctacgatctcacgaaaacccgctattcaaaattctgagcaatttcttcgctgccaagtctagcgatcaagagccgctaagaattgacgatgctagagatagggtctatgctcttacgtgtctagccaccgatgttactgatcttggccttgtggtagattatagcaaacgagttgatgaagtgtatgccgaatcttctgcagcattgcttcagaaacatccaagggtattgcaattggcacaaggcaccagtgttgtaaacagcagtagcaacgccataccgtcatgggctattgactgggaaaatgtcagacaacccccgtctgatattggaacttcagaaagaccattcgatgcgtgtgggccggcagatattcgcttctatcgtgcagacaccagtaaaccaggtcaggtttccttaaaaacgtctgttgtagatacagtcgaggctgttggcgcacagtacgagccaagcgaatcagtcaaaacggacggaggactgtctttcctgtcacaaattaaacagttctgggaagactcaaccgcgtcaataagttcgccttatttcgtagaacaagcggcagtttcgttggccaagattgctgtgggtgatatcgaagcgggagatggatccaatacctgtaaaagggcctcttcgtctacaattacagcttacaaaagcacattcgatgcattatctgccgccaaggcaaccacagatgcttcgtccgcggactcagacgggaaccatgacgacaatcaacagtcttcggagcccaagacctccgactctggtgtgagcttgccttacattgccgcaatggctcgcatggcaggacgaagaccgttcaaaacgcagaacggatacgttggtctaggaccgtctgacctcgcggcaggggatacacttgcgattccctacggagctcctgttcctttcgccttcaggccagtcaaggacggcgaggatgctacctcgtaccgccttgtaggcgagacatatgtatttggtatcatggatggcgagtttatggtcgttcatcgcagcgagactgtactacagattatatgagtggcatgtctcgataaggcatgtttctctttctgggacctagaattagagttaagcctgagtatggacttccttagatcgaagacctaaatacccagcggacggtcttccttctctgttctgagtttctatcctttattgtcaccgttgtggcgcggagagaagggtattacttgaagatcacgacctagatcacactcaaattaactttgaacgaagtagccctatacattgtaataatgactatagaatattgtctaaagctcgaaaccgattctcaagtgtatcaagcactgtatgttatattaagtctactcaacgggctcatcgtgtttggcagcatgcatcgtgtgacccttcgcctgccatcatcacttaattgaataataagacttagatttctttacttgcgtatatagcaaccagcacccagccctgtccatgctagccaggagtggcgtcggaatccatcgcgtcctacttggcgaggcgcagcccggcaaccaacactcggcagctccactggtcagatattcatcagcgaatcgtcgtgggtaccatagccatgggattaacacgactcctctcccttgactcgtcgacatttcttttatcgcatttcatagacttgtaaataattcgaacgtctgcttggtctcgctgatgcttcatcatgtcggccaaagacacggagcttggtcgccgaccaggaccaccgtcagtgatcaatgcaggattattcaaaactggtactgcttcaatggcagaagcatatcggatcttagggctccgaccacatcacggattagatctcatggaccttccagaacactggacgattctcgaacgtgctgccgacgccacgtggccagcagcagacccaaaaccgccaccgttctcccgcgctgattgggataagatctttggcacgtacgacgcgataaccgacgtcggaagtgcgttcgcagtggaactatcgcgcgcctatccagaggccaaagtcgtggtcgtgcgccgcgatcctaagaaatgggaaaggagttttgagagccagatcactgcgccggtttggggaccattggcttatttcctgctctgggttgtcctacctatacttgggaatcgggggcttgctgctatgcgtaagattcttctgggattatgggatgtgcgcaatcaggccggattgagagaaaaggctgttgctggctacgaaaaatactacgagcgggttcgggcagaggttcctgagaatcgcaggctggagtatcaactgggcagtggatgggaaccgctttgttcgttcttggaattgccggtgccagatgttccatttccttgggttaatgaggctgctgagcatacaaggaaacagaaagaacacggtgaccagataatgagaatggcttgggtcaaaattcggccttggcttggtgccgctgcggttgctgcaattgctatcctgggatggaaatacgtcggataagaattatgggatttgaaagtgactaccgcagcagggagaaatgctcgataaaattacgtcaggaaatttcttcttctctcgtcattcgggcgacaagaggacaaaaatcaaaagcctttttcgaccaagacttgtaacactaaacacagcggttccgaatagtcaattatgtcttcccaacctggcgaaaacggataagtcggcacaacctcaaacaaattgagagacaatagcgggaaaaattgaagaacgacgtaacattctaactccccgagcttcatccacacaaacatatcttcgagattaaaatagtctacagacatatgcgggcgatcttgggtgttgcagatcctagcctttctgtcgtttttggacctgtcgccgagtgtggggtgtctcagaccaccatgttcagcaccccagggccgtgtgaaacaagcttgagactatgtagaatgtccacgcggcgcttcaagaacgtttctgtcgatggagtgtacacgtacgcacaggcgcacaacacatgttattctacgccattccatgtttctgcgtattgtttgagcaaaccgagcaccccataggtgacttaggtatgaactaggtgggtggatcgtacgtcaaagtctagcgttcgctatttggagattattgaaactcgtgctgtctcagtaatcattaactagatatagagtaaatagacgatatggtgctgccaaaggctgcgaaagaaatacttcaatactcatagctaatttctacaaaagcattgtctacagtaatcgtatcaaattcgc

SEQ ID NO: 6579 - DNA, 813 bp, Muscodor strobelii
  misc_feature: SGI cDNA ID NO. 561938
  misc_feature: Elevated expression when VOC is produced
  misc_feature: Encodes the peptide sequence at SEQ ID NO 6580
atgtcggccaaagacacggagcttggtcgccgaccaggaccaccgtcagtgatcaatgcaggattattcaaaactggtactgcttcaatggcagaagcatatcggatcttagggctccgaccacatcacggattagatctcatggaccttccagaacactggacgattctcgaacgtgctgccgacgccacgtggccagcagcagacccaaaaccgccaccgttctcccgcgctgattgggataagatctttggcacgtacgacgcgataaccgacgtcggaagtgcgttcgcagtggaactatcgcgcgcctatccagaggccaaagtcgtggtcgtgcgccgcgatcctaagaaatgggaaaggagttttgagagccagatcactgcgccggtttggggaccattggcttatttcctgctctgggttgtcctacctatacttgggaatcgggggcttgctgctatgcgtaagattcttctgggattatgggatgtgcgcaatcaggccggattgagagaaaaggctgttgctggctacgaaaaatactacgagcgggttcgggcagaggttcctgagaatcgcaggctggagtatcaactgggcagtggatgggaaccgctttgttcgttcttggaattgccggtgccagatgttccatttccttgggttaatgaggctgctgagcatacaaggaaacagaaagaacacggtgaccagataatgagaatggcttgggtcaaaattcggccttggcttggtgccgctgcggttgctgcaattgctatcctgggatggaaatacgtcggataa

SEQ ID NO: 6580 - protein, 270 aa, Muscodor strobelii
  misc_feature: SGI Peptide ID NO. 561938
  misc_feature (10)..(234): NCBI GI: 154304931 Blast Desc: BC1G_09051 [Botryotinia fuckeliana B05.10] gi|150853913|gb|EDN29105.1| BC1G_09051 [Botryotinia fuckeliana B05.10]
  misc_feature (17)..(263): NCBI GI: 46120546 Blast Desc: FG04920.1 [Gibberella zeae PH-1]
  misc_feature (17)..(243): NCBI GI: 189196286 Blast Desc: conserved [Pyrenophora tritici-repentis Pt-1C-BFP] gi|187980360|gb|EDU46986.1| conserved [Pyrenophora tritici-repentis Pt-1C-BFP]
  misc_feature (17)..(238): NCBI GI: 238837557 Blast Desc: conserved [Microsporum canis CBS 113480]
  misc_feature (14)..(236): NCBI GI: 116198675 Blast Desc: CHGG_07493 [Chaetomium globosum CBS 148.51] gi|88178772|gb|EAQ86240.1| CHGG_07493 [Chaetomium globosum CBS 148.51]
  misc_feature (14)..(264): NCBI GI: 145607804 Blast Desc: MGG_10067 [Magnaporthe grisea 70-15] gi|145015300|gb|EDJ99836.1| MGG_10067 [Magnaporthe grisea 70-15]
  misc_feature (42)..(268): NCBI GI: 169605543 Blast Desc: SNOG_05797 [Phaeosphaeria nodorum SN15] gi|160706786|gb|EAT86861.2| SNOG_05797 [Phaeosphaeria nodorum SN15]
  misc_feature (17)..(267): NCBI GI: 46116006 Blast Desc: FG03845.1 [Gibberella zeae PH-1]
  misc_feature (6)..(253): NCBI GI: 256728993 Blast Desc: NECHADRAFT_93184 [Nectria haematococca mpVI 77-13-4]
  misc_feature (76)..(266): NCBI GI: 116179296 Blast Desc: CHGG_00276 [Chaetomium globosum CBS 148.51] gi|88184573|gb|EAQ92041.1| CHGG_00276 [Chaetomium globosum CBS 148.51]
  misc_feature: Useful for introducing or modulating the production of volatile compounds
MSAKDTELGRRPGPPSVINAGLFKTGTASMAEAYRILGLRPHHGLDLMDLPEHWTILERAADATWPAADPKPPPFSRADWDKIFGTYDAITDVGSAFAVELSRAYPEAKVVVVRRDPKKWERSFESQITAPVWGPLAYFLLWVVLPILGNRGLAAMRKILLGLWDVRNQAGLREKAVAGYEKYYERVRAEVPENRRLEYQLGSGWEPLCSFLELPVPDVPFPWVNEAAEHTRKQKEHGDQIMRMAWVKIRPWLGAAAVAAIAILGWKYVG

SEQ ID NO: 6581 - DNA, 4650 bp, Muscodor strobelii; identical to SEQ ID NO: 6578
  misc_feature: SGI EST ID NO. CUFF.16436.0
  misc_feature: Variant of the nucleotide sequence at SEQ ID NO 6579

SEQ ID NO: 6582 - DNA, 1581 bp, Muscodor strobelii
  misc_feature: SGI cDNA ID NO. 561939
  misc_feature: Encodes the peptide sequence at SEQ ID NO 6583
atgggtgtcctattgcgcaaagagatctctaaccgcaaatctagtaaaggagactggagaagtgagctcgtcaccatttatttaagcttctcctccaatattagagcctcttggtatttgaccgtcttccttgtactgatggaattctcgaccaaatcagaactgcagacgcatgctgccctggacgacccggaatgcgtcgagtttctagacgtagcaccagaacatatcccaaccatattaaagcagattgaccgtaactttgttgagcatgatgaaccggacggaatactctgtgtaagagaagcgacttgctcactcgaggacttggctagcgatcccaacgcaaagttcgtttctttggcaacaaccagttcgaaggattttggagccgacatagaggtaactctggatgaattttgcaacccagcattagcctcggacgttctagagattcgtaatcaggaccaagttctgacacgatatgcgagaagaaaactggtgaccaaaactggcgttgaggaggcacatctccctctgataaccgttccccagctttggtgctggaaaattgggtcaaaggtgattttcagcttgccaaagagcgctaatgaggatctgaaaccactccgccgcgatgtgcttcgttcggaaatgcacgacgagtcttcgctcaacgatgcagatcaacatatcgcaagattattgtccaggtttgtggacagtctagatcgtccgaaaatgttaggtctatcggaacccattttcagcgttttctcgaaatccatcgcaacagtagcccaagacgtcaataactacacgagcacagttgtgtttgacgatataagcatttcaaaagagcggcagtatcttcacgaaatcaacgatatccgcgaagagattgcgatgatgcaagctgtcttatttcagcaagaggaaatttggaaggagtttacttacaatacctggccacaacattggcccgatggcaaagacaagcgcttgaagcctcctgataccgacaacctcgaattgaggggaatctggcgagaaattgaaaagccacaagatcaatttccaaaattcagaagacgatttgagaagctcgacgaagacgctgaacgcgttgagaggaatattctcgtgcagttggatttgaaacaaaaacatgcgacaatgaccgagacacatacagcgacggttatgagtgctgccatcgtagggttcaccatcatcacaatcatcttcgcgccactatcatttttgacgagttttttcgcactcccaattgaccattttaaactaacagcggatggcaaatacactagtaactatattgggaaatggatagccaccggagagatcgcttctttggtcgtcacagcgattgctatctggatagcttgcgattactttttgaatcttcagatcaccggctacctatggacatcgctatcaaaatattcccttcgatcagtcagacaagggctatcgtctcttcgtcataacaacgagaatacgcacagagaagaggaaaacacaaacatcagcacgatggcgttcacgaggccgaaccactaa

SEQ ID NO: 6583 - protein, 526 aa, Muscodor strobelii
  misc_feature: SGI Peptide ID NO. 561939
  misc_feature (86)..(472): NCBI GI: 169613761 Blast Desc: SNOG_10013 [Phaeosphaeria nodorum SN15] gi|111061228|gb|EAT82348.1| SNOG_10013 [Phaeosphaeria nodorum SN15]
  misc_feature (136)..(481): NCBI GI: 169617431 Blast Desc: SNOG_11894 [Phaeosphaeria nodorum SN15] gi|111059818|gb|EAT80938.1| SNOG_11894 [Phaeosphaeria nodorum SN15]
  misc_feature (150)..(430): NCBI GI: 169615727 Blast Desc: SNOG_11027 [Phaeosphaeria nodorum SN15] gi|160703031|gb|EAT81526.2| SNOG_11027 [Phaeosphaeria nodorum SN15]
  misc_feature (174)..(467): NCBI GI: 256722578 Blast Desc: NECHADRAFT_85371 [Nectria haematococca mpVI 77-13-4]
  misc_feature (133)..(450): NCBI GI: 212531615 Blast Desc: ankyrin repeat protein [Penicillium marneffei ATCC 18224] gi|210071328|gb|EEA25417.1| ankyrin repeat protein [Penicillium marneffei ATCC 18224]
  misc_feature (181)..(465): NCBI GI: 46103918 Blast Desc: FG00110.1 [Gibberella zeae PH-1]
  misc_feature (133)..(449): NCBI GI: 119495022 Blast Desc: ankyrin repeat protein [Neosartorya fischeri NRRL 181] gi|119412469|gb|EAW22410.1| ankyrin repeat protein [Neosartorya fischeri NRRL 181]
  misc_feature (133)..(449): NCBI GI: 70996130 Blast Desc: ankyrin repeat protein [Aspergillus fumigatus Af293] gi|66850455|gb|EAL90782.1| ankyrin repeat protein [Aspergillus fumigatus Af293] gi|159131573|gb|EDP56686.1| ankyrin repeat
  misc_feature (133)..(449): NCBI GI: 115492215 Blast Desc: conserved [Aspergillus terreus NIH2624] gi|114197595|gb|EAU39295.1| conserved [Aspergillus terreus NIH2624]
  misc_feature (224)..(468): NCBI GI: 256729579 Blast Desc: NECHADRAFT_84306 [Nectria haematococca mpVI 77-13-4]
MGVLLRKEISNRKSSKGDWRSELVTIYLSFSSNIRASWYLTVFLVLMEFSTKSELQTHAALDDPECVEFLDVAPEHIPTILKQIDRNFVEHDEPDGILCVREATCSLEDLASDPNAKFVSLATTSSKDFGADIEVTLDEFCNPALASDVLEIRNQDQVLTRYARRKLVTKTGVEEAHLPLITVPQLWCWKIGSKVIFSLPKSANEDLKPLRRDVLRSEMHDESSLNDADQHIARLLSRFVDSLDRPKMLGLSEPIFSVFSKSIATVAQDVNNYTSTVVFDDISISKERQYLHEINDIREEIAMMQAVLFQQEEIWKEFTYNTWPQHWPDGKDKRLKPPDTDNLELRGIWREIEKPQDQFPKFRRRFEKLDEDAERVERNILVQLDLKQKHATMTETHTATVMSAAIVGFTIITIIFAPLSFLTSFFALPIDHFKLTADGKYTSNYIGKWIATGEIASLVVTAIAIWIACDYFLNLQITGYLWTSLSKYSLRSVRQGLSSLRHNNENTHREEENTNISTMAFTRPNH

SEQ ID NO: 6584 - DNA, 2159 bp, Muscodor strobelii
  misc_feature: SGI EST ID NO. CUFF.16443.0
  misc_feature: Variant of the nucleotide sequence at SEQ ID NO 6582
ggacgacccggaatgcgtcgagtttctagacgtagcaccagaacatatcccaaccatattaaagcagattgaccgtaactttgttgagcatgatgaaccggacggaatactctgtgtaagagaagcgacttgctcactcgaggacttggctagcgatcccaacgcaaagttcgtttctttggcaatgccatatctatattcacaaaatttggattttctaataagaaggagacaaacccgtttcaaaagtctttcgggccttcaattctgtcagacaaccagttcgaaggattttggagccgacatagaggtaactctggatgaattttgcaacccagcattagcctcggacgttctagagattcgtaatcaggaccaagttctgacacgatatgcgagaagaaaactggtgaccaaaactggcgttgaggaggcacatctccctctgataaccgttccccagctttggtgctggaaaattgggtcaaaggtgattttcagcttgccaaagagcgctaatgaggatctgaaaccactccgccgcgatgtgcttcgttcggaaatgcacgacgagtcttcgctcaacgatgcagatcaacatatcgcaagattattgtccaggtttgtggacagtctagatcgtccgaaaatgttaggtctatcggaacccattttcagcgttttctcgaaatccatcgcaacagtagcccaagacgtcaataactacacgagcacagttgtgtttgacgatataagcatttcaaaagagcggcagtatcttcacgaaatcaacgatatccgcgaagagattgcgatgatgcaagctgtcttatttcagcaagaggaaatttggaaggagtttacttacaatacctggccacaacattggcccgatggcaaagacaagcgcttgaagcctcctgataccgacaacctcgaattgaggggaatctggcgagaaattgaaaagccacaagatcaatttccaaaattcagaagacgatttgagaagctcgacgaagacgctgaacgcgttgagaggaatattctcgtgcagttggatttgaaacaaaaacatgcgacaatgaccgagacacatacagcgacggttatgagtgctgccatcgtagggttcaccatcatcacaatcatcttcgcgccactatcatttttgacgagttttttcgcactcccaattgaccattttaaactaacagcggatggcaaatacactagtaactatattgggaaatggatagccaccggagagatcgcttctttggtcgtcacagcgattgctatctggatagcttgcgattactttttgaatcttcagatcaccggctacctatggacatcgctatcaaaatattcccttcgatcagtcagacaagggctatcgtctcttcgtcataacaacgagaatacgcacagtgacgcagatatcaaacacacttcgaccttcagtataattaatgcactagatgccaggagaagaggaaaacacaaacatcagcacgatggcgttcacgaggccgaaccactaagagaagtcgtttcccgtccataaacaataaccgtttggcagagctgccagaaggagcccctgtggggagaatgatttacatgtggattatttgaatctaattgtggctgtcactctttaaaggcgtgtctgtgttgcaaatgacgtatttcaagtctttttcatatataaatttcacgctcatgacactggtggtcacctattcaaatcatctaaagcgaacatgttcggatgcaatcctgatctcaagttgatacttatgacgctaccgtatattcgagcctcaaggaagaccaaaaaaagggcaacccagcatgctcaacctacgtggctgatttttggcattccgttgaacttttgggaagaaaagactcaaaaagttgcatcagccgtgaatcgaacacggggcccatcgatggcaacgatggattttaccactaaaccactgatgctgtattggagttacccggtaattatagtaggctgctacttaataacacatatattactcaatactgcagtggtctgactcgtggctccactactcctgtcaaccatagtagcagtcaagtatctctggacatttcagtgggaaattgatagagaacacatg

SEQ ID NO: 6585 - DNA, 2688 bp, Muscodor strobelii
  misc_feature: SGI cDNA ID NO. 561940
  misc_feature: Encodes the peptide sequence at SEQ ID NO 6586
atgccgggtgaagagattctaaggcggatgagcgtgtcaacgagtggtcgtagagagtcaatatcagatatcaagtcctctgcgccagaattagtgctcacaggcaacataatctcggtcacctttacaactccaaacaccttcaaatatcacaaaattggagagtgggaactgggaaatagacatggccaatcagcacttttagacgcctttgcatacctctcctctgaagaatcgccatggagtcattcagttgtcgcatggacaggcgaaattgagtgtcccattgagtctatctcatcaccgagcacgcaacagaacaagacggccatccctggtttaaatcagctctctgcgcctgttccattgtgtacggatgttcatctgcctcctactccccctgatgtagatgggctatgggtctcgcgagacgatcaacggaaactcgagcaacagcttgctacacaaagccgcatcaagacaatccccgtctggctggctgatgataatgaagtgaaccatgaaggtatcaccttgaacgatcaaagccgatggagacgttatgctgaacatgaactatatccattatttcactataaacagcatgaacccactgatggtcgatcagaacgtattgaatgggcaaattactacagagccaatctccaattcgcgaacaagattatcgaggtctacaaaccaggcgatattattattattcatgattactacttattgttgcttcctagcatgctgcgtcagcgaatgccagacatgtatatctcgttcttcctacactgtccgttccccagtagcgagttccttagatgcttaccgcggaggaaggaggttttggaaggtctgcttggatcgaacctcattggattccagtcatatggctactcgcgccacttcacgagctgctgtacacgtattctcgatatctcttctgatacaaccggtctagatgctttcgggactcgagtcgaagtcggagtctaccccatcggcattgatgcaaagaaggtagagaaactagcctggtcaaaagatgtttcgaggaaatatgaagctctcaaagaaatctaccacggaaagcgaattattgtaggccgagatcgtttggacagcgtccgcggtgtggcccagaagctcatggcttttgaaagatttcttgaattatatcccgaatggaggaaccgagtggtcttgatccaggtcacttcgcccacaagtattcaagaagaaagagggaaatccgaaaacaagatagccagcagagtcaacgaacttgtcatgaaaatcaatggtacttttggcagcttgggtttctcaccagtacaacactacccacaatatctagctccagatgagtattttgcgcttctcagagctgcagagatcgggctgatcacatcggtaagagatggtatgaacactaccagtcttgaatacgttgtctgtcagcgcgatactcatggccctctgatcctgtcggagttcagtggaacggcaggaagtcttcgagatgccattcacatcaacccttgggatctcagcgacgtagctaagcaaatcaacaatgccttgactatgtctgctgagaagcgtgagtcgatgcagcttagtctttatgaccacgtgacgacacaaactgtccaaagctggattaccaagtttctacggaagctcgttggaacgctagcatcaaaccagaatgagagagctacgccattgttagatcgcattgcaatgttgcaacaatatcgagcagcaaacaaacgcctattcctgttcgattatgatggcacgctaacgcctatcgtgcgagatccccaagccgcaatcccatccgaccgagtgattacagccttgaagacattggcaggagaccaacgcaatgcggtatggatcatttctggcagagaccaggatttcctgcagcaacatctgggtcacatatcagaactgggtttcagcgctgagcacggaagcttcatccgacatcctggcactacgacttgggagaacctcgcagagacctttgatatgtcgtggcagacagaagtgatggatatcttccagaaatacacagatcgcgtgcctggttcttttattgagcgcaaacgctgcgccctcacgtggcattatcgccaggctgatcccgaccagggattgcacgcttctcgcttagctttcgatgaactgaagtcaactgccactaaaaaatgggatgtagaagtgatgaaaggcaaggcaaatctggaagttcgacccaccttcatcaacaaaggcgaaattgtcaagcgccttgtgcgcgagtacaattcagagtacgctcgcagtacacagaatgcaagtgccaccgattctgaaaccgagaagaatgatgacatttcgggagtggagtttgttttgtgctgcggcgacgacttcaccgacgaagacatgttccgtgcactgaatgaattaaccaacgcggagcttatgagcgagcacgtctttacagtttccgttggggctagcaagaaagtgacacttgccaaatggcacgtcttggaaccagctgatatcatcgggagcacagctctcatggcgggagttgggtcagatgggaacactaacgaaatcctaagccatgtcaacttggctgccgtggctggcttagagggccgtgtgccgacatga

SEQ ID NO: 6586 - protein, 895 aa, Muscodor strobelii
  misc_feature: SGI Peptide ID NO. 561940
  misc_feature (29)..(566): Pfam Id: PF00982 Pfam Desc: Glycosyltransferase family 20
  misc_feature (598)..(856): Pfam Id: PF02358 Pfam Desc: Trehalose-phosphatase
  misc_feature (185)..(566): Pfam Id: PF00982 Pfam Desc: Glycosyltransferase family 20
  misc_feature (3)..(894): NCBI GI: 171680604 Blast Desc: protein product [Podospora anserina] gi|170939929|emb|CAP65155.1| protein product [Podospora anserina]
  misc_feature (17)..(894): NCBI GI: 256721859 Blast Desc: glycosyltransferase family 20 [Nectria haematococca mpVI 77-13-4]
  misc_feature (3)..(894): NCBI GI: 222090395 Blast Desc: trehalose-6-phosphate synthase/trehalose phosphatase [Chaetomium chiversii]
  misc_feature (3)..(894): NCBI GI: 85079428 Blast Desc: NCU05041 [Neurospora crassa OR74A] gi|28917409|gb|EAA27113.1| NCU05041 [Neurospora crassa OR74A]
  misc_feature (17)..(894): NCBI GI: 46127097 Blast Desc: FG07926.1 [Gibberella zeae PH-1]
  misc_feature (2)..(894): NCBI GI: 145616272 Blast Desc: MGG_03441 [Magnaporthe grisea 70-15] gi|145010013|gb|EDJ94669.1| MGG_03441 [Magnaporthe grisea 70-15]
  misc_feature (1)..(892): NCBI GI: 156042812 Blast Desc: SS1G_11205 [Sclerotinia sclerotiorum 1980] gi|154695590|gb|EDN95328.1| SS1G_11205 [Sclerotinia sclerotiorum 1980]
  misc_feature (161)..(894): NCBI GI: 116179054 Blast Desc: CHGG_00155 [Chaetomium globosum CBS 148.51] gi|88184452|gb|EAQ91920.1| CHGG_00155 [Chaetomium globosum CBS 148.51]
  misc_feature (5)..(865): NCBI GI: 238506082 Blast Desc: alpha,alpha-trehalose-phosphate synthase subunit Tps2, [Aspergillus flavus NRRL3357] gi|220690357|gb|EED46707.1| alpha,alpha-trehalose-phosphate synthase subunit Tps2, flavus
  misc_feature (3)..(865): NCBI GI: 255945207 Blast Desc: Pc20g08480 [Penicillium chrysogenum Wisconsin 54-1255] gi|211588106|emb|CAP86177.1| Pc20g08480 [Penicillium chrysogenum Wisconsin 54-1255]
  misc_feature (55)..(867): SWISSPROT Homolog: EC 3.1.3.12 Trehalose-phosphatase
MPGEEILRRMSVSTSGRRESISDIKSSAPELVLTGNIISVTFTTPNTFKYHKIGEWELGNRHGQSALLDAFAYLSSEESPWSHSVVAWTGEIECPIESISSPSTQQNKTAIPGLNQLSAPVPLCTDVHLPPTPPDVDGLWVSRDDQRKLEQQLATQSRIKTIPVWLADDNEVNHEGITLNDQSRWRRYAEHELYPLFHYKQHEPTDGRSERIEWANYYRANLQFANKIIEVYKPGDIIIIHDYYLLLLPSMLRQRMPDMYISFFLHCPFPSSEFLRCLPRRKEVLEGLLGSNLIGFQSYGYSRHFTSCCTRILDISSDTTGLDAFGTRVEVGVYPIGIDAKKVEKLAWSKDVSRKYEALKEIYHGKRIIVGRDRLDSVRGVAQKLMAFERFLELYPEWRNRVVLIQVTSPTSIQEERGKSENKIASRVNELVMKINGTFGSLGFSPVQHYPQYLAPDEYFALLRAAEIGLITSVRDGMNTTSLEYVVCQRDTHGPLILSEFSGTAGSLRDAIHINPWDLSDVAKQINNALTMSAEKRESMQLSLYDHVTTQTVQSWITKFLRKLVGTLASNQNERATPLLDRIAMLQQYRAANKRLFLFDYDGTLTPIVRDPQAAIPSDRVITALKTLAGDQRNAVWIISGRDQDFLQQHLGHISELGFSAEHGSFIRHPGTTTWENLAETFDMSWQTEVMDIFQKYTDRVPGSFIERKRCALTWHYRQADPDQGLHASRLAFDELKSTATKKWDVEVMKGKANLEVRPTFINKGEIVKRLVREYNSEYARSTQNASATDSETEKNDDISGVEFVLCCGDDFTDEDMFRALNELTNAELMSEHVFTVSVGASKKVTLAKWHVLEPADIIGSTALMAGVGSDGNTNEILSHVNLAAVAGLEGRVPT

SEQ ID NO: 6587 - DNA, 1316 bp, Muscodor strobelii
  misc_feature: SGI EST ID NO. CUFF.16548.0
  misc_feature: Variant of the nucleotide sequence at SEQ ID NO 6585
cagcgacgtagctaagcaaatcaacaatgccttgactatgtctgctgagaagcgtgagtcgatgcagcttagtctttatgaccacgtgacgacacaaactgtccaaagctggattaccaagtttctacggaagctcgttggaacgctagcatcaaaccagaatgagagagctacgccattgttagatcgcattgcaatgttgcaacaatatcgagcagcaaacaaacgcctattcctgttcgattatgatggcacgctaacgcctatcgtgcgagatccccaagccgcaatcccatccgaccgagtgattacagccttgaagacattggcaggagaccaacgcaatgcggtatggatcatttctggcagagaccaggatttcctgcagcaacatctgggtcacatatcagaactgggtttcagcgctgagcacggaagcttcatccgacatcctggcactacgacttgggagaacctcgcagagacctttgatatgtcgtggcagacagaagtgatggatatcttccagaaatacacagatcgcgtgcctggttcttttattgagcgcaaacgctgcgccctcacgtggcattatcgccaggctgatcccgaccagggattgcacgcttctcgcttagctttcgatgaactgaagtcaactgccactaaaaaatgggatgtagaagtgatgaaaggcaaggcaaatctggaagttcgacccaccttcatcaacaaaggcgaaattgtcaagcgccttgtgcgcgagtacaattcagagtacgctcgcagtacacagaatgcaagtgccaccgattctgaaaccgagaagaatgatgacatttcgggagtggagtttgttttgtgctgcggcgacgacttcaccgacgaagacatgttccgtgcactgaatgaattaaccaacgcggagcttatgagcgagcacgtctttacagtttccgttggggctagcaagaaagtgacacttgccaaatggcacgtcttggaaccagctgatatcatcgggagcacagctctcatggcgggagttgggtcagatgggaacactaacgaaatcctaagccatgtcaacttggctgccgtggctggcttagagggccgtgtgccgacatgaggttcacgaggagagcaataattatcttggatgcattagactggccgtggaggatggtgctacccgtatagagtgatagactacgatagaagattggagagctgggtgcgttagctagctcgtcgtgaggcatgaggtcttcggatacataattacaaataaatcaccttcattcttagggata

SEQ ID NO: 6588 - DNA, 1284 bp, Muscodor strobelii
  misc_feature: SGI cDNA ID NO. 561941
  misc_feature: Encodes the peptide sequence at SEQ ID NO 6589
atggcgcaagcggacgaggaagaagcatcgtacatcgactacgacacgttcctcgacccgtccttcaggccgtcatcctttgcgaacaccctcgtcttggccaccaacaaccccaacgacaccccgctcgacctctcgacgcccttgtccaaggtcctgccccagaccgccgcgagcacccacattgtcgccgaggtcgaggcccagatcaagagcctgaacgacagctaccgccagctcgagaaggaggtcatccagaaacatgccgaggccgaccaggtgcgcctcgtcgcctcccgcctgtgggagacgctgaagctcggcaggtctgtcggccgctgtctgcagctgggccgccagctcgagctgcagcacgccgagatagcggccgcgtcggggtcgggcaccagcagcaagagggaagaccacagggctctcgttcgctgcgccaacaccatcctgtccctcagggagattctcgagaggcgcgcgcccggccaggagggacaccggctcgacaaggtcgacgccgtcgagagcctccagcagcatgtcatcagccccgtcgagcgctccgtccgggcgacctcggagcagatcatccgagagttcgctatcggctcggcttcggggacggtcaccttcgcacagagcgaggagaccaaagcccgcactctgtccgccgccacgaccctctacctcatctctcccacccttgccgtcaagcccgacaagtgggttcccacgctgctcgtccaggctctggaagtctatctgcgcaatgccctacagagttctatagcgtcgctagcaagatccttggccacactaccctctctcgaccgcaccctggccgaggtctctgcccgttgtcagaacgtcattgccctcgagatcatcctcgatgccaccaaaccgccggcccatcccttgctaccctcgcagaacgcctcgtccgagaagagcaacctgctgcagccgctccttacttacctcgagacaggctcgcttgcatcatacttctggagatccatggcaagcagccttgcaactagggttcaagaaattgtcaatcgtggtggcgtttcggctcgcaccctgaaatccaaccgcaatgccgttggcgatgccatacgtgagtgcgtcatcaaaggcagtcagccgccgagcactgtcgcccccgcaaagggtcggagtgccaaaggcgacacagacaagagcagtggctgggacagagaggtcgcagtcatggtaggcagtgtcgttggtaacctaggccgatag

SEQ ID NO: 6589 - protein, 427 aa, Muscodor strobelii
  misc_feature: SGI Peptide ID NO. 561941
  misc_feature (1)..(427): NCBI GI: 85079878 Blast Desc: NCU05067 [Neurospora crassa OR74A] gi|28917505|gb|EAA27205.1| conserved [Neurospora crassa OR74A]
  misc_feature (6)..(425): NCBI GI: 46127105 Blast Desc: FG07930.1 [Gibberella zeae PH-1]
  misc_feature (1)..(427): NCBI GI: 261358945 Blast Desc: conserved oligomeric Golgi complex subunit 5 [Verticillium albo-atrum VaMs.102]
  misc_feature (4)..(427): NCBI GI: 171679307 Blast Desc: protein product [Podospora anserina] gi|170939279|emb|CAP64507.1| protein product [Podospora anserina]
  misc_feature (1)..(427): NCBI GI: 154304624 Blast Desc: BC1G_08051 [Botryotinia fuckeliana B05.10] gi|150853951|gb|EDN29143.1| BC1G_08051 [Botryotinia fuckeliana B05.10]
  misc_feature (1)..(427): NCBI GI: 156042546 Blast Desc: SS1G_11071 [Sclerotinia sclerotiorum 1980] gi|154695457|gb|EDN95195.1| SS1G_11071 [Sclerotinia sclerotiorum 1980]
  misc_feature (5)..(427): NCBI GI: 116178942 Blast Desc: CHGG_00099 [Chaetomium globosum CBS 148.51] gi|88184396|gb|EAQ91864.1| CHGG_00099 [Chaetomium globosum CBS 148.51]
  misc_feature (5)..(425): NCBI GI: 189194771 Blast Desc: golgi transport complex component Cog5 [Pyrenophora tritici-repentis Pt-1C-BFP] gi|187979288|gb|EDU45914.1| golgi transport complex component Cog5 [Pyrenophora tritici-repentis
  misc_feature (6)..(425): NCBI GI: 169617986 Blast Desc: SNOG_12177 [Phaeosphaeria nodorum SN15] gi|111059469|gb|EAT80589.1| SNOG_12177 [Phaeosphaeria nodorum SN15]
  misc_feature (6)..(427): NCBI GI: 145616258 Blast Desc: MGG_03448 [Magnaporthe grisea 70-15] gi|145010002|gb|EDJ94658.1| MGG_03448 [Magnaporthe grisea 70-15]
MAQADEEEASYIDYDTFLDPSFRPSSFANTLVLATNNPNDTPLDLSTPLSKVLPQTAASTHIVAEVEAQIKSLNDSYRQLEKEVIQKHAEADQVRLVASRLWETLKLGRSVGRCLQLGRQLELQHAEIAAASGSGTSSKREDHRALVRCANTILSLREILERRAPGQEGHRLDKVDAVESLQQHVISPVERSVRATSEQIIREFAIGSASGTVTFAQSEETKARTLSAATTLYLISPTLAVKPDKWVPTLLVQALEVYLRNALQSSIASLARSLATLPSLDRTLAEVSARCQNVIALEIILDATKPPAHPLLPSQNASSEKSNLLQPLLTYLETGSLASYFWRSMASSLATRVQEIVNRGGVSARTLKSNRNAVGDAIRECVIKGSQPPSTVAPAKGRSAKGDTDKSSGWDREVAVMVGSVVGNLGR

SEQ ID NO: 6590 - DNA, 339 bp, Muscodor strobelii
  misc_feature: SGI cDNA ID NO. 561942
  misc_feature: Reduced expression when VOC is produced
  misc_feature: Encodes the peptide sequence at SEQ ID NO 6591
atgtcgaacaacggcggcgggcttttgggcggactcaccggcggccttgacaacgtcttgacgggcggggagcaggccaaaggccagggtggtctccttggaggcgttaccggcgccctcggcagcacaacacaaggactcggcaatggcctgaactcgacaacgagaggcgtaggcaacgccgtaggccaaaccactgaagggctcggtaacacggtcggaggcgttgctaacggcgttgggggcaccgtcggcggtgttggcaagtccgttggtggcgctgccgggggccagcagcagcaacagcaggatggtgctttcaagagctacggcatctga

SEQ ID NO: 6591 - protein, 112 aa, Muscodor strobelii
  misc_feature: SGI Peptide ID NO. 561942
  misc_feature (36)..(81): NCBI GI: 240107402 Blast Desc: CPC735_066870 [Coccidioides posadasii C735 delta SOWgp]
  misc_feature (17)..(76): NCBI GI: 156065519 Blast Desc: [Sclerotinia sclerotiorum 1980] gi|154691629|gb|EDN91367.1| [Sclerotinia sclerotiorum 1980]
  misc_feature (36)..(75): NCBI GI: 119191015 Blast Desc: [Coccidioides immitis RS]
  misc_feature (36)..(75): NCBI GI: 258564925 Blast Desc: [Uncinocarpus reesii 1704] gi|237906908|gb|EEP81309.1| [Uncinocarpus reesii 1704]
  misc_feature: Useful for introducing or modulating the production of volatile compounds
MSNNGGGLLGGLTGGLDNVLTGGEQAKGQGGLLGGVTGALGSTTQGLGNGLNSTTRGVGNAVGQTTEGLGNTVGGVANGVGGTVGGVGKSVGGAAGGQQQQQQDGAFKSYGI

SEQ ID NO: 6592 - DNA, 5617 bp, Muscodor strobelii
  misc_feature: SGI EST ID NO. CUFF.16560.0
  misc_feature: Variant of the nucleotide sequence at SEQ ID NO 6590
gctcgcccgacagcccgccacacgccgctatgcatagacatgcgaggatggtcagggagaagttttgctaggctgcctcgagaaatgatatcattcatgctgacctacgtcacaggcttgtggctagtgagattcgatggaaacctcgatggcatctctgagcatataagtcgaggctctgtctgggaaatttcgatttgttctgagaaataaccatctacccattgatatcaaccacagactcataccaacaatcatcacaaggaagattttcaaattcttcccgcactttacccaagaaacaacactcaatacatacacaactcagccacaacccaacacaaaacaaaatgtcgaacaacggcggcgggcttttgggcggactcaccggcggccttgacaacgtcttgacgggcggggagcaggccaaaggccagggtggtctccttggaggcgttaccggcgccctcggcagcacaacacaaggactcggcaatggcctgaactcgacaacgagaggcgtaggcaacgccgtaggccaaaccactgaagggctcggtaacacggtcggaggcgttgctaacggcgttgggggcaccgtcggcggtgttggcaagtccgttggtggcgctgccgggggccagcagcagcaacagcaggatggtgctttcaagagctacggcatctgagggaaacgacgaatgaacatgaatgagtttatccagcacgaagttatgaatatgtgtataattataaggaacgggactgtcctattacctagcagcgggttggaaatttaggattatgggaatcattgaataccgtcaccatcaatcatgaaacgctcaaatatagcgcgtgaaatatcgtccaacgacactgagtgtgaatttgtagtatactcgtcggcatactgctggtagattgaagttgacttcaccgcagaacgattgtgctcggcatgttgtggtttgacgatgaccgtggctggtggcagatgaactaacccggcttgtaggcaatgtggcgggcagtggcttgcgaagagcctaggtaactggagctacccctctacagcacctaaacttcgtcctgcgtacctagacctctagccctcgtagaaattgactagaacctcgcaaaaggtggcaggttttggtgttgagtccaataggcagacagcatctgctgcacgcatcacacagctgcagtccagcacctttccccccttcaaccttcttcctatgcgaaagtgttaatacggaaggaagggcgaagaagagcaagaacagagggaaacaatggcgcaagcggacgaggaagaagcatcgtacatcgactacgacacgttcctcgacccgtccttcaggccgtcatcctttgcgaacaccctcgtcttggccaccaacaaccccaacgacaccccgctcgacctctcgacgcccttgtccaaggtcctgttcgacgcccaggagatcgactcgcacatccacctgctcaccacccgcgacgccctgccgctgctcgcccacacccaggccccagaccgccgcgagcacccacattgtcgccgaggtcgaggcccagatcaagagcctgaacgacagctaccgccagctcgagaaggaggtcatccagaaacatgccgaggccgaccaggtgcgcctcgtcgcctcccgcctgtgggagacgctgaagctcggcaggtctgtcggccgctgtctgcagctgggccgccagctcgagctgcagcacgccgagatagcggccgcgtcggggtcgggcaccagcagcaagagggaagaccacagggctctcgttcgctgcgccaacaccatcctgtccctcagggagattctcgagaggcgcgcgcccggccaggagggacaccggctcgacaaggtcgacgccgtcgagagcctccagcagcatgtcatcagccccgtcgagcgctccgtccgggcgacctcggagcagatcatccgagagttcgctatcggctcggcttcggggacggtcaccttcgcacagagcgaggagaccaaagcccgcactctgtccgccgccacgaccctctacctcatctctcccacccttgccgtcaagcccgacaagtgggttcccacgctgctcgtccaggctctggaagtctatctgcgcaatgccctacagagttctatagcgtcgctagcaagatccttggccacactaccctctctcgaccgcaccctggccgaggtctctgcccgttgtcagaacgtcattgccctcgagatcatcctcgatgccaccaaaccgccggcccatcccttgctaccctcgcagaacgcctcgtccgagaagagcaacctgctgcagccgctccttacttacctcgagacaggctcgcttgcatcatacttctggagatccatggcaagcagccttgcaactagggttcaagaaattgtcaatcgtggtggcgtttcggctcgcaccctgaaatccaaccgcaatgccgttggcgatgccatacgtgagtgcgtcatcaaaggcagtcagccgccgagcactgtcgcccccgcaaagggtcggagtgccaaaggcgacacagacaagagcagtggctgggacagagaggtcgcagtcatggtaggcagtgtcgttggtaacctaggccgatagcaaacataccgatacataagatttggttgtctcgacctgcatgagaaggtctgacggtgcagtccgtcgactatgccatggtcgtggatcacataacgcctgcaggaaaaggggctggtaacacgacttgtacctggtctgcgaggagcatctcgcacgaatcttcctgggtgtatgactttgcaaagactgcactactactatatacgccgtcatgctcggggatcccccgagaactggaagtatgagagactggagatactcggccttacatcagcgaagagccaggtcgatgtatcatccgtcaagtcgttctcgtgagctccgcctcatcactcgggccgagtgtagatagcctacatagtgctctatccgcgagtagtgatgtgctgatagccactacgcagaagtagagagtcacgctgctgatcgaagcgacctattgatacaggtcacagaccgatgttcagctgtgtatgtgtagatagggcaatggccggtcgcaattcgagctgctaaggccgtaacgccctggcccactactttgacgaccattgaagccctactctgtgattcctgccaattcacaatcggatgacaggtgataccgcccttgttcatcatcatacccagatcgcaatccgttttcgcgtacttcaagtgatttcgtcgaaggagcatggatcctggtcaacttgcttcttcatattactgctatcatagactccgactcgacctgcctggtaaaagtcaaacacggctgttgggtctctcgaaggtggagcatcgcttcaccgtcccatgatccgttctccccttttcactaggtttggcctctataccttttgcagcaagtgggcacccagaatacgtctcttcaggaataagtttcgatcgtggtcgattcttgattgcggagaactcgagcgacttatgttctgttcatttctaaacaaatcgaacataaatctgtgtctccttggtatactcatgttcgatttggcggcaatccctataacggcacaattctagcattcactttcattggtcagctaatccctgcgtcaatcgtgctgcactgtagccaacccatcggatcaattcctcgcctgtcgcgttacgtcattcatccaggtacgatgcgtgcggctttctactgtctccaaatttccttccccaaattatcgtgaaccgaaatacctattccctgccctatccccagccagcagaaagactgaagttgcctattatgccctagatagaggaccttgccagaaatcatgattgtatagtggtcttacaacgcatgttttggcatgacacgtttgtgtcgaatatacgtcagaaaaatgtattttgtctacatcactcagatgcccgtcccacgatatcacaacggcacagagccggttttgttcgtcagaacggaccatgagctattcctgaggccagtggcttcaatctggggaccaagaacaggcccttaacaggcgttgctagttcggcaagtaaggtctgcatctgcatccaccgagtgagctgtttgctcttgtcagtaccttagactccgagccgtggagcaaaccctccagttttgagtttcgccccaccatgggcttgttcgaagatgaaagtgcgacgcttctgtcaagctcgaaattctgtacacccttcgcgtattattctgccgaacatgagaacttaggtacctgccaccgctcttcaagaatttcctgcccctatcttctagtattctccttgcctccatgcttctgtgacaagcagtttttaatggtgctcttcttgtgtcttcgctacttggctctctcgttgcttatcctatgacagtctgttgggcagtgttagtccggaaatatcagaattgaacaagacatggcagaagatcgatcgtatagatgcttgggtcccccggctgatgatacaacccaatcttctaggccctctacctacggccagcattacgaagacgaaagtgaaccttgttccccgggcctcccgcctcatctacgctcatctatcaccagagttccagtaactccaggttttcattttactccgcgtcactttgatgcccggtcggaaataacagaccggaatcccggctatttcattcaatatccataccgttacggcgatactgctggtgcggcccgcgatttgcatgggcgcgaagagacgtcaggaggcagaacagggctatctaagttaatcgactcgctttcagagaccatgccgggtgaagagattctaaggcggatgagcgtgtcaacgagtggtcgtagagagtcaatatcagatatcaagtcctctgcgccagaattagtgctcacaggcaacataatctcggtcacctttacaactccaaacaccttcaaatatcacaaaattggagagtgggaactgggaaatagacatggccaatcagcacttttagacgcctttgcatacctctcctctgaagaatcgccatggagtcattcagttgtcgcatggacaggcgaaattgagtgtcccattgagtctatctcatcaccgagcacgcaacagaacaagacggccatccctggtttaaatcagctctctgcgcctgttccattgtgtacggatgttcatctgcctcctactccccctgatgtagatgggctatgggtctcgcgagacgatcaacggaaactcgagcaacagcttgctacacaaagccgcatcaagacaatccccgtctggctggctgatgataatgaagtgaaccatgaaggtatcaccttgaacgatcaaagccgatggagacgttatgctgaacatgaactatatccattatttcactataaacagcatgaacccactgatggtcgatcagaacgtattgaatgggcaaattactacagagccaatctccaattcgcgaacaagattatcgaggtctacaaaccag

SEQ ID NO: 6593 - DNA, 1653 bp, Muscodor strobelii
  misc_feature: SGI cDNA ID NO. 561943
  misc_feature: Encodes the peptide sequence at SEQ ID NO 6594
atgaaaccatcagatgaagtcgaaaatgtcagcgcttctggcatcgaacatgcgccacaagcagctacctcgtccacaggcggtgatgcggctgcggctttccttgagaaaaacaagaatccagaaggtcggattgttgtcacgccggaagacaacaagcggattgtccgacgtattgatctcataattcttccaataatgttgacagtatactttctgcaaggtttggacaaagcgacattatcctatgcctcggtctttgggctgatagacggtgcccatcttgttggtgatcagtatagttggttggggagtattgtctatttggcgcaacttgttgcacaagcaccacttgcatggcttttggtccgattaccaatagctaagttcacgagtgtcatggtattgctctggggtatcactctgtcaactatggctgccgcacataactttggcggccttctcactgctcgtttctttctcggagccttcgaggccagcgttgcgcctagtttcatcgccattacgcagatgtggtggagacgcagagagcagaccgtgaggacttcttattggtacgccatgaacgggttcaccaatatgtttggcagtctcatcgcgtggggacttggtcatattcactcgcacatcccgtcatacaatataatattcctattttttggcctcgtgacggtcgcatttagctttgttatgattactttcatgccagactcgcctgtcgaagcgaagtttctcaacgatcatgataagctgatcgcagtggagcggcttcgaatgaaccaaatgggtgtgatgtcacgagaatggaagaatagccacttgagagaggcgcttatggacctaaagtcgtggctattcttcgcacttctcttttctatcagtgtcccatctggcggcatatcgaccttcgggccgctgatcattaagacgtttggattcgatagtttccagacaattcttttcaacatcccttttggtgctgtgcaaataatatccacagtcggcggtgcatttgtcgcgcagaaaatcagaaggaaaggccccgtcattgcttttttatgccttccgcccattgctggtgtcatagtcctaatgacactaccccgtgacgctgcgcatagagctccgcttctagcgggttactatctcgtgtctgtctaccctggtatcacacctctgatctacgcctggagttcccaaaatacagccggtgacacgaaacgcaagtgtacaaacgctattctattcatcggagcgagcactggaaatgtcgttgggcccttactctatacccaaagggacgcccctggatatggacgtggcttgcgttcaaatttggctctatatgtcgtcatcatcgttctagttggggtcacaagcttgtatattgcgtatctaaataaacagcatgcaaagaagagagtagctctgggtaaaagcgccgttattatcgacatgagtttagtatcggccgaggaagcacatataggacgagaggctcaggagaacgctggttcaggggttacagagagtgaagcgggtgttgctaccggcgagcgtgcaatgttgggcgagagagcgttcgacgacataactgatttggagaacgaggagtttgtctttgtttattga

SEQ ID NO: 6594 - protein, 550 aa, Muscodor strobelii
  misc_feature: SGI Peptide ID NO. 561943
  misc_feature (67)..(434): Pfam Id: PF07690 Pfam Desc: Major Facilitator Superfamily
  misc_feature (40)..(550): NCBI GI: 256721523 Blast Desc: NECHADRAFT_39722 [Nectria haematococca mpVI 77-13-4]
  misc_feature (46)..(550): NCBI GI: 67526091 Blast Desc: AN3503.2 [Aspergillus nidulans FGSC A4] gi|40739874|gb|EAA59064.1| AN3503.2 [Aspergillus nidulans FGSC A4] gi|259481985|tpe|CBF76022.1| TPA: MFS transporter, nidulans
  misc_feature (2)..(550): NCBI GI: 189206588 Blast Desc: allantoate permease [Pyrenophora tritici-repentis Pt-1C-BFP] gi|187975721|gb|EDU42347.1| allantoate permease [Pyrenophora tritici-repentis Pt-1C-BFP]
  misc_feature (40)..(547): NCBI GI: 46127417 Blast Desc: FG08086.1 [Gibberella zeae PH-1]
  misc_feature (3)..(550): NCBI GI: 46138847 Blast Desc: FG10938.1 [Gibberella zeae PH-1]
  misc_feature (4)..(550): NCBI GI: 169772769 Blast Desc: [Aspergillus oryzae RIB40] gi|83768714|dbj|BAE58851.1| protein product [Aspergillus oryzae]
  misc_feature (1)..(550): NCBI GI: 169626182 Blast Desc: SNOG_16370 [Phaeosphaeria nodorum SN15] gi|160705780|gb|EAT76195.2| SNOG_16370 [Phaeosphaeria nodorum SN15]
  misc_feature (1)..(550): NCBI GI: 145255591 Blast Desc: An18g05610 [Aspergillus niger] gi|134084603|emb|CAK97479.1| protein product [Aspergillus niger]
  misc_feature (27)..(548): NCBI GI: 39963505 Blast Desc: MGG_09758 [Magnaporthe grisea 70-15] gi|145015462|gb|EDJ99998.1| MGG_09758 [Magnaporthe grisea 70-15]
  misc_feature (3)..(550): NCBI GI: 169765015 Blast Desc: [Aspergillus oryzae RIB40] gi|83764833|dbj|BAE54977.1| protein product [Aspergillus oryzae]
MKPSDEVENVSASGIEHAPQAATSSTGGDAAAAFLEKNKNPEGRIVVTPEDNKRIVRRIDLIILPIMLTVYFLQGLDKATLSYASVFGLIDGAHLVGDQYSWLGSIVYLAQLVAQAPLAWLLVRLPIAKFTSVMVLLWGITLSTMAAAHNFGGLLTARFFLGAFEASVAPSFIAITQMWWRRREQTVRTSYWYAMNGFTNMFGSLIAWGLGHIHSHIPSYNIIFLFFGLVTVAFSFVMITFMPDSPVEAKFLNDHDKLIAVERLRMNQMGVMSREWKNSHLREALMDLKSWLFFALLFSISVPSGGISTFGPLIIKTFGFDSFQTILFNIPFGAVQIISTVGGAFVAQKIRRKGPVIAFLCLPPIAGVIVLMTLPRDAAHRAPLLAGYYLVSVYPGITPLIYAWSSQNTAGDTKRKCTNAILFIGASTGNVVGPLLYTQRDAPGYGRGLRSNLALYVVIIVLVGVTSLYIAYLNKQHAKKRVALGKSAVIIDMSLVSAEEAHIGREAQENAGSGVTESEAGVATGERAMLGERAFDDITDLENEEFVFVY

SEQ ID NO: 6595 - DNA, 198 bp, Muscodor strobelii
  misc_feature: SGI EST ID NO. CUFF.16458.0
  misc_feature: Variant of the nucleotide sequence at SEQ ID NO 6593
atttggcgcaacttgttgcacaagcaccacttgcatggcttttggtccgattaccaatagctaagttcacgagtgtcatggtattgctctggggtatcactctgtcaactatggctgccgcacataactttggcggccttctcactgctcgtttctttctcggagccttcgaggccagcgttgcgcctagtttcatcg

SEQ ID NO: 6596 - DNA, 1620 bp, Muscodor strobelii
  misc_feature: SGI cDNA ID NO. 561944
  misc_feature: Encodes the peptide sequence at SEQ ID NO 6597
atgttggctcatcctgcgccttggcttttcgcggctgctcttttccactccctcggcgttaccgacgctgccacctcaagtgtcaagacgacctgcggcatattcacgggcattgttggcgcaaataatgtgactcaatggctgggtattcgctatgctgcgcctcctcttggggatctgagattcgagcctcctgaagacccatcttgtaaagatgaaacgcagttagcaaatattcatggtccatggtgtttagcaacgggcgatgacccaaccaatgcttcaacttccgaagattgtttattcatggatatttataccccgagtaatgctacaagcgactcaaagttacccgtattcttctaccttcaaggtggagggtttaattctaattcgaatcccaatctcaacggtcagggtctagttatcgccagtaatcacaccattattgtggtgaccttcaactatcgcgttggaccatggggcttcatcacagacggggacaatatcacgcctaacaatggactacgagaccagaggaaagcgctggagtgggtcaacaaatacatagaagatttcggtggcgacccgggtcatgttgtgctcggtggtgattcggcaggagccgcgagtatcagcctccagatggcagccttcggcggcaaagactcaggtcttttccacgctgcagccgcagagtcagtgtcgtttggtccagttttgaccgtcgagcaatctcagtaccaatacgataacttttctgcacgagctggatgtgatgttcacgactctctcgcatgcctcagaaacaaaacagcagaggagcttcaggaagtgaatacgaacattccgtatcctgatacgaccaatacttctgctccgatatacatgtggaatccggttatcgataatgattttattcgttatttaacctatactgccttcgagaaaggcagttttatcaggatcccgcttattgttggcgatgatacgaacgagggcactgtgttcacgcctcagaacacgtcgtcaatcactgagagtgacaatttcctcaagtcccaattcccgttactcacgaatgcgcagcttagtgaaatcaacgcactgtatcccaatcctgacaatgccagttgtccgtcctcaggctgcttctggcgccaagtatccaacgcatacggcgatatgcggtacacatgcccgggacagtacatatcgtcgaaagtggtagaatacggcgagcagtcgtcatggaactaccactacgacgtggaggatccagaacaagtcgctgaaggctacggcgtaccacacacggtcgagctgaacgccatacttggtcctacgtacgttaccgatccgccccaaagctacctaccgggcggcatcaatgaagacgtcgttcccgtgatacagcattattggattagttttattcgcagtttcgacccgaataagtataaatatcctggatctgcggaatggaaacagtgggacccacatgctcagaaccgcctgctctttgagacgggtgggaagacgaagatggagttcgtgaacccaagacagcgaaagcagtgtagctatttccagtcgattggagttgcgaatcttcagtaa

SEQ ID NO: 6597 - protein, 539 aa, Muscodor strobelii
  misc_feature: SGI Peptide ID NO. 561944
  misc_feature (1)..(530): Pfam Id: PF00135 Pfam Desc: Carboxylesterase
  misc_feature (9)..(534): NCBI GI: 256727921 Blast Desc: NECHADRAFT_46438 [Nectria haematococca mpVI 77-13-4]
  misc_feature (23)..(539): NCBI GI: 39969609 Blast Desc: MGG_10414 [Magnaporthe grisea 70-15] gi|110628941|gb|ABG79935.1| vacuolar triacylglycerol lipase [Magnaporthe grisea] gi|145015116|gb|EDJ99684.1| MGG_10414 grisea
  misc_feature (23)..(535): NCBI GI: 46115518 Blast Desc: FG03601.1 [Gibberella zeae PH-1]
  misc_feature (28)..(539): NCBI GI: 164428581 Blast Desc: NCU00761 [Neurospora crassa OR74A] gi|157072202|gb|EAA34922.2| conserved [Neurospora crassa OR74A]
  misc_feature (13)..(519): NCBI GI: 38636419 Blast Desc: related to cholinesterase precursor [Neurospora crassa]
  misc_feature (1)..(534): NCBI GI: 145253344 Blast Desc: An16g08870 [Aspergillus niger] gi|134083750|emb|CAK47084.1| protein product [Aspergillus niger]
  misc_feature (41)..(534): NCBI GI: 119484132 Blast Desc: triacylglycerol lipase, [Neosartorya fischeri NRRL 181] gi|119410125|gb|EAW20072.1| triacylglycerol lipase, [Neosartorya fischeri NRRL 181]
  misc_feature (6)..(534): NCBI GI: 169784384 Blast Desc: [Aspergillus oryzae RIB40] gi|83775400|dbj|BAE65520.1| protein product [Aspergillus oryzae]
  misc_feature (6)..(534): NCBI GI: 238508487 Blast Desc: triacylglycerol lipase, [Aspergillus flavus NRRL3357] gi|220688955|gb|EED45307.1| triacylglycerol lipase, [Aspergillus flavus NRRL3357]
  misc_feature (9)..(536): NCBI GI: 121719655 Blast Desc: triacylglycerol lipase, [Aspergillus clavatus NRRL 1] gi|119404738|gb|EAW15100.1| triacylglycerol lipase, [Aspergillus clavatus NRRL 1]
  misc_feature (9)..(539): SWISSPROT Homolog: EC 3.1.1.3 Triacylglycerol lipase
MLAHPAPWLFAAALFHSLGVTDAATSSVKTTCGIFTGIVGANNVTQWLGIRYAAPPLGDLRFEPPEDPSCKDETQLANIHGPWCLATGDDPTNASTSEDCLFMDIYTPSNATSDSKLPVFFYLQGGGFNSNSNPNLNGQGLVIASNHTIIVVTFNYRVGPWGFITDGDNITPNNGLRDQRKALEWVNKYIEDFGGDPGHVVLGGDSAGAASISLQMAAFGGKDSGLFHAAAAESVSFGPVLTVEQSQYQYDNFSARAGCDVHDSLACLRNKTAEELQEVNTNIPYPDTTNTSAPIYMWNPVIDNDFIRYLTYTAFEKGSFIRIPLIVGDDTNEGTVFTPQNTSSITESDNFLKSQFPLLTNAQLSEINALYPNPDNASCPSSGCFWRQVSNAYGDMRYTCPGQYISSKVVEYGEQSSWNYHYDVEDPEQVAEGYGVPHTVELNAILGPTYVTDPPQSYLPGGINEDVVPVIQHYWISFIRSFDPNKYKYPGSAEWKQWDPHAQNRLLFETGGKTKMEFVNPRQRKQCSYFQSIGVANLQ

SEQ ID NO: 6598 - DNA, 700 bp, Muscodor strobelii
  misc_feature: SGI EST ID NO. CUFF.16467.0
  misc_feature: Variant of the nucleotide sequence at SEQ ID NO 6596
ctcgaatcaagtttgagctcgaccctccactaccaacttagcaggccggaaacatgcacgatgcaagcctcgagcttcggcacctgtatgcacgctcataactaaacattatgtcacacattccgaagcaaacttttgtttgacacgtggagaacgtatgtacccaagttaaataatatgcgatgcgatgcgcctagtgaggtcatcacacgacagattcgagaggggcggtaaatggaaagtggcataaataggtagaaatagggtcggacgaccatcatgggatcaaactgtgagcgggcctacatgatccaagttcgcatgagaatggcggtggaaatgcatatatgagattgacgatggcgtcgcttttgaatatgcagagctcttggttacgctcagcacgatcctgtcccccctgcttggggtttatcaagacatcatgttggctcatcctgcgccttggcttttcgcggctgctcttttccactccctcggcgttaccgacgctgccacctcaagtgtcaagacgacctgcggcatattcacgggcattgttggcgcaaataatgtgactcaatggctgggtattcgctatgctgcgcctcctcttggggatctgagattcgagcctcctgaagacccatcttgtaaagatgaaacgcagttagcaaatattcatggtccatggtgtttagca

SEQ ID NO: 6599 - DNA, 321 bp, Muscodor strobelii
  misc_feature: SGI cDNA ID NO. 561945
  misc_feature: Elevated expression when VOC is produced
  misc_feature: Encodes the peptide sequence at SEQ ID NO 6600
atgcctgtcactcgtgttgtcatgctcgctgtccctgacgctgctgctcaggagaaggtgatcgccaccttcaagggtttcgctgagaccgcccaaaaggacggaaagccctacatcttggctgctcgtgccgctaagggcgaggtcctccgtgacaccacgaacggtggctggaacaccattgcctcgctgacctttgcgagccaggctgatgctgactacttctccaacgaggaccccgtcaacaaggctttcaaggagcaggctcaagctagtggccgtggtggtggcttgatcgccatccagagctctttcgattag

SEQ ID NO: 6600 - protein, 106 aa, Muscodor strobelii
  misc_feature: SGI Peptide ID NO. 561945
  misc_feature (2)..(86): NCBI GI: 255947944 Blast Desc: Pc22g07140 [Penicillium chrysogenum Wisconsin 54-1255] gi|211591756|emb|CAP98002.1| Pc22g07140 [Penicillium chrysogenum Wisconsin 54-1255]
  misc_feature (2)..(86): NCBI GI: 115391357 Blast Desc: conserved [Aspergillus terreus NIH2624] gi|114194107|gb|EAU35807.1| conserved [Aspergillus terreus NIH2624]
  misc_feature (2)..(86): NCBI GI: 119500398 Blast Desc: stress responsive A/B barrel domain protein [Neosartorya fischeri NRRL 181] gi|119415121|gb|EAW25059.1| stress responsive A/B barrel domain protein [Neosartorya fischeri
  misc_feature (2)..(86): NCBI GI: 67523045 Blast Desc: AN1979.2 [Aspergillus nidulans FGSC A4] gi|40744724|gb|EAA63880.1| AN1979.2 [Aspergillus nidulans FGSC A4] gi|259487340|tpe|CBF85938.1| TPA: stress responsive A/B FGSC
  misc_feature (1)..(103): NCBI GI: 212534772 Blast Desc: conserved [Penicillium marneffei ATCC 18224] gi|210069941|gb|EEA24031.1| conserved [Penicillium marneffei ATCC 18224]
  misc_feature (2)..(86): NCBI GI: 70993836 Blast Desc: stress responsive A/B barrel domain protein [Aspergillus fumigatus Af293] gi|66849399|gb|EAL89727.1| stress responsive A/B barrel domain protein [Aspergillus fumigatus
  misc_feature (2)..(86): NCBI GI: 145258199 Blast Desc: An04g06070 [Aspergillus niger] gi|134074575|emb|CAK38868.1| protein product [Aspergillus niger]
  misc_feature (2)..(86): NCBI GI: 121707765 Blast Desc: stress responsive A/B barrel domain protein [Aspergillus clavatus NRRL 1] gi|119400082|gb|EAW10508.1| stress responsive A/B barrel domain protein [Aspergillus clavatus NRRL
  misc_feature (2)..(86): NCBI GI: 238485876 Blast Desc: stress responsive A/B barrel domain protein [Aspergillus flavus NRRL3357] gi|220699055|gb|EED55394.1| stress responsive A/B barrel domain protein [Aspergillus flavus
  misc_feature (1)..(103): NCBI GI: 240104701 Blast Desc: CPC735_021960 [Coccidioides posadasii C735 delta SOWgp]
  misc_feature: Useful for introducing or modulating the production of volatile compounds
MPVTRVVMLAVPDAAAQEKVIATFKGFAETAQKDGKPYILAARAAKGEVLRDTTNGGWNTIASLTFASQADADYFSNEDPVNKAFKEQAQASGRGGGLIAIQSSFD

SEQ ID NO: 6601 - DNA, 1456 bp, Muscodor strobelii
  misc_feature: SGI EST ID NO. CUFF.16470.0
  misc_feature: Variant of the nucleotide sequence at SEQ ID NO 6599
ctctcattgactaggtgaggtcctaggccagggtctccaatccaccagggtctccgtcagacacgtcaggcatcgggtaagggatcgcttattttacgccttgtgcataaggcaattactggactgtgccactttctgcacggaagcttatgttcacagatgccgacagtgaagagctgttgaccgccgaaacacgcatgtgaggtcccttgagcgtcgaataaacgcgtcacagggcggagggcgttgcgctgtaaagcacaaatggattgtgacacgaattctggttaatcaaagtaacgataatatttgcgattgcatcatgagagctgtcgctatcctaaaggcagtggttgacaacgaccgaataccttttacccctccagctcttgtcgtgttaccgctcctatagctgtgtcagcatgcataacaatcctcttctcacatccgctcgttacttgtgtaaagtgcccctcgttctcagtgacttcatccccgcgttggcggtgtgcaacgcgcgttggacgaggtgtcctagcccctgtcatctgcattggctgcctgtcgaagatgtccgtcatgcttagtgcttccccattctcgtgggtcgttgctcgaaacacttagcctagtcgacatcttattcagcggggcatcctatttcagtggggtgggtttggatcaatcctccagagatgtcttgtcttgggtatgatgctagtctcattatgcactggaaaccgtatacagaaggaactgtcaattgtgacaaatggtgttcgaagcatccatcatgaggatacagattgtctatataaggggccgttgaatcagccaagtgtcgagaaaatatcaagtcagctcactcagtcatcaacttccatcctgatcatacacaatcgaacgaaccagaaaaactcaacatcaatttccaactcttacaacaatcaatatgcctgtcactcgtgttgtcatgctcgctgtccctgacgctgctgctcaggagaaggtgatcgccaccttcaagggtttcgctgagaccgcccaaaaggacggaaagccctacatcttggctgctcgtgccgctaagggcgaggtcctccgtgacaccacgaacggtggctggaacaccattgcctcgctgacctttgcgagccaggctgatgctgactacttctccaacgaggaccccgtcaacaaggctttcaaggagcaggctcaagctagtggccgtggtggtggcttgatcgccatccagagctctttcgattagatcgtctcttaagcgagaatcccgatggggttcattcacgagcaatgatagactggtacgaatagacacgaatagaacaatagaagagtttcaaaaaaacacacggctttctgtgaagaatgtgcattcattatgaagattgcatgctcttcgtcttgtgcaccaccgcgacatcatcattcg

SEQ ID NO: 6602 - DNA, 1770 bp, Muscodor strobelii
  misc_feature: SGI cDNA ID NO. 561946
  misc_feature: Encodes the peptide sequence at SEQ ID NO 6603
atgtcgttcagctcccactctagtgcgtctcactttgcaccttgcagtgatccagacatggctctacaacaggagattctcaggacgagttgttctggtttcggtgattttttcacgtccgaggaaggtgaaacgtccagtgcgatgtatccccctggataccaatctcagccacctggaacacaggctacagaggtgccacaacgttcgccgccggaatttggcagtgctgttgtcatggaccagctgactgctcaattcggctcgctactgcacgctatatcggcggatcagcttctcggcaaaattgtgagtgccttggtagaggtattcgagcgcgagtgggcaaagcgatcagatgaccttataaaggtgttggaagcatccaagactggctctgagggcagagaatctctcgattactggcgtccacccatgtaccctgtcgcatacattattaccgagatggaccggaaggagctgggagatgggagtgaatcttctatctgtacaaaactcagacagaagacccagtatgcattcagtcgtgttcatggtgcataccttgaacgtgagaggctcaccttattctacgaagacaaggaagccgaaaaagatgcccggcaccgaaaggacgaaataatccgtttacttaacctcagcacgaaaacatctgtagcccgatctgaattctggactgttgtcgatggctcccacgtaaaaaatttgagatcgcggtgccctcaaccaaaggatcagattcatgaatggagtcgggaaaataacattgagattacagttgccaggtgggaaatgggtcagctacttctcggtctacttcatatgtcggaagcgagagaggttctttatcgcaaccttacactcagcggtatatctgttcatgtcaggcccttcaagctacagtgcaatcccctgttttgcaagcggtgtggcaaggccggtgagtttcagaacaagtgcactagcaaagaaccgatttgtggactttgcgcgaaaaagcaccttgcaggctactgccaagcgtggagagacaagtcggaacggcattgtaacaattgtggagaagatggtcacggagtcagggatcgagagtgccgagcagcgggtagcgtagcggagtggaagaaggccgacgcagtgaatccgattcctgattgggctccaggagaacgtcgcccagttgctcatcaagtcggggtgatgaggcacttcagagactccgtgcccgattcacaaggccatgaggaagaaaagaccgaagcacagagcaagaagaaaaagagaacctccggacaagcccagtctagtgcacgaaaaggtaaacagaaacaaaacacgaagcggccggaggtgacggcgggtgactctgatggcaacaatgaggatgaggtggtacagaattacggactcgaggaagcaagcgatattgatagcgatcatgccaggcgcgtaccttcattttcagtcgacatatcagagttgggtgagcagggaggctcaattgaagtcgcggccacacctgatgtggattgggaaactgcgggggagactgacatggaaagcaacgtcagctttatcagcgagactagtactgggtctaaaaggcgtctcggggagttggtttcgcaaaagaacaagcgacgggccacaaataagagtatatcgaggtcggacccactgccgcctcgatcacggagagatggtttgcgtaactcgaaaagggtcaccgagagtactcaagtaagctga

SEQ ID NO: 6603 - protein, 589 aa, Muscodor strobelii
  misc_feature: SGI Peptide ID NO. 561946
MSFSSHSSASHFAPCSDPDMALQQEILRTSCSGFGDFFTSEEGETSSAMYPPGYQSQPPGTQATEVPQRSPPEFGSAVVMDQLTAQFGSLLHAISADQLLGKIVSALVEVFEREWAKRSDDLIKVLEASKTGSEGRESLDYWRPPMYPVAYIITEMDRKELGDGSESSICTKLRQKTQYAFSRVHGAYLERERLTLFYEDKEAEKDARHRKDEIIRLLNLSTKTSVARSEFWTVVDGSHVKNLRSRCPQPKDQIHEWSRENNIEITVARWEMGQLLLGLLHMSEAREVLYRNLTLSGISVHVRPFKLQCNPLFCKRCGKAGEFQNKCTSKEPICGLCAKKHLAGYCQAWRDKSERHCNNCGEDGHGVRDRECRAAGSVAEWKKADAVNPIPDWAPGERRPVAHQVGVMRHFRDSVPDSQGHEEEKTEAQSKKKKRTSGQAQSSARKGKQKQNTKRPEVTAGDSDGNNEDEVVQNYGLEEASDIDSDHARRVPSFSVDISELGEQGGSIEVAATPDVDWETAGETDMESNVSFISETSTGSKRRLGELVSQKNKRRATNKSISRSDPLPPRSRRDGLRNSKRVTESTQVS

SEQ ID NO: 6604 - DNA, 982 bp, Muscodor strobelii
  misc_feature: SGI EST ID NO. CUFF.16496.0
  misc_feature: Variant of the nucleotide sequence at SEQ ID NO 6602
tgctcatcaagtcggggtgatgaggcacttcagagactccgtgcccgattcacaaggccatgaggaagaaaagaccgaaacagaagcacagagcaagaagaaaaagagaacctccggacaagcccagtctagtgcacgaaaaggtaaacagaaacaaaacacgaagcggccggaggtgacggcgggtgactctgatggcaacaatgaggatgaggtggtacagaattacggactcgaggaagcaagcgatattgatagcgatcatgccaggcgcgtaccttcattttcagtcgacatatcagagttgggtgagcagggaggctcaattgaagtcgcggccacacctgatgtggattgggaaactgcgggggagactgacatggaaagcaacgtcagctttatcagcgagactagtactgggtctaaaaggcgtctcggggagttggtttcgcaaaagaacaagcgacgggccacaaataagagtatatcgaggtcggacccactgccgcctcgatcacggagagatggtttgcgtaactcgaaaagggtcaccgagagtactcaagtaagctgaatagactcagatgcggcgatacactcgctagtgtctcgtctcggagtctctcattccacattgtgcctcgggaacatgttagttgtcagctttaccatttgatagttccaagttcatagcactactgtcattaacggcataagtttttgtctgtaggtgggggagaggcaatgagcttaggtgttgattgaggataccgatagtctcgagcggcaatgcgttcaggcactgatattgttttgtctactagctgcttttttaggtatgtgagattgtctgagagcttgatgaaagggtatcggagttgatcgaagtgaaaggggtaggcgggtgatgcaacaaggcctagtcaactgtgctctagacccaacacctcatcggatcttctcattgcaggatagcgtcttc

SEQ ID NO: 6605 - DNA, 1776 bp, Muscodor strobelii
  misc_feature: SGI cDNA ID NO. 561947
  misc_feature: Elevated expression when VOC is produced
  misc_feature: Encodes the peptide sequence at SEQ ID NO 6606
atgtcgttcagctcccactctagtgcgtctcactttgcaccttgcagtgatccagacatggctctacaacaggagattctcaggacgagttgttctggtttcggtgattttttcacgtccgaggaaggtgaaacgtccagtgcgatgtatccccctggataccaatctcagccacctggaacacaggctacagaggtgccacaacgttcgccgccggaatttggcagtgctgttgtcatggaccagctgactgctcaattcggctcgctactgcacgctatatcggcggatcagcttctcggcaaaattgtgagtgccttggtagaggtattcgagcgcgagtgggcaaagcgatcagatgaccttataaaggtgttggaagcatccaagactggctctgagggcagagaatctctcgattactggcgtccacccatgtaccctgtcgcatacattattaccgagatggaccggaaggagctgggagatgggagtgaatcttctatctgtacaaaactcagacagaagacccagtatgcattcagtcgtgttcatggtgcataccttgaacgtgagaggctcaccttattctacgaagacaaggaagccgaaaaagatgcccggcaccgaaaggacgaaataatccgtttacttaacctcagcacgaaaacatctgtagcccgatctgaattctggactgttgtcgatggctcccacgtaaaaaatttgagatcgcggtgccctcaaccaaaggatcagattcatgaatggagtcgggaaaataacattgagattacagttgccaggtgggaaatgggtcagctacttctcggtctacttcatatgtcggaagcgagagaggttctttatcgcaaccttacactcagcggtatatctgttcatgtcaggcccttcaagctacagtgcaatcccctgttttgcaagcggtgtggcaaggccggtgagtttcagaacaagtgcactagcaaagaaccgatttgtggactttgcgcgaaaaagcaccttgcaggctactgccaagcgtggagagacaagtcggaacggcattgtaacaattgtggagaagatggtcacggagtcagggatcgagagtgccgagcagcgggtagcgtagcggagtggaagaaggccgacgcagtgaatccgattcctgattgggctccaggagaacgtcgcccagttgctcatcaagtcggggtgatgaggcacttcagagactccgtgcccgattcacaaggccatgaggaagaaaagaccgaaacagaagcacagagcaagaagaaaaagagaacctccggacaagcccagtctagtgcacgaaaaggtaaacagaaacaaaacacgaagcggccggaggtgacggcgggtgactctgatggcaacaatgaggatgaggtggtacagaattacggactcgaggaagcaagcgatattgatagcgatcatgccaggcgcgtaccttcattttcagtcgacatatcagagttgggtgagcagggaggctcaattgaagtcgcggccacacctgatgtggattgggaaactgcgggggagactgacatggaaagcaacgtcagctttatcagcgagactagtactgggtctaaaaggcgtctcggggagttggtttcgcaaaagaacaagcgacgggccacaaataagagtatatcgaggtcggacccactgccgcctcgatcacggagagatggtttgcgtaactcgaaaagggtcaccgagagtactcaagtaagctga

SEQ ID NO: 6606 - protein, 591 aa, Muscodor strobelii
  misc_feature: SGI Peptide ID NO. 561947
  misc_feature: Useful for introducing or modulating the production of volatile compounds
MSFSSHSSASHFAPCSDPDMALQQEILRTSCSGFGDFFTSEEGETSSAMYPPGYQSQPPGTQATEVPQRSPPEFGSAVVMDQLTAQFGSLLHAISADQLLGKIVSALVEVFEREWAKRSDDLIKVLEASKTGSEGRESLDYWRPPMYPVAYIITEMDRKELGDGSESSICTKLRQKTQYAFSRVHGAYLERERLTLFYEDKEAEKDARHRKDEIIRLLNLSTKTSVARSEFWTVVDGSHVKNLRSRCPQPKDQIHEWSRENNIEITVARWEMGQLLLGLLHMSEAREVLYRNLTLSGISVHVRPFKLQCNPLFCKRCGKAGEFQNKCTSKEPICGLCAKKHLAGYCQAWRDKSERHCNNCGEDGHGVRDRECRAAGSVAEWKKADAVNPIPDWAPGERRPVAHQVGVMRHFRDSVPDSQGHEEEKTETEAQSKKKKRTSGQAQSSARKGKQKQNTKRPEVTAGDSDGNNEDEVVQNYGLEEASDIDSDHARRVPSFSVDISELGEQGGSIEVAATPDVDWETAGETDMESNVSFISETSTGSKRRLGELVSQKNKRRATNKSISRSDPLPPRSRRDGLRNSKRVTESTQVS

SEQ ID NO: 6607 - DNA, 982 bp, Muscodor strobelii; identical to SEQ ID NO: 6604
  misc_feature: SGI EST ID NO. CUFF.16496.0
  misc_feature: Variant of the nucleotide sequence at SEQ ID NO 6605

SEQ ID NO: 6608 - DNA, 1185 bp, Muscodor strobelii
  misc_feature: SGI cDNA ID NO. 561948
  misc_feature: Elevated expression when VOC is produced
  misc_feature: Encodes the peptide sequence at SEQ ID NO 6609
atgcggcctatcttaagcttcctgttcctcaccctaatatcccatccctacagtgcacaagccgtcgacgggccaattttcatatgtcccttaccacgctgcgcatgtccattagtcgaaagagcaacagctcccgccgtcggtctcggacttgaactcggatacggcactgcatcaataaaatacaacaacggaacaatcctccccgtggccaagatagatggctcaccgcaatacatcgacctaatgaaacactgcgccacgagtcctattgagcgcatgtccgacggatctcgtacacctcccggggtagacgaacatgacatcagcacgcgaaatactttcttcatataccatacgaaacgttgggttcgcaaacttctattcctaccctcgactaccgaaatcggcatcctagcagatatggtcgcccaactacgtcgagaagccgaggttttcctcggacatcaagtgaaaggcgtagcgatatcatcacctgacagggtccgacttacagtttatgaaatcagggatatgctggattatttatggattgaagatctagtctctgaaaagaagaaaactctatttgatcggttgtacgctttgccggccgccgctgcgggatatggcggtgggctttgtgcgagttatacggatgcttatgcttgttatagggaggaacatcatttcccgagtaaatgggttttacagcttgattttagtcgtcagggtttgacgggcgcgatgcagcagataagtactgcgaggagctggcaggccagtgttgatttcgttgatttagcgttgggaattgaccacagcccagctgaagatacaaagaaggagcaagactattggcatgatgttgaaacgaggattcgggagtttgcagaggcgaatcataacccggaaaagctgtatctgacgggtgagagtgctgccgagccgcgctttctagaagcggtgagagatgcgcttggcgacattgtttcgtctccagtgttggagattttgaacgacgctgcgtcgacggcgaatccggagatggttacattcgtcacttctatgggagcggccgagttcgcgaaacgaagacaggaaggtatggcgcattgtcaactcccagacgaatgcagcgggaggggagctttgcgagatactcgacttggggaggagttgtga

SEQ ID NO: 6609 - protein, 394 aa, Muscodor strobelii
  misc_feature: SGI Peptide ID NO. 561948
  misc_feature (1)..(379): NCBI GI: 240282374 Blast Desc: conserved [Ajellomyces capsulatus H143]
  misc_feature (1)..(379): NCBI GI: 154274193 Blast Desc: [Ajellomyces capsulatus NAm1] gi|150415556|gb|EDN10909.1| [Ajellomyces capsulatus NAm1]
  misc_feature (35)..(394): NCBI GI: 255940206 Blast Desc: [Penicillium chrysogenum Wisconsin 54-1255] gi|211585495|emb|CAP93198.1| [Penicillium chrysogenum Wisconsin 54-1255]
  misc_feature (21)..(392): NCBI GI: 256722443 Blast Desc: NECHADRAFT_77205 [Nectria haematococca mpVI 77-13-4]
  misc_feature (121)..(379): NCBI GI: 116196150 Blast Desc: [Chaetomium globosum CBS 148.51] gi|88180586|gb|EAQ88054.1| [Chaetomium globosum CBS 148.51]
  misc_feature (171)..(385): NCBI GI: 226287652 Blast Desc: conserved [Paracoccidioides brasiliensis Pb18]
  misc_feature (125)..(385): NCBI GI: 226279518 Blast Desc: conserved [Paracoccidioides brasiliensis Pb01]
  misc_feature (38)..(368): NCBI GI: 169608069 Blast Desc: SNOG_07101 [Phaeosphaeria nodorum SN15] gi|160701553|gb|EAT85752.2| SNOG_07101 [Phaeosphaeria nodorum SN15]
  misc_feature (41)..(95): NCBI GI: 169599683 Blast Desc: SNOG_02665 [Phaeosphaeria nodorum SN15] gi|111068276|gb|EAT89396.1| SNOG_02665 [Phaeosphaeria nodorum SN15]
  misc_feature: Useful for introducing or modulating the production of volatile compounds
MRPILSFLFLTLISHPYSAQAVDGPIFICPLPRCACPLVERATAPAVGLGLELGYGTASIKYNNGTILPVAKIDGSPQYIDLMKHCATSPIERMSDGSRTPPGVDEHDISTRNTFFIYHTKRWVRKLLFLPSTTEIGILADMVAQLRREAEVFLGHQVKGVAISSPDRVRLTVYEIRDMLDYLWIEDLVSEKKKTLFDRLYALPAAAAGYGGGLCASYTDAYACYREEHHFPSKWVLQLDFSRQGLTGAMQQISTARSWQASVDFVDLALGIDHSPAEDTKKEQDYWHDVETRIREFAEANHNPEKLYLTGESAAEPRFLEAVRDALGDIVSSPVLEILNDAASTANPEMVTFVTSMGAAEFAKRRQEGMAHCQLPDECSGRGALRDTRLGEEL

SEQ ID NO: 6610 - DNA, 1597 bp, Muscodor strobelii
  misc_feature: SGI EST ID NO. CUFF.16493.0
  misc_feature: Variant of the nucleotide sequence at SEQ ID NO 6608
cgccaacatccaacatgcacaccttaccgtccatttccacacctctcatcatctgtaactcaacttagtcctttgaaatcgctattacttcggacctacaatcgcacaacatcccatgctcacacaatcttgacaatgcggcctatcttaagcttcctgttcctcaccctaatatcccatccctacagtgcacaagccgtcgacgggccaattttcatatgtcccttaccacgctgcgcatgtccattagtcgaaagagcaacagctcccgccgtcggtctcggacttgaactcggatacggcactgcatcaataaaatacaacaacggaacaatcctccccgtggccaagatagatggctcaccgcaatacatcgacctaatgaaacactgcgccacgagtcctattgagcgcatgtccgacggatctcgtacacctcccggggtagacgaacatgacatcagcacgcgaaatactttcttcatataccatacgaaacgttgggttcgcaaacttctattcctaccctcgactaccgaaatcggcatcctagcagatatggtcgcccaactacgtcgagaagccgaggttttcctcggacatcaagtgaaaggcgtagcgatatcatcacctgacagggtccgacttacagtttatgaaatcagggatatgctggattatttatggattgaagatctagtctctgaaaagaagaaaactctatttgatcggttgtacgctttgccggccgccgctgcgggatatggcggtgggctttgtgcgagttatacggatgcttatgcttgttatagggaggaacatcatttcccgagtaaatgggttttacagcttgattttagtcgtcagggtttgacgggcgcgatgcagcagataagtactgcgaggagctggcaggccagtgttgatttcgttgatttagcgttgggaattgaccacagcccagctgaagatacaaagaaggagcaagactattggcatgatgttgaaacgaggattcgggagtttgcagaggcgaatcataacccggaaaagctgtatctgacgggtgagagtgctgccgagccgcgctttctagaagcggtgagagatgcgcttggcgacattgtttcgtctccagtgttggagattttgaacgacgctgcgtcgacggcgaatccggagatggttacattcgtcacttctatgggagcggccgagttcgcgaaacgaagacaggaaggtatggcgcattgtcaactcccagacgaatgcagcgggaggggagctttgcgagatactcgacttggggaggagttgtgatgcatagttggtatggctgtgctcacatattttacatgatgaagcggacggttttctcgcaatatcagtctcttttcggcttacttagctggattggatgtctgcgagacactgtcttctccgtaaagcaacactgttaggacagggccctcgtcagtctactcccgtgactctacacatgtaaatacttggagatactctggagatgaccctcgaactcaataggaaaggtatagaatatgtgtggcgttaaaagacccaagaatctgcaataaac

SEQ ID NO: 6611 - DNA, 2163 bp, Muscodor strobelii
  misc_feature: SGI cDNA ID NO. 561949
  misc_feature: Encodes the peptide sequence at SEQ ID NO 6612
atggctctcgaagctcccttgagatcgtcaacggggagtataatatccagcttctcgccacacccagacatgtccgtatcttcgccggactcgccagctattcagttcccatttcgcccgatgtcttcatcatcctcggaacatcacgcgcttcgacctttgtctggtatggctggggcccggtcatcacccgcccctatgcagctcttgagccctagcgatatagtcggtccttcgccggtaacatcagttgggacggaggtgacggagattgatgatgaagtgtcagaggaagctgtatccgtctccagtgcagccaatccagaacctcagcctcagctcctaatgctgaagaccaacatctccgaccagatccgacagagtgcaagcgaagaagcaatttcggtaattcatgctcctgagagcttccacagttgggccggatccgagacaacctcgaggcagtcggagtcttcgacgcagcgaccttcaccaagaagctcaccgaaatctgaatatacaaattcaccccctaatgatcgtgcatccaagacaaagtctatggggctccccacgccacctcctttgtccacagatgtgaaaccagtgcgctatagtcttgacagtgccacgcccagggcgcaaaacctccaggaagttctcagcgaggccagaatccgatccagcagtaccagcagcttggaactcattcccgaaaccaaagaacccgaaacagatgtagaaccagatcttgaaagctacgacgacgaagattacactactcctgtccatacggaagttcgagaggatatggaaattagatcactacagacagctttgcaagaatgctggaccctttgtaatactctcgccagcctgagtactcatcatcgagaaagggtatttagtacttcgggcactcccgatgggcatgaaaaggcatggaagtgttgctggaaactgtgccaacggctctacgataaccgagatgaagtcgatgagtccttcaatgtgaggattaacttggacctgtgccgagacttctgtcaagcgctttttgacgtgcggtctcgcaaggacgaaattgctgactccgtcctgcgcgtgagcttcgaattgaatactcacttatatagcgcacaagacaatcgcaacttgccggaagctttccgggagcggactctggatttctacatcactttatgccacagactgatgaagcagcgagcggatgtggcagaggagacagactcgctactccgtgcttgttggtcactcgcggaaatgctttttaatctccgacagaatcggagagatgggagagcaccagacgaggaattgctcggctctgctgtacaagcatgctgggaactttgtgatattttccgtgagggttggacctcaattcggccggataggggcactccacggccgagccacactaacttctttacacacaaccgagactctgatacggatgcccgtgcaccgagcaggcaatcgaatcggtcgaaacatggaagcgtgaagcgagactctacagagaagcctcgaaaaccacctccagtcccagaaacgccagtgaccgaattcgaagatactcccatttcgccagacagccagtccccgcaggtacccaatattctagtattgggaggcggagaaggtagcaataggggtgggcgctggtccagtaatgcttcgaacctgtccagttactctcaaagtagtcagcggacatccagtactgcaacaactgctactgcagcagaagacatcaacgttacccgtgtcaagacgctcatactaaaagcggccatgaacgtgggattctcccgagacgtaacatcagacggtcatagcagtgtttcactgcaatctttcgttaaggccctaccagtagggtcctttgggccatcgacaacacacaccactctgcttcagaactataagagcctggttggagccgattcttcattccgccaagcctcaaccttaccgcagcggggcaagcgagtttcagctgccgacgtagcaaagagtgtcaattatatgacacatcgatcgaaccagtacaatttcttgaaggacttattcagatttgtattcggtttcccgcctgaagaggccgaatcgcggaagagtgtcagcattgctgtctaa

SEQ ID NO: 6612 - protein, 720 aa, Muscodor strobelii
  misc_feature: SGI Peptide ID NO. 561949
  misc_feature (1)..(720): NCBI GI: 171695058 Blast Desc: protein product [Podospora anserina] gi|170947771|emb|CAP59934.1| protein product [Podospora anserina]
  misc_feature (1)..(720): NCBI GI: 46108016 Blast Desc: FG00890.1 [Gibberella zeae PH-1]
  misc_feature (116)..(720): NCBI GI: 85116185 Blast Desc: NCU02606 [Neurospora crassa OR74A] gi|28926809|gb|EAA35773.1| conserved [Neurospora crassa OR74A] gi|38567164|emb|CAE76458.1| [Neurospora crassa]
  misc_feature (1)..(720): NCBI GI: 154321543 Blast Desc: BC1G_01646 [Botryotinia fuckeliana B05.10] gi|150852184|gb|EDN27376.1| BC1G_01646 [Botryotinia fuckeliana B05.10]
  misc_feature (1)..(720): NCBI GI: 256734715 Blast Desc: [Nectria haematococca mpVI 77-13-4]
  misc_feature (194)..(720): NCBI GI: 116182150 Blast Desc: CHGG_01703 [Chaetomium globosum CBS 148.51] gi|88186000|gb|EAQ93468.1| CHGG_01703 [Chaetomium globosum CBS 148.51]
  misc_feature (236)..(720): NCBI GI: 145613970 Blast Desc: MGG_11261 [Magnaporthe grisea 70-15] gi|145020970|gb|EDK05099.1| MGG_11261 [Magnaporthe grisea 70-15]
  misc_feature (237)..(720): NCBI GI: 261355226 Blast Desc: conserved [Verticillium albo-atrum VaMs.102]
  misc_feature (135)..(718): NCBI GI: 154281273 Blast Desc: [Ajellomyces capsulatus NAm1] gi|150411628|gb|EDN07016.1| [Ajellomyces capsulatus NAm1]
  misc_feature (60)..(718): NCBI GI: 240274243 Blast Desc: conserved [Ajellomyces capsulatus H143]
MALEAPLRSSTGSIISSFSPHPDMSVSSPDSPAIQFPFRPMSSSSSEHHALRPLSGMAGARSSPAPMQLLSPSDIVGPSPVTSVGTEVTEIDDEVSEEAVSVSSAANPEPQPQLLMLKTNISDQIRQSASEEAISVIHAPESFHSWAGSETTSRQSESSTQRPSPRSSPKSEYTNSPPNDRASKTKSMGLPTPPPLSTDVKPVRYSLDSATPRAQNLQEVLSEARIRSSSTSSLELIPETKEPETDVEPDLESYDDEDYTTPVHTEVREDMEIRSLQTALQECWTLCNTLASLSTHHRERVFSTSGTPDGHEKAWKCCWKLCQRLYDNRDEVDESFNVRINLDLCRDFCQALFDVRSRKDEIADSVLRVSFELNTHLYSAQDNRNLPEAFRERTLDFYITLCHRLMKQRADVAEETDSLLRACWSLAEMLFNLRQNRRDGRAPDEELLGSAVQACWELCDIFREGWTSIRPDRGTPRPSHTNFFTHNRDSDTDARAPSRQSNRSKHGSVKRDSTEKPRKPPPVPETPVTEFEDTPISPDSQSPQVPNILVLGGGEGSNRGGRWSSNASNLSSYSQSSQRTSSTATTATAAEDINVTRVKTLILKAAMNVGFSRDVTSDGHSSVSLQSFVKALPVGSFGPSTTHTTLLQNYKSLVGADSSFRQASTLPQRGKRVSAADVAKSVNYMTHRSNQYNFLKDLFRFVFGFPPEEAESRKSVSIAV

SEQ ID NO: 6613 - DNA, 3748 bp, Muscodor strobelii
  misc_feature: SGI EST ID NO. CUFF.16512.0
  misc_feature: Variant of the nucleotide sequence at SEQ ID NO 6611
aaaaaaaaaaaccatgagtcaattgcacaaccacatatctcgatttgcgaaaaattgcctggacgaaacattggcacgaaagagcctccgtgcgacctcagcgtccttgagtacatacaggtctcgtctttgtgctcttgttgctctcccccccgttcatatctcccccaatcttgccggctcgcttcttccttcgttcagtctttgctagtcgcatcaaacgcgctagaccaagtgcgcgccctagtgtatgtgtcgaataattaattacgcccgtgccttctgacttcgagactactgtcgacttcatacacttacctatgtatgtctctgtcctaaaggatctttagccctggccctgctagttttcaaccaccgccgagcctgcttggcatccgcgggtgaactccacgctcgttctgtagaggttctatcacggtagcccgtttgggttacaatactacggtggagctcccctcgtcccttgtcctttctcatcgtcgttcgacctcgaccgcgagcgcatgcccctcttcctaagcatcgttcaaccttaaaccgttttcctttagtgctttcgctctctggtagagctcctataatctttctggcgcggtcgtaaattgaaaaaggcctacgcgatcaccttgaccttctagttccagagctctgggacaggtctaatctgagagagccagccttcgccctggacaccgcggcgcctctgctttacgaccataatctagcttccgcgcttgttcctgttgctcaacccattgtttccgacattcttcttcaatcgcaaccctaatcaaccgcaggtgctctccattatttgcaaatatttgcagtggtgttccccctctaacagccgcgctttcaacgggttcagagcctctctcaagcgcttggagacgcgcgattgagcctgacctgaagcgccttttgacgtactccaccgacactgccgacctacgtcgcgaccgcgtcacgataccttccgttcgtcatggctctcgaagctcccttgagatcgtcaacggggagtataatatccagcttctcgccacacccagacatgtccgtatcttcgccggactcgccagctattcagttcccatttcgcccgatgtcttcatcatcctcggaacatcacgcgcttcgacctttgtctggtatggctggggcccggtcatcacccgcccctatgcagctcttgagccctagcgatatagtcggtccttcgccggtaacatcagttgggacggaggtgacggagattgatgatgaagtgtcagaggaagctgtatccgtctccagtgcagccaatccagaacctcagcctcagctcctaatgctgaagaccaacatctccgaccagatccgacagagtgcaagcgaagaagcaatttcggtaattcatgctcctgagagcttccacagttgggccggatccgagacaacctcgaggcagtcggagtcttcgacgcagcgaccttcaccaagaagctcaccgaaatctgaatatacaaattcaccccctaatgatcgtgcatccaagacaaagtctatggggctccccacgccacctcctttgtccacagatgtgaaaccagtgcgctatagtcttgacagtgccacgcccagggcgcaaaacctccaggaagttctcagcgaggccagaatccgatccagcagtaccagcagcttggaactcattcccgaaaccaaagaacccgaaacagatgtagaaccagatcttgaaagctacgacgacgaagattacactactcctgtccatacggaagttcgagaggatatggaaattagatcactacagacagctttgcaagaatgctggaccctttgtaatactctcgccagcctgagtactcatcatcgagaaagggtatttagtacttcgggcactcccgatgggcatgaaaaggcatggaagtgttgctggaaactgtgccaacggctctacgataaccgagatgaagtcgatgagtccttcaatgtgaggattaacttggacctgtgccgagacttctgtcaagcgctttttgacgtgcggtctcgcaaggacgaaattgctgactccgtcctgcgcgtgagcttcgaattgaatactcacttatatagcgcacaagacaatcgcaacttgccggaagctttccgggagcggactctggatttctacatcactttatgccacagactgatgaagcagcgagcggatgtggcagaggagacagactcgctactccgtgcttgttggtcactcgcggaaatgctttttaatctccgacagaatcggagagatgggagagcaccagacgaggaattgctcggctctgctgtacaagcatgctgggaactttgtgatattttccgtgagggttggacctcaattcggccggataggggcactccacggccgagccacactaacttctttacacacaaccgagactctgatacggatgcccgtgcaccgagcaggcaatcgaatcggtcgaaacatggaagcgtgaagcgagactctacagagaagcctcgaaaaccacctccagtcccagaaacgccagtgaccgaattcgaagatactcccatttcgccagacagccagtccccgcaggtacccaatattctagtattgggaggcggagaaggtagcaataggggtgggcgctggtccagtaatgcttcgaacctgtccagttactctcaaagtagtcagcggacatccagtactgcaacaactgctactgcagcagaagacatcaacgttacccgtgtcaagacgctcatactaaaagcggccatgaacgtgggattctcccgagacgtaacatcagacggtcatagcagtgtttcactgcaatctttcgttaaggccctaccagtagggtcctttgggccatcgacaacacacaccactctgcttcagaactataagagcctggttggagccgattcttcattccgccaagcctcaaccttaccgcagcggggcaagcgagtttcagctgccgacgtagcaaagagtgtcaattatatgacacatcgatcgaaccagtacaatttcttgaaggacttattcagatttgtattcggtttcccgcctgaagaggccgaatcgcggaagagtgtcagcattgctgtctaatgccatggtacatcacatcggatcctctcgtacacggccggtcatggacggcacacgctgggtatgaaacacaaatccagtcaagtgatactatcacactgccggccttacggaaacaaacaaagtaacgaaaaaacgtaaaagcacaacgccgatctcgacaaataagaagataaacatggggatgaagactctagatggcttttttcatatgttatgtgcccttggctaaagatacccccttcgttgatcagcaggcgcagtttcatacttacagatttggggacggaggttatctattttggagtccaatccatatctaaaagacactcagtgttcacgcatctatcacgagctacgactacatgtcagatttttgtttcgatgttatggagatgctgtgttcaattatacttcagaggcttagggccaaaggggatggatgtgtgagactaagattagggtagatgtgatcccttggtagtgatctagatgttgaatggtaatgtggctataatcgcgctgatatgctatctcgagacacttatctacctgaataccattctagccgacgta

SEQ ID NO: 6614 - DNA, 237 bp, Muscodor strobelii
  misc_feature: SGI cDNA ID NO. 561950
  misc_feature: Encodes the peptide sequence at SEQ ID NO 6615
atgattatcccaatccgctgcttctcctgcggcaaggtcaccggagatctatgggagcgcttcctgaagcatatagacgagggctctactgatggcgacgctatggacaagctgggcctcaagcgatactgctgccgacgcatggtcatgacccacgttgacctgattgagaagcttctcaagtacactcccgacggccgcaacgagaagaaactccagctcgcacgcgacgagtag

SEQ ID NO: 6615 - protein, 78 aa, Muscodor strobelii
  misc_feature: SGI Peptide ID NO. 561950
  misc_feature (1)..(60): Pfam Id: PF01194 Pfam Desc: RNA polymerases N / 8 kDa subunit
  misc_feature (1)..(75): NCBI GI: 261355224 Blast Desc: DNA-directed RNA polymerases I/II/III subunit 10 [Verticillium albo-atrum VaMs.102]
  misc_feature (1)..(74): NCBI GI: 85116181 Blast Desc: DNA-directed RNA polymerases I/II/III subunit 10 [Neurospora crassa OR74A] gi|28926808|gb|EAA35772.1| DNA-directed RNA polymerases I/II/III subunit 10 [Neurospora crassa OR74A] RNA
  misc_feature (1)..(76): NCBI GI: 116182146 Blast Desc: CHGG_01701 [Chaetomium globosum CBS 148.51] gi|88185998|gb|EAQ93466.1| CHGG_01701 [Chaetomium globosum CBS 148.51]
  misc_feature (1)..(78): NCBI GI: 145613978 Blast Desc: DNA-directed RNA polymerase II chain RPB10, [Magnaporthe grisea 70-15] gi|145020974|gb|EDK05103.1| DNA-directed RNA polymerase II chain RPB10, [Magnaporthe grisea
  misc_feature (1)..(74): NCBI GI: 226295021 Blast Desc: DNA-directed RNA polymerases N/8 kDa subunit superfamily protein [Paracoccidioides brasiliensis Pb18]
  misc_feature (1)..(75): NCBI GI: 171695056 Blast Desc: protein product [Podospora anserina] gi|170947770|emb|CAP59933.1| protein product [Podospora anserina]
  misc_feature (1)..(74): NCBI GI: 154321539 Blast Desc: BC1G_01644 [Botryotinia fuckeliana B05.10] gi|150852182|gb|EDN27374.1| BC1G_01644 [Botryotinia fuckeliana B05.10]
  misc_feature (1)..(74): NCBI GI: 261195851 Blast Desc: DNA-directed RNA polymerase N/8 kDa subunit [Ajellomyces dermatitidis SLH14081] gi|225678629|gb|EEH16913.1| DNA-directed RNA polymerases I/II/III subunit 10 brasiliensis RNA
  misc_feature (1)..(74): NCBI GI: 119489458 Blast Desc: DNA-directed RNA polymerases N/8 kDa subunit superfamily [Neosartorya fischeri NRRL 181] gi|121709043|ref|XP_001272288.1| DNA-directed RNA polymerases N/8
  misc_feature (1)..(74): NCBI GI: 259485533 Blast Desc: TPA: DNA-directed RNA polymerases N/8 kDa subunit superfamily (AFU_orthologue; AFUA_7G02620) [Aspergillus nidulans FGSC A4]
  misc_feature (1)..(64): SWISSPROT Homolog: EC 2.7.7.6 DNA-directed RNA polymerase
MIIPIRCFSCGKVTGDLWERFLKHIDEGSTDGDAMDKLGLKRYCCRRMVMTHVDLIEKLLKYTPDGRNEKKLQLARDE

SEQ ID NO: 6616 - DNA, 943 bp, Muscodor strobelii
  misc_feature: SGI EST ID NO. CUFF.16506.0
  misc_feature: Variant of the nucleotide sequence at SEQ ID NO 6614
gccgttacctggaatctaccacttgaaatttttggggacggctccaaagactcgatcggacgtgcatctcgacatcttcgccttgacgccgctctttgtctcgacacatcccgcccctcgcacatcacaacgtccctccgacacagatcgcattgactttctcgacatacgcggctaccatagatcaccatgattatcccaatccgctgcttctcctgcggcaaggtcaccggagatctatgggagcgcttcctgaagcatatagacgagggctctactgatggcgacgctatggacaagctgggcctcaagcgatactgctgccgacgcatggtcatgacccacgttgacctgattgagaagcttctcaagtacactcccgacggccgcaacgagaagaaactccagctcgcacgcgacgagtagacccaccaccatggcccacagcccgaggcgtagagtacgaacgagaagaaaagaaattgcattacaaggcgtttggttgagcaaggggtttcacaatggcgttaggtcccgacgaggtcaatatcctctttttcttacctgcgagacgagacgaggaccggagcagcagcccttatatctccatacatccgcaacggactgcgaggcgagactaagcggaatctgccttgacaaaagtcaagccaagaaagggtcttgcaaggtctatataaccccaggtcttgattcctcgtcgcaaggcggtcaagagtggattgctgctcggcggctattgatgacatgttactggcatgaacaatagtcgcgcataagactagtctgctatacgaatagatgccgctcgtactttctagctcgtctgatcgcgtctaatctttctcgattgccgcgtgttttatccctggtggccgtttttcatggccttctaagcgccagacgcggtagactttcattgata

SEQ ID NO: 6617 - DNA, 1089 bp, Muscodor strobelii
  misc_feature: SGI cDNA ID NO. 561951
  misc_feature: Elevated expression when VOC is produced
  misc_feature: Encodes the peptide sequence at SEQ ID NO 6618
atgccatttggccgcttcgcagctgagtttggcttcatctccatgccatccgtcgaatcatggcgtggggctatcgtcgaggatgatttctatctcgagtcgcccagcttcatagatcacaatcgacattacgacttcttctcaaacgagacggatcccgtcgtgctatccgaggctggactagcagatatgaccacagcagccaagctttggtatcctattccttcttttagcgaccccgtagccaatttcagcgcctggtgttacacgactcaagtcttccaggctgataaatatgctaacgagattgccttctatcgacggggctccggcttgcaagaaagacagcttggtgctctttactggcagttgaatgacgtctgggtggggacgacctggtctgtggtagatatcaatcaccgcacaaaagccacataccacgctacgaaggacgtttttaattcagtgatcgtctggccgttctatgatgtggatactgatgtgctagatatctgggttgtgtctgataaatggaccgacgtctctggcacggtgacgcagcaatggctcaattgggccggtgatgctatcaagggtcctgtatccaatatgatcagcaattctactgcgaccgcgagcatcccattcaaggtcgggtctatcaacgcgacacatatcgccagctatgccaacttgtcttccacgctcggtggcgcggaggctatgacagatgctctcatgtccttgtccctgacgactgaccaaggcgacgagcacactgcatggtttcacgctgcatctttgcagaagagcgctcttaaggaccccgagctgaagatagagcagatagggacggcaggtgacgataatgtggcttttacaatcacatcgaattctgccgttgctgcatgggtctggatcaatcatccgtcgaccgtccggggccgcttcgaccaaaatgcattctggttagccaaaggtgaaagcaagactgtggtcttcaaggtgtggcaggattatactgatgatggttcatggactaaggaagtgacagtccggtcaatgtgggataacacagtgaaagattga

SEQ ID NO: 6618 - protein, 362 aa, Muscodor strobelii
  misc_feature: SGI Peptide ID NO. 561951
  misc_feature (2)..(362): NCBI GI: 121699639 Blast Desc: beta-mannosidase [Aspergillus clavatus NRRL 1] gi|119396230|gb|EAW06662.1| beta-mannosidase [Aspergillus clavatus NRRL 1]
  misc_feature (2)..(361): NCBI GI: 24638007 Blast Desc: MANBA_ASPNG RecName: Full=Beta-mannosidase; AltName: Full=Mannanase; Short=Mannase; Flags: Precursor gi|6624916|emb|CAB63902.1| beta-mannosidase [Aspergillus niger]
  misc_feature (2)..(361): NCBI GI: 169769194 Blast Desc: [Aspergillus oryzae RIB40] gi|83766925|dbj|BAE57065.1| protein product [Aspergillus oryzae]
  misc_feature (2)..(361): NCBI GI: 238501640 Blast Desc: beta-mannosidase [Aspergillus flavus NRRL3357] gi|220692291|gb|EED48638.1| beta-mannosidase [Aspergillus flavus NRRL3357]
  misc_feature (2)..(357): NCBI GI: 67522571 Blast Desc: AN1742.2 [Aspergillus nidulans FGSC A4] gi|40744872|gb|EAA64028.1| AN1742.2 [Aspergillus nidulans FGSC A4] gi|259487087|tpe|CBF85479.1| TPA: beta-1,4-mannosidase FGSC
  misc_feature (2)..(362): NCBI GI: 242773041 Blast Desc: beta-mannosidase [Talaromyces stipitatus ATCC 10500] gi|218721777|gb|EED21195.1| beta-mannosidase [Talaromyces stipitatus ATCC 10500]
  misc_feature (2)..(362): NCBI GI: 119470056 Blast Desc: beta-mannosidase [Neosartorya fischeri NRRL 181] gi|119406152|gb|EAW16103.1| beta-mannosidase [Neosartorya fischeri NRRL 181]
  misc_feature (2)..(362): NCBI GI: 159124335 Blast Desc: beta-mannosidase [Aspergillus fumigatus A1163]
  misc_feature (2)..(362): NCBI GI: 70991849 Blast Desc: beta-mannosidase [Aspergillus fumigatus Af293] gi|66848406|gb|EAL88735.1| beta-mannosidase [Aspergillus fumigatus Af293]
  misc_feature (2)..(357): NCBI GI: 212531489 Blast Desc: beta-mannosidase [Penicillium marneffei ATCC 18224] gi|210071265|gb|EEA25354.1| beta-mannosidase [Penicillium marneffei ATCC 18224]
  misc_feature (2)..(361): SWISSPROT Homolog: EC 3.2.1.25 Beta-mannosidase
  misc_feature: Useful for introducing or modulating the production of volatile compounds
MPFGRFAAEFGFISMPSVESWRGAIVEDDFYLESPSFIDHNRHYDFFSNETDPVVLSEAGLADMTTAAKLWYPIPSFSDPVANFSAWCYTTQVFQADKYANEIAFYRRGSGLQERQLGALYWQLNDVWVGTTWSVVDINHRTKATYHATKDVFNSVIVWPFYDVDTDVLDIWVVSDKWTDVSGTVTQQWLNWAGDAIKGPVSNMISNSTATASIPFKVGSINATHIASYANLSSTLGGAEAMTDALMSLSLTTDQGDEHTAWFHAASLQKSALKDPELKIEQIGTAGDDNVAFTITSNSAVAAWVWINHPSTVRGRFDQNAFWLAKGESKTVVFKVWQDYTDDGSWTKEVTVRSMWDNTVKD

SEQ ID NO: 6619 - DNA, 3850 bp, Muscodor strobelii
  misc_feature: SGI EST ID NO. CUFF.16518.0
  misc_feature: Variant of the nucleotide sequence at SEQ ID NO 6617
ctgaccccactatctatgtacttcaattgccctgatgagatgccagactgatgccataggggaagtatggatgcaatttcattcacttgcttcgatatattcacatgaaaatacttaagtggtctatcccaattgctagaatatgattgttattatttgtatgccccctagtgacaatgacttttcgaatgctgatgcaggagaaagcattatgcagtgtcttcatacagtgggcatggaggctagaagagcgcacgccaattgacagacactatgtgtctaacttcatacatgtagattacgtaggctgaacgcaatttcaattcaaaaaaaaaaaaaaaaaaataaggtagggtcatgtattcttgggtcgcaacttgattattactgaagtattgagcctctgctgacatttgacccacctgttagatgcagggaccaagcaaccctggaagaatggcgacctcactccaggcagccttcttgctgctgccaactttgaatgcgagtgcgaggcaataggtatgaaaagctgctgaactacatcaatttgtgtcttaggcaatgcgaagcgacgagtattccgttgctgccgcgattgagatgacgtagaggaggctgaggcaggcggtggcctgcagatatttgctgcatcatctgtaatatgcagttggagagaaattgggggcgtcaggtttattccagtcccaacatggaaaggacttgatgatcggatttgaagatgagcctaagatccaggaagaacgtggaaatgtgaccctagaccatcccgagtatatatgtccgctcgcgcggcccatgtcaccatgcaggagagttctcttgtggctctggtattcagttccttcactcgctacaacaatgcgccggactgatctcctcgccgtcggagctctggcttcatccatcagtgctcaatccatccttaatttcagtgacttgaaatggtctgtcagtaatggagtgaacgttactataccagggagctttccatcgcaagctcacatcgacctactagtagctggtgttattgatgatccattatttgggtttaacgagctgaatgactattggatacaggaatcgaactggacatggacatcggatgccataacgaatatcgacaaaagtaatggcactcgaacattgattgtctttcagggccttgacaccttcgtcgaaatcaagttgtgcaacacaactgtagcgaatgtagcaaatcagtttcgacaattcaccttcgatgttactgctatactttcgcaatgtgtcgggacgccgacattgagcctcaactttgggtctgccacgaagatagtggccgagatcgccaaaacgggaccagacattatcaacgaggcaaacgcgttgaccaacgcgcacaaatatccagatgccgtctacgcgcgcaagcagcaaagtgacttcggatgggattggagccctctgctatcccctgcaggaccttggcgacctgcatatctggtgcaaagaaaactgaacgatcctgtctacatctcaaatactattgtagacatctatcgcaaaggccagatgaacaacttacctccagatcagagtcagccctggatattcaacgcaagtgtggatttccttggaacattgccatctgacgctgtcatgaatcttgaattgaaggacatggctggaaatataatcaaagagactcgcttggatggtaccacacaaaacaatatgaccatcacaggcagtaccgtgatcgatgaagcagtcgatatgtggtggcctaatggatatggagcccagaatctctataacgcaactatcactttgaaaagcaagtcttggcagaatgcagccactgtatgcaaaagagtcgggtttcgtactattgtgctgaacttaactccagttacagatgaacaacttgccaaaggtattgcaccgggttcgaattggcactttgagataaatggacatgaactatatgtcaagggttccaatctggtaccagctgatgtattttggtctcgcgttaacgacactaaaatacgcgagctgtttgaactggtcatcgagagccatcaaaacatgttacgcgtgtggtcatctggagcctatttggatgactggatctacgatctggccgatgagatgggcatcttgctgtggtccgagttccagttctccgacgcattttatccagcagaagacaatgtcctcgaggagtacgaagccgaagcctactacaacatccgccgagttaaccatcacccgagccttgcactctgggctggcgggaacgagctcgagttgttcgttgcagccctcttccaataccagccgttccctaccccagttttcgaggcttacaagaaaattttcacggaactattgatcaagtgcgtgtatgcaaatactcgatccataagctatattccgtcatcaacttatcatggatatctgagtctggatttcgactcggtgcaacctcaggtaccacgatatctgaaccaatctgagggcgaggtatacgccgataccgatacttataattatgacggttcacaagccttcaacttcacccagatgccatttggccgcttcgcagctgagtttggcttcatctccatgccatccgtcgaatcatggcgtggggctatcgtcgaggatgatttctatctcgagtcgcccagcttcatagatcacaatcgacattacgacttcttctcaaacgagacggatcccgtcgtgctatccgaggctggactagcagatatgaccacagcagccaagctttggtatcctattccttcttttagcgaccccgtagccaatttcagcgcctggtgttacacgactcaagtcttccaggctgataaatatgctaacgagattgccttctatcgacggggctccggcttgcaagaaagacagcttggtgctctttactggcagttgaatgacgtctgggtggggacgacctggtctgtggtagatatcaatcaccgcacaaaagccacataccacgctacgaaggacgtttttaattcagtgatcgtctggccgttctatgatgtggatactgatgtgctagatatctgggttgtgtctgataaatggaccgacgtctctggcacggtgacgcagcaatggctcaattgggccggtgatgctatcaagggtcctgtatccaatatgatcagcaattctactgcgaccgcgagcatcccattcaaggtcgggtctatcaacgcgacacatatcgccagctatgccaacttgtcttccacgctcggtggcgcggaggctatgacagatgctctcatgtccttgtccctgacgactgaccaaggcgacgagcacactgcatggtttcacgctgcatctttgcagaagagcgctcttaaggaccccgagctgaagatagagcagatagggacggcaggtgacgataatgtggcttttacaatcacatcgaattctgccgttgctgcatgggtctggatcaatcatccgtcgaccgtccggggccgcttcgaccaaaatgcattctggttagccaaaggtgaaagcaagactgtggtcttcaaggtgtggcaggattatactgatgatggttcatggactaaggaagtgacagtccggtcaatgtgggataacacagtgaaagattgagcaaagtaaaactaagctacagggttttttatgatagatagtgccgcaatcctctaaccgttgaaatgttgagcaataatatccacttgaatgaggatagctcacaatgaatatgagatgattagaagttttcaagtctaggttgcaggtgattgatctgggtattgac

SEQ ID NO: 6620 - DNA, 2799 bp, Muscodor strobelii
  misc_feature: SGI cDNA ID NO. 561952
  misc_feature: Elevated expression when VOC is produced
  misc_feature: Encodes the peptide sequence at SEQ ID NO 6621
atgcgccggactgatctcctcgccgtcggagctctggcttcatccatcagtgctcaatccatccttaatttcagtgacttgaaatggtctgtcagtaatggagtgaacgttactataccagggagctttccatcgcaagctcacatcgacctactagtagctggtgttattgatgatccattatttgggtttaacgagctgaatgactattggatacaggaatcgaactggacatggacatcggatgccataacgaatatcgacaaaagtaatggcactcgaacattgattgtctttcagggccttgacaccttcgtcgaaatcaagttgtgcaacacaactgtagcgaatgtagcaaatcagtttcgacaattcaccttcgatgttactgctatactttcgcaatgtgtcgggacgccgacattgagcctcaactttgggtctgccacgaagatagtggccgagatcgccaaaacgggaccagacattatcaacgaggcaaacgcgttgaccaacgcgcacaaatatccagatgccgtctacgcgcgcaagcagcaaagtgacttcggatgggattggagccctctgctatcccctgcaggaccttggcgacctgcatatctggtgcaaagaaaactgaacgatcctgtctacatctcaaatactattgtagacatctatcgcaaaggccagatgaacaacttacctccagatcagagtcagccctggatattcaacgcaagtgtggatttccttggaacattgccatctgacgctgtcatgaatcttgaattgaaggacatggctggaaatataatcaaagagactcgcttggatggtaccacacaaaacaatatgaccatcacaggcagtaccgtgatcgatgaagcagtcgatatgtggtggcctaatggatatggagcccagaatctctataacgcaactatcactttgaaaagcaagtcttggcagaatgcagccactgtatgcaaaagagtcgggtttcgtactattgtgctgaacttaactccagttacagatgaacaacttgccaaaggtattgcaccgggttcgaattggcactttgagataaatggacatgaactatatgtcaagggttccaatctggtaccagctgatgtattttggtctcgcgttaacgacactaaaatacgcgagctgtttgaactggtcatcgagagccatcaaaacatgttacgcgtgtggtcatctggagcctatttggatgactggatctacgatctggccgatgagatgggcatcttgctgtggtccgagttccagttctccgacgcattttatccagcagaagacaatgtcctcgaggagtacgaagccgaagcctactacaacatccgccgagttaaccatcacccgagccttgcactctgggctggcgggaacgagctcgagttgttcgttgcagccctcttccaataccagccgttccctaccccagttttcgaggcttacaagaaaattttcacggaactattgatcaagtgcgtgtatgcaaatactcgatccataagctatattccgtcatcaacttatcatggatatctgagtctggatttcgactcggtgcaacctcaggtaccacgatatctgaaccaatctgagggcgaggtatacgccgataccgatacttataattatgacggttcacaagccttcaacttcacccagatgccatttggccgcttcgcagctgagtttggcttcatctccatgccatccgtcgaatcatggcgtggggctatcgtcgaggatgatttctatctcgagtcgcccagcttcatagatcacaatcgacattacgacttcttctcaaacgagacggatcccgtcgtgctatccgaggctggactagcagatatgaccacagcagccaagctttggtatcctattccttcttttagcgaccccgtagccaatttcagcgcctggtgttacacgactcaagtcttccaggctgataaatatgctaacgagattgccttctatcgacggggctccggcttgcaagaaagacagcttggtgctctttactggcagttgaatgacgtctgggtggggacgacctggtctgtggtagatatcaatcaccgcacaaaagccacataccacgctacgaaggacgtttttaattcagtgatcgtctggccgttctatgatgtggatactgatgtgctagatatctgggttgtgtctgataaatggaccgacgtctctggcacggtgacgcagcaatggctcaattgggccggtgatgctatcaagggtcctgtatccaatatgatcagcaattctactgcgaccgcgagcatcccattcaaggtcgggtctatcaacgcgacacatatcgccagctatgccaacttgtcttccacgctcggtggcgcggaggctatgacagatgctctcatgtccttgtccctgacgactgaccaaggcgacgagcacactgcatggtttcacgctgcatctttgcagaagagcgctcttaaggaccccgagctgaagatagagcagatagggacggcaggtgacgataatgtggcttttacaatcacatcgaattctgccgttgctgcatgggtctggatcaatcatccgtcgaccgtccggggccgcttcgaccaaaatgcattctggttagccaaaggtgaaagcaagactgtggtcttcaaggtgtggcaggattatactgatgatggttcatggactaaggaagtgacagtccggtcaatgtgggataacacagtgaaagattga

SEQ ID NO: 6621 - protein, 932 aa, Muscodor strobelii
  misc_feature: SGI Peptide ID NO. 561952
  misc_feature (8)..(931): NCBI GI: 238501640 Blast Desc: beta-mannosidase [Aspergillus flavus NRRL3357] gi|220692291|gb|EED48638.1| beta-mannosidase [Aspergillus flavus NRRL3357]
  misc_feature (8)..(931): NCBI GI: 169769194 Blast Desc: [Aspergillus oryzae RIB40] gi|83766925|dbj|BAE57065.1| protein product [Aspergillus oryzae]
  misc_feature (10)..(927): NCBI GI: 67522571 Blast Desc: AN1742.2 [Aspergillus nidulans FGSC A4] gi|40744872|gb|EAA64028.1| AN1742.2 [Aspergillus nidulans FGSC A4] gi|259487087|tpe|CBF85479.1| TPA: beta-1,4-mannosidase FGSC
  misc_feature (16)..(932): NCBI GI: 121699639 Blast Desc: beta-mannosidase [Aspergillus clavatus NRRL 1] gi|119396230|gb|EAW06662.1| beta-mannosidase [Aspergillus clavatus NRRL 1]
  misc_feature (15)..(932): NCBI GI: 159124335 Blast Desc: beta-mannosidase [Aspergillus fumigatus A1163]
  misc_feature (15)..(932): NCBI GI: 70991849 Blast Desc: beta-mannosidase [Aspergillus fumigatus Af293] gi|66848406|gb|EAL88735.1| beta-mannosidase [Aspergillus fumigatus Af293]
  misc_feature (15)..(932): NCBI GI: 119470056 Blast Desc: beta-mannosidase [Neosartorya fischeri NRRL 181] gi|119406152|gb|EAW16103.1| beta-mannosidase [Neosartorya fischeri NRRL 181]
  misc_feature (1)..(932): NCBI GI: 242773041 Blast Desc: beta-mannosidase [Talaromyces stipitatus ATCC 10500] gi|218721777|gb|EED21195.1| beta-mannosidase [Talaromyces stipitatus ATCC 10500]
  misc_feature (1)..(927): NCBI GI: 212531489 Blast Desc: beta-mannosidase [Penicillium marneffei ATCC 18224] gi|210071265|gb|EEA25354.1| beta-mannosidase [Penicillium marneffei ATCC 18224]
  misc_feature (44)..(798): NCBI GI: 115400451 Blast Desc: beta-mannosidase precursor [Aspergillus terreus NIH2624] gi|114191480|gb|EAU33180.1| beta-mannosidase precursor [Aspergillus terreus NIH2624]
  misc_feature (23)..(931): SWISSPROT Homolog: EC 3.2.1.25 Beta-mannosidase
  misc_feature: Useful for introducing or modulating the production of volatile compounds
MRRTDLLAVGALASSISAQSILNFSDLKWSVSNGVNVTIPGSFPSQAHIDLLVAGVIDDPLFGFNELNDYWIQESNWTWTSDAITNIDKSNGTRTLIVFQGLDTFVEIKLCNTTVANVANQFRQFTFDVTAILSQCVGTPTLSLNFGSATKIVAEIAKTGPDIINEANALTNAHKYPDAVYARKQQSDFGWDWSPLLSPAGPWRPAYLVQRKLNDPVYISNTIVDIYRKGQMNNLPPDQSQPWIFNASVDFLGTLPSDAVMNLELKDMAGNIIKETRLDGTTQNNMTITGSTVIDEAVDMWWPNGYGAQNLYNATITLKSKSWQNAATVCKRVGFRTIVLNLTPVTDEQLAKGIAPGSNWHFEINGHELYVKGSNLVPADVFWSRVNDTKIRELFELVIESHQNMLRVWSSGAYLDDWIYDLADEMGILLWSEFQFSDAFYPAEDNVLEEYEAEAYYNIRRVNHHPSLALWAGGNELELFVAALFQYQPFPTPVFEAYKKIFTELLIKCVYANTRSISYIPSSTYHGYLSLDFDSVQPQVPRYLNQSEGEVYADTDTYNYDGSQAFNFTQMPFGRFAAEFGFISMPSVESWRGAIVEDDFYLESPSFIDHNRHYDFFSNETDPVVLSEAGLADMTTAAKLWYPIPSFSDPVANFSAWCYTTQVFQADKYANEIAFYRRGSGLQERQLGALYWQLNDVWVGTTWSVVDINHRTKATYHATKDVFNSVIVWPFYDVDTDVLDIWVVSDKWTDVSGTVTQQWLNWAGDAIKGPVSNMISNSTATASIPFKVGSINATHIASYANLSSTLGGAEAMTDALMSLSLTTDQGDEHTAWFHAASLQKSALKDPELKIEQIGTAGDDNVAFTITSNSAVAAWVWINHPSTVRGRFDQNAFWLAKGESKTVVFKVWQDYTDDGSWTKEVTVRSMWDNTVKD

SEQ ID NO: 6622 - DNA, 3850 bp, Muscodor strobelii; identical to SEQ ID NO: 6619
  misc_feature: SGI EST ID NO. CUFF.16518.0
  misc_feature: Variant of the nucleotide sequence at SEQ ID NO 6620

SEQ ID NO: 6623 - DNA, 2946 bp, Muscodor strobelii
  misc_feature: SGI cDNA ID NO. 561953
  misc_feature: Encodes the peptide sequence at SEQ ID NO 6624
atggttcctgtcgcggtgaatgaggcggctgccaacaagcggaagagggacgccgacgagcatgcaaaacgcaaacgaacaaaacggggacgccgctcttccgggagacccgagcctttgaacacagatgccgagaacgatgttgacggcaaagatgatattcccaacgagcaggaagatacgatgttggacctcgtgcagtccacaggccaaacctctgtcgaagtaaacggcaagggtcgtcgccacaagtcctccaaatcacggtggatagaccggagatcggagaaatggacaagatctaagcctataggaggaaagatgctcaacgtcgacccaatcctaaccgatgacgagcaacacttgatactggcctataacacctctctccaagtctactctgccgccgattcgctgctgttgcgcaagatacagctctccttccgccgcctcgagggtcgccgtgatcaaattgccgccgtgtgtccctctgctgtctcacgaaaccatctctgggttgcttcacatggtggtactatctggctcatcgattggacgaccggcaagggagctgaggctaacactctcctcgattgcgatcatctccaagacatgttcgtcgactcggtcaccatcggcgacaggaataaggacatcttgttcgtctcgggaagatggggagagaagtggcacgttatggcatgtgatatggaccgtcttaaactgctaggatctaagatcatattctcgttcgactctatcatcgacaacctcagggttactcggtctggaaatgttgtagctgcctactccggacgaaacatcattctgggcttacgacagcaaggtgcaatctcagcattggatgatctcagctttgaattcacaagtctcgatgccagtgatgacatcacatgtcttgatctgcaaataagcagccgcgttcacttaagtcgaaaatcccaaagggaggccagtgacacacccgttttggatcttgtcattggctgcgctcgaggtgctattttcgcctacaatgatctcatcccactattacaacagtcagacaagtctaaaggccgacgccaacacatacacccgcgaaagtatcattggcatcgaaaggctgttcactccgtcaaatggtctcgcgatggaaactatattctttcaggtggctcggagtctactctagtactgtggcagctggatacgcaaaaactagattttttgccgcatctgtcagcaacggtggagaacatcgtcgtctccaagactggtgccgcttatgcccttcacctagatgacaactctgccatgattctctcaaccgccgaaatgaaacctctaacctatatctcgggtatccagtcaatgctgtcaccgaaacctatctccaaagatgacagtgtgagacgtattggacagtatacacctgaccgaatgacgaaagtacctgctattgtctcgcctgccaacacatcacagatcctactctgcgttggaaacggacagcatcaaagctattctggaagcggtccgtccatgcccctgatacaagctctagatctcacgactatgcaaagtgtctcaaaacaagccttgacgcgaacaaatcctactgatgtcaacgtaacaccgaaaggccatcccattaccgagccgcgtatcactggaatgacgtattcacacgacggtcgctggcttgcgaccactgatgaatggcagccaccctcgcgcgacgtcaataatctggacgggccaccggcggaaagacgggaggtctacctgaaactttggtccgtttcgcaggagaatcagagcctggagttgatgactcgtgtgaatgcgccacatcactccgatcgaccagagccagtcttcaacattgctgctgatcccacagcagaccgttttgtcacagttggtggagatggtatggctcgcgtatggcaaccaacgataaggcagcgagatggtgtacttgtaaagggaaacaagggtcgtcaattgcacagctggacctgctcacaagctatttccctctgcggaactgagagcacaggtgagcctgatttctcgtatgacttttctcgaggatctggcgctgtagctttctccgaggacggttcggttttggtatgtgctgtggttcatgaacatggttctattgtccaagttatcgatccgttaacgggcaacatccggaactcgctcaatggtctcatcaaaggagctgtccaaggcatcgcactactgtcgtcagccctgattgtgttgtcagacgcgctaatggtatacgatttggtcttggacgagctacgatttggtatacaactacgacaagctgcagatgatgaggatggcgacgctcatggtccgggagcctcgatcatgactcacctcactgctgattttgagactgatcgatttgctgtagccatttccaggggtaaacgcgatgcttccaaggtcaagtcagaattggccatatatagtgctgacggctgcgaacccgaagcgatagagagattcccgagccctatcatatcgctgatgccgtctattggctccagcggcttcctggtccttgactcagttgcacagatctgggctatctctgaaagcaaagataccaagtctcttgcgtttgctcagccattagcagatctcggtctggactctgaaccaacaccaaacggaatcacagatacgacggcagtgttcttgcctgaagaagatgaagagcaacctagcggggatgaaatggatgttgacacggcagatacggccgatagcgatccgatataccctgtcgtcgtggcaccacagaaactggcagagctgttcgatacggctccagccttcgctatgccccctgtcgaggacatgttctatcaagtggcaaagctgttctctgccaagcccgccgtctctacgtcataa

SEQ ID NO: 6624 - protein, 981 aa, Muscodor strobelii
  misc_feature: SGI Peptide ID NO. 561953
  misc_feature (364)..(402): Pfam Id: PF00400 Pfam Desc: WD domain, G-beta repeat
  misc_feature (9)..(977): NCBI GI: 85116177 Blast Desc: NCU02604 [Neurospora crassa OR74A] gi|28926807|gb|EAA35771.1| [Neurospora crassa OR74A]
  misc_feature (8)..(976): NCBI GI: 116182144 Blast Desc: CHGG_01700 [Chaetomium globosum CBS 148.51] gi|88185997|gb|EAQ93465.1| CHGG_01700 [Chaetomium globosum CBS 148.51]
  misc_feature (12)..(981): NCBI GI: 261355223 Blast Desc: sporulation protein [Verticillium albo-atrum VaMs.102]
  misc_feature (13)..(976): NCBI GI: 256735421 Blast Desc: [Nectria haematococca mpVI 77-13-4]
  misc_feature (13)..(980): NCBI GI: 46108020 Blast Desc: FG00892.1 [Gibberella zeae PH-1]
  misc_feature (73)..(979): NCBI GI: 171695054 Blast Desc: protein product [Podospora anserina] gi|170947769|emb|CAP59932.1| protein product [Podospora anserina]
  misc_feature (10)..(981): NCBI GI: 145613980 Blast Desc: MGG_01224 [Magnaporthe grisea 70-15] gi|145020975|gb|EDK05104.1| MGG_01224 [Magnaporthe grisea 70-15]
  misc_feature (94)..(976): NCBI GI: 154321537 Blast Desc: BC1G_01643 [Botryotinia fuckeliana B05.10] gi|150852181|gb|EDN27373.1| BC1G_01643 [Botryotinia fuckeliana B05.10]
  misc_feature (46)..(716): NCBI GI: 156054012 Blast Desc: SS1G_05854 [Sclerotinia sclerotiorum 1980] gi|154703634|gb|EDO03373.1| SS1G_05854 [Sclerotinia sclerotiorum 1980]
  misc_feature (64)..(973): NCBI GI: 154281277 Blast Desc: [Ajellomyces capsulatus NAm1] gi|150411630|gb|EDN07018.1| [Ajellomyces capsulatus NAm1]
MVPVAVNEAAANKRKRDADEHAKRKRTKRGRRSSGRPEPLNTDAENDVDGKDDIPNEQEDTMLDLVQSTGQTSVEVNGKGRRHKSSKSRWIDRRSEKWTRSKPIGGKMLNVDPILTDDEQHLILAYNTSLQVYSAADSLLLRKIQLSFRRLEGRRDQIAAVCPSAVSRNHLWVASHGGTIWLIDWTTGKGAEANTLLDCDHLQDMFVDSVTIGDRNKDILFVSGRWGEKWHVMACDMDRLKLLGSKIIFSFDSIIDNLRVTRSGNVVAAYSGRNIILGLRQQGAISALDDLSFEFTSLDASDDITCLDLQISSRVHLSRKSQREASDTPVLDLVIGCARGAIFAYNDLIPLLQQSDKSKGRRQHIHPRKYHWHRKAVHSVKWSRDGNYILSGGSESTLVLWQLDTQKLDFLPHLSATVENIVVSKTGAAYALHLDDNSAMILSTAEMKPLTYISGIQSMLSPKPISKDDSVRRIGQYTPDRMTKVPAIVSPANTSQILLCVGNGQHQSYSGSGPSMPLIQALDLTTMQSVSKQALTRTNPTDVNVTPKGHPITEPRITGMTYSHDGRWLATTDEWQPPSRDVNNLDGPPAERREVYLKLWSVSQENQSLELMTRVNAPHHSDRPEPVFNIAADPTADRFVTVGGDGMARVWQPTIRQRDGVLVKGNKGRQLHSWTCSQAISLCGTESTGEPDFSYDFSRGSGAVAFSEDGSVLVCAVVHEHGSIVQVIDPLTGNIRNSLNGLIKGAVQGIALLSSALIVLSDALMVYDLVLDELRFGIQLRQAADDEDGDAHGPGASIMTHLTADFETDRFAVAISRGKRDASKVKSELAIYSADGCEPEAIERFPSPIISLMPSIGSSGFLVLDSVAQIWAISESKDTKSLAFAQPLADLGLDSEPTPNGITDTTAVFLPEEDEEQPSGDEMDVDTADTADSDPIYPVVVAPQKLAELFDTAPAFAMPPVEDMFYQVAKLFSAKPAVSTS

SEQ ID NO: 6625 - DNA, 3690 bp, Muscodor strobelii
  misc_feature: SGI EST ID NO. CUFF.16678.0
  misc_feature: Variant of the nucleotide sequence at SEQ ID NO 6623
cacgggagcccgctcgaattgcgatccagatcactatttgattcgcaatggttcctgtcgcggtgaatgaggcggctgccaacaagcggaagagggacgccgacgagcatgcaaaacgcaaacgaacaaaacggggacgccgctcttccgggagacccgagcctttgaacacagatgccgagaacgatgttgacggcaaagatgatattcccaacgagcaggaagatacgatgttggacctcgtgcagtccacaggccaaacctctgtcgaagtaaacggcaagggtcgtcgccacaagtcctccaaatcacggtggatagaccggagatcggagaaatggacaagatctaagcctataggaggaaagatgctcaacgtcgacccaatcctaaccgatgacgagcagtaagcatccagaatcagagtgcgccggaccatgctaacactgccccaagacacttgatactggcctataacacctctctccaagtctactctgccgccgattcgctgctgttgcgcaagatacagctctccttccgccgcctcgagggtcgccgtgatcaaattgccgccgtgtgtccctctgctgtctcacgaaaccatctctgggttgcttcacatggtggtactatctggctcatcgattggacgaccggcaagggagctgaggctaacactctcctcgattgcgatcatctccaagacatgttcgtcgactcggtcaccatcggcgacaggaataaggacatcttgttcgtctcgggaagatggggagagaagtggcacgttatggcatgtgatatggaccgtcttaaactgctaggatctaagatcatattctcgttcgactctatcatcgacaacctcagggttactcggtctggaaatgttgtagctgcctactccggacgaaacatcattctgggcttacgacagcaaggtgcaatctcagcattggatgatctcagctttgaattcacaagtctcgatgccagtgatgacatcacatgtcttgatctgcaaataagcagccgcgttcacttaagtcgaaaatcccaaagggaggccagtgacacacccgttttggatcttgtcattggctgcgctcgaggtgctattttcgcctacaatgatctcatcccactattacaacagtcagacaagtctaaaggccgacgccaacacatacacccgcgaaagtatcattggcatcgaaaggctgttcactccgtcaaatggtctcgcgatggaaactatattctttcaggtggctcggagtctactctagtactgtggcagctggatacgcaaaaactagattttttgccgcatctgtcagcaacggtggagaacatcgtcgtctccaagactggtgccgcttatgcccttcacctagatgacaactctgccatgattctctcaaccgccgaaatgaaacctctaacctatatctcgggtatccagtcaatgctgtcaccgaaacctatctccaaagatgacagtgtgagacgtattggacagtatacacctgaccgaatgacgaaagtacctgctattgtctcgcctgccaacacatcacagatcctactctgcgttggaaacggacagcatcaaagctattctggaagcggtccgtccatgcccctgatacaagctctagatctcacgactatgcaaagtgtctcaaaacaagccttgacgcgaacaaatcctactgatgtcaacgtaacaccgaaaggccatcccattaccgagccgcgtatcactggaatgacgtattcacacgacggtcgctggcttgcgaccactgatgaatggcagccaccctcgcgcgacgtcaataatctggacgggccaccggcggaaagacgggaggtctacctgaaactttggtccgtttcgcaggagaatcagagcctggagttgatgactcgtgtgaatgcgccacatcactccgatcgaccagagccagtcttcaacattgctgctgatcccacagcagaccgttttgtcacagttggtggagatggtatggctcgcgtatggcaaccaacgataaggcagcgagatggtgtacttgtaaagggaaacaagggtcgtcaattgcacagctggacctgctcacaagctatttccctctgcggaactgagagcacaggtgagcctgatttctcgtatgacttttctcgaggatctggcgctgtagctttctccgaggacggttcggttttggtatgtgctgtggttcatgaacatggttctattgtccaagttatcgatccgttaacgggcaacatccggaactcgctcaatggtctcatcaaaggagctgtccaaggcatcgcactactgtcgtcagccctgattgtgttgtcagacgcgctaatggtatacgatttggtcttggacgagctacgatttggtatacaactacgacaagctgcagatgatgaggatggcgacgctcatggtccgggagcctcgatcatgactcacctcactgctgattttgagactgatcgatttgctgtagccatttccaggggtaaacgcgatgcttccaaggtcaagtcagaattggccatatatagtgctgacggctgcgaacccgaagcgatagagagattcccgagccctatcatatcgctgatgccgtctattggctccagcggcttcctggtccttgactcagttgcacagatctgggctatctctgaaagcaaagataccaagtctcttgcgtttgctcagccattagcagatctcggtctggactctgaaccaacaccaaacggaatcacagatacgacggcagtgttcttgcctgaagaagatgaagagcaacctagcggggatgaaatggatgttgacacggcagatacggccgatagcgatccgatataccctgtcgtcgtggcaccacagaaactggcagagctgttcgatacggctccagccttcgctatgccccctgtcgaggacatgttctatcaagtggcaaagctgttctctgccaagcccgccgtctctacgtcataaaagctcatgcaaataataagagctgctttgcaatgactcaagacgcaaatgcggttgacgatattgcataatgacgtgagacagtcccggcattgctttacgtagcatcccgtggcggcgtggtggactatgcgcttgcgtcgcgccatgctccgactgctcgctccgcaaagcagtgccactatgagcatgcaaaatgatgagaaacaaactcggcataagcgggctgaaggcactcaaatagtctgccaagccatcctgtctcatcgcaagtattaatagatgcatcgctcgctgtggttaccggcacagcgagagccagccagctacgtgtctcgagtcacattcatctagcgccgcgaggttatttagaggcataaggcgttcgctagcatatcagagagacaggcattatatggaacgacatgtacatagcagagccagagaagctggacccaggcataatatacccttagcatgatctaaggtctacaaattcaagagggacatttgtactgttctgccacctatgactacctgaaggagcagagtgtgtctgaaaggctgaaatgccatatttgttaaattttagctgttatgctaatgttgagtaaacctccaaagaataaaatatatgccagacccgt

SEQ ID NO: 6626 - DNA, 1215 bp, Muscodor strobelii
  misc_feature: SGI cDNA ID NO. 561954
  misc_feature: Encodes the peptide sequence at SEQ ID NO 6627
atgtcgttcacgtcaattccaatactcgatctcgcgttatcgcgggacccggcaacaaagccgcagttcttatcagacttgcggcatgcacttatggaagttgggttcttatatctcaagaatgttggaatacccgatgatctttgggatgccgtgatatcagagggaaaggcattcttcgatattcctaaagaagagaaactaagaatcgaaatgaaaaacgccccctcattcctaggttactcccaactctccgccgaaataacagccggcgcagtagaccaccgtgaacaaatcgacctctcaaccacccatcccctaccctccccctcagatcctccctacgaaaatctgcgcgcacccaatcaatggccctcctcaacaatcctgcctaatttccaatcagtctatcaacaatacatgacactaatgggcaacatctcaataaacttcacctccctaatcgcagaatccatatccctcccctcaaacgccttcgagcggtatttcgaagcagaccaacaacataaactaaaaatcgtgaaataccccgacgtctccgaactcggactcgacctcccaccaggaacccagggccagggtgtaggaccgcataaagattcgatgttgacttcttacctgcttcaagcttcaaatcacaaagggttgcaggttcagaatatgagaggagaatggatagactgtccgcctatcgatcgcacgctcgtcgttgccattggacagggtcttgaggctctgactaaaggtgtgtgcgcgagtactacccaccgtgtattgtcgccgaaagctggggagggcgcgaggttcagtattccgttcttcgcgggtgtcaggggaagtacgacgtttgaggaattggaggaagttggggttggtgaggttcctgaggtgatcagggagcagaggaggaaggtactggagagtaatggtggacgattggatgatgtggagtttacgtttaggagtggtggggttgcgaagacgcttggtgaggcgacacttaggaatagggttaagagtcatcccgatgtgggcgagaggtggtggccggagattttgaggagtgttagggaacagcaggcgaaggagaaacaggagacggaggagaaggataggttgaagagtgaccgggacgtgaaggaggtagtgaaaggggatgatggtagacaagcacaggctgtggaagctcattga

SEQ ID NO: 6627 - protein, 404 aa, Muscodor strobelii
  misc_feature: SGI Peptide ID NO. 561954
  misc_feature (174)..(284): Pfam Id: PF03171 Pfam Desc: 2OG-Fe(II) oxygenase superfamily
  misc_feature (1)..(375): NCBI GI: 46108022 Blast Desc: FG00893.1 [Gibberella zeae PH-1]
  misc_feature (1)..(368): NCBI GI: 171695052 Blast Desc: protein product [Podospora anserina] gi|170947768|emb|CAP59931.1| protein product [Podospora anserina]
  misc_feature (1)..(376): NCBI GI: 256735420 Blast Desc: [Nectria haematococca mpVI 77-13-4]
  misc_feature (1)..(373): NCBI GI: 154321535 Blast Desc: BC1G_01642 [Botryotinia fuckeliana B05.10] gi|150852180|gb|EDN27372.1| BC1G_01642 [Botryotinia fuckeliana B05.10]
  misc_feature (1)..(367): NCBI GI: 39950534 Blast Desc: MGG_01223 [Magnaporthe grisea 70-15] gi|145020976|gb|EDK05105.1| MGG_01223 [Magnaporthe grisea 70-15]
  misc_feature (1)..(369): NCBI GI: 164427856 Blast Desc: NCU02603 [Neurospora crassa OR74A] gi|157071911|gb|EAA35770.2| conserved [Neurospora crassa OR74A]
  misc_feature (1)..(373): NCBI GI: 156054010 Blast Desc: SS1G_05853 [Sclerotinia sclerotiorum 1980] gi|154703633|gb|EDO03372.1| SS1G_05853 [Sclerotinia sclerotiorum 1980]
  misc_feature (1)..(404): NCBI GI: 225678631 Blast Desc: 2OG-Fe(II) oxygenase [Paracoccidioides brasiliensis Pb03]
  misc_feature (1)..(404): NCBI GI: 240107387 Blast Desc: isopenicillin N synthetase, [Coccidioides posadasii C735 delta SOWgp]
  misc_feature (1)..(376): NCBI GI: 226295019 Blast Desc: naringenin 3-dioxygenase [Paracoccidioides brasiliensis Pb18]
  misc_feature (4)..(283): SWISSPROT Homolog: EC 1.14.11.13 Gibberellin 2-beta-dioxygenase
MSFTSIPILDLALSRDPATKPQFLSDLRHALMEVGFLYLKNVGIPDDLWDAVISEGKAFFDIPKEEKLRIEMKNAPSFLGYSQLSAEITAGAVDHREQIDLSTTHPLPSPSDPPYENLRAPNQWPSSTILPNFQSVYQQYMTLMGNISINFTSLIAESISLPSNAFERYFEADQQHKLKIVKYPDVSELGLDLPPGTQGQGVGPHKDSMLTSYLLQASNHKGLQVQNMRGEWIDCPPIDRTLVVAIGQGLEALTKGVCASTTHRVLSPKAGEGARFSIPFFAGVRGSTTFEELEEVGVGEVPEVIREQRRKVLESNGGRLDDVEFTFRSGGVAKTLGEATLRNRVKSHPDVGERWWPEILRSVREQQAKEKQETEEKDRLKSDRDVKEVVKGDDGRQAQAVEAH

SEQ ID NO: 6628 - DNA, 1409 bp, Muscodor strobelii
  misc_feature: SGI EST ID NO. CUFF.16523.0
  misc_feature: Variant of the nucleotide sequence at SEQ ID NO 6626
atttgagttgactaaagacataccagttttggatgattaaaagcttaccatgtcgttcacgtcaattccaatactcgatctcgcgttatcgcgggacccggcaacaaagccgcagttcttatcagacttgcggcatgcacttatggaagttgggttcttatatctcaagaatgttggaatacccgatgatctttgggatgccgtgatatcagagggaaaggcattcttcgatattcctaaagaagagaaactaagaatcgaaatgaaaaacgccccctcattcctaggttactcccaactctccgccgaaataacagccggcgcagtagaccaccgtgaacaaatcgacctctcaaccacccatcccctaccctccccctcagatcctccctacgaaaatctgcgcgcacccaatcaatggccctcctcaacaatcctgcctaatttccaatcagtctatcaacaatacatgacactaatgggcaacatctcaataaacttcacctccctaatcgcagaatccatatccctcccctcaaacgccttcgagcggtatttcgaagcagaccaacaacataaactaaaaatcgtgaaataccccgacgtctccgaactcggactcgacctcccaccaggaacccagggccagggtgtaggaccgcataaagattcgatgttgacttcttacctgcttcaagcttcaaatcacaaagggttgcaggttcagaatatgagaggagaatggatagactgtccgcctatcgatcgcacgctcgtcgttgccattggacagggtcttgaggctctgactaaaggtgtgtgcgcgagtactacccaccgtgtattgtcgccgaaagctggggagggcgcgaggttcagtattccgttcttcgcgggtgtcaggggaagtacgacgtttgaggaattggaggaagttggggttggtgaggttcctgaggtgatcagggagcagaggaggaaggtactggagagtaatggtggacgattggatgatgtggagtttacgtttaggagtggtggggttgcgaagacgcttggtgaggcgacacttaggaatagggttaagagtcatcccgatgtgggcgagaggtggtggccggagattttgaggagtgttagggaacagcaggcgaaggagaaacaggagacggaggagaaggataggttgaagagtgaccgggacgtgaaggaggtagtgaaaggggatgatggtagacaagcacaggctgtggaagctcattgattcggaaaggggctgtcgtgttaatcaagtcgatcgattgttatacatttgtgccatctaggtgtatgcgcgaacgagcaccatctcggtataagccattatacttgcacgtaaaatagcatgcgttacaacatttcttgctcac

SEQ ID NO: 6629 - DNA, 1605 bp, Muscodor strobelii
  misc_feature: SGI cDNA ID NO. 561955
  misc_feature: Elevated expression when VOC is produced
  misc_feature: Encodes the peptide sequence at SEQ ID NO 6630
atgccttctctagccattgctagtatctacgaggcggcgctgaaatatcctgtttacatcgttggcctcattggtgtcttagctttgactttccatgtgttacttcacccccttaaacgataccccggcccgctcgccgccaggttcactaacggatacggagcgttctacgccttgaaacggtcacttcatgtacagacccttaaagatcacgagcgatatggtaataagacacccgacaatctgtccttggtgatagctactaagcaagcgccgattctaggtccggtagtccgacaaggccctaacaaactggtattcaacactgcgacggctttgaagcagatctaccacaatgacagaatgacaaaacccgtgagctacctggcgaaccaagccaagcccggctctcataatacctggaactctctcgatcgcgatatgcatcgccaaaagcgaaagatgatggcccctgctgtcaacgatcgctctatgaaagcatttgagcccatgattatcgagcaagtggacatttttcttaaacagattgccgctgctggcagagacacccctatcgacttgaaggatcgttgcaactacttggccatggatatcgtcggactcttgtctttcggatttgaaatgaaaagccagactgaacagaagtatcgtttcttcgccgatcatatggccgtgtcgaaccgccgtctcaacacatatatgcagattcccttcatcccacgccatcgagtgcagaatctcatcaacatgatctggagcaagtcaaaagaacgcgtctggcgcctgatcgagcatatggtgaagaaccggatgcagcaacccgcagatgctcgacatgacttttactctttcgtcgctgattcgttgaaaacagcagagaacagcagtctccgagtcaatgatctctggatggaagcaattctgttcatcgtcgccggcggtgatacgacatcgacgacaatcgcagctacattcttctacttggcgcatcatccagactgctacgagagactagcgaaagaagtccgctctatgtttcggagcggaggcgagatctcgagcagcaagcttgcaggctgtcggtacctacgtgcttgcattgacgagtctcttcgcatgtcgccgcctattccgggcactctatggagagagcaggctgcagacgacaccgatactagcccattggtaattgacgggcacgcgatccctaaagggacttacataggtgtcaacacgtacgcgtttcaccacaacgagaagtccttcccccaaccattcaagtataatccagaccgttggctggaggagcacagctcggtgcatgaacctctagcagctttctcgacaggttcacgtggatgtcccggaaaggcgatggcttatatggagatcggtctcgtgatagctaagtgtctttggcacttcgacttcaaacctgccaatgggggcctcggtcgcgtagggttcgacaagaatggcgagttccgtatatatgatgtctatatctcaactcatgatggaccgtggctgacatttactccccgaaacaatgccctttcagaggatttctctgtgtcgccgtag

SEQ ID NO: 6630 - protein, 534 aa, Muscodor strobelii
  misc_feature: SGI Peptide ID NO. 561955
  misc_feature (42)..(511): Pfam Id: PF00067 Pfam Desc: Cytochrome P450
  misc_feature (144)..(490): Pfam Id: PF00067 Pfam Desc: Cytochrome P450
  misc_feature (16)..(523): NCBI GI: 255954725 Blast Desc: Pc21g10830 [Penicillium chrysogenum Wisconsin 54-1255] gi|211589826|emb|CAP95980.1| Pc21g10830 [Penicillium chrysogenum Wisconsin 54-1255]
  misc_feature (31)..(525): NCBI GI: 242771379 Blast Desc: cytochrome P450, [Talaromyces stipitatus ATCC 10500] gi|218721449|gb|EED20867.1| cytochrome P450, [Talaromyces stipitatus ATCC 10500]
  misc_feature (20)..(523): NCBI GI: 145256217 Blast Desc: An10g00660 [Aspergillus niger CBS 513.88] gi|134078632|emb|CAK40505.1| protein product [Aspergillus niger]
  misc_feature (2)..(523): NCBI GI: 169603764 Blast Desc: SNOG_04890 [Phaeosphaeria nodorum SN15] gi|111066161|gb|EAT87281.1| SNOG_04890 [Phaeosphaeria nodorum SN15]
  misc_feature (26)..(522): NCBI GI: 169782556 Blast Desc: [Aspergillus oryzae RIB40] gi|83774484|dbj|BAE64607.1| protein product [Aspergillus oryzae]
  misc_feature (23)..(522): NCBI GI: 121710976 Blast Desc: benzoate 4-monooxygenase cytochrome P450 [Aspergillus clavatus NRRL 1] gi|119401254|gb|EAW11678.1| benzoate 4-monooxygenase cytochrome P450 [Aspergillus clavatus NRRL 1]
  misc_feature (18)..(524): NCBI GI: 85092131 Blast Desc: NCU06895 [Neurospora crassa OR74A] gi|28920645|gb|EAA30006.1| conserved [Neurospora crassa OR74A]
  misc_feature (25)..(519): NCBI GI: 46123381 Blast Desc: FG06068.1 [Gibberella zeae PH-1]
  misc_feature (36)..(523): NCBI GI: 169596678 Blast Desc: SNOG_01106 [Phaeosphaeria nodorum SN15] gi|111071481|gb|EAT92601.1| SNOG_01106 [Phaeosphaeria nodorum SN15]
  misc_feature (19)..(519): NCBI GI: 256733020 Blast Desc: [Nectria haematococca mpVI 77-13-4]
  misc_feature (116)..(500): SWISSPROT Homolog: EC 1.14.14.1 Unspecific monooxygenase
  misc_feature: Useful for introducing or modulating the production of volatile compounds
MPSLAIASIYEAALKYPVYIVGLIGVLALTFHVLLHPLKRYPGPLAARFTNGYGAFYALKRSLHVQTLKDHERYGNKTPDNLSLVIATKQAPILGPVVRQGPNKLVFNTATALKQIYHNDRMTKPVSYLANQAKPGSHNTWNSLDRDMHRQKRKMMAPAVNDRSMKAFEPMIIEQVDIFLKQIAAAGRDTPIDLKDRCNYLAMDIVGLLSFGFEMKSQTEQKYRFFADHMAVSNRRLNTYMQIPFIPRHRVQNLINMIWSKSKERVWRLIEHMVKNRMQQPADARHDFYSFVADSLKTAENSSLRVNDLWMEAILFIVAGGDTTSTTIAATFFYLAHHPDCYERLAKEVRSMFRSGGEISSSKLAGCRYLRACIDESLRMSPPIPGTLWREQAADDTDTSPLVIDGHAIPKGTYIGVNTYAFHHNEKSFPQPFKYNPDRWLEEHSSVHEPLAAFSTGSRGCPGKAMAYMEIGLVIAKCLWHFDFKPANGGLGRVGFDKNGEFRIYDVYISTHDGPWLTFTPRNNALSEDFSVSP

SEQ ID NO: 6631 - DNA, 1158 bp, Muscodor strobelii
  misc_feature: SGI EST ID NO. CUFF.16526.0
  misc_feature: Variant of the nucleotide sequence at SEQ ID NO 6629
ccagcttgtgtcttaataagtgaaccgtctttgaatcagagtcctgcgacacatgaagaggttacgccagaagttgaatatttaggaagagctctaggagtgtgtagcaagacaggtgcctgctaagctcttggacaatctcgcatctccattgcttttgttgcttgtctattccaagcaactctcttagagattacccccacttagcaccgacaaacgcaacgcatcgttctccactggcactacgcgatgccttctctagccattgctagtatctacgaggcggcgctgaaatatcctgtttacatcgttggcctcattggtgtcttagctttgactttccatgtgttacttcacccccttaaacgataccccggcccgctcgccgccaggttcactaacggatacggagcgttctacgccttgaaacggtcacttcatgtacagacccttaaagatcacgagcgatatggtccggtagtccgacaaggccctaacaaactggtattcaacactgcgacggctttgaagcagatctaccacaatgacagaatgacaaaacccgtgagctacctggcgaaccaagccaagcccggctctcataatacctggaactctctcgatcgcgatatgcatcgccaaaagcgaaagatgatggcccctgctgtcaacgatcgctctatgaaagcatttgagcccatgattatcgagcaagtggacatttttcttaaacagattgccgctgctggcagagacacccctatcgacttgaaggatcgttgcaactacttggccatggatatcgtcggactcttgtctttcggatttgaaatgaaaagccagactgaacagaagtatcgtttcttcgccgatcatatggccgtgtcgaaccgccgtctcaacacatatatgcagattcccttcatcccacgccatcgagtgcagaatctcatcaacatgatctggagcaagtcaaaagaacgcgtctggcgcctgatcgagcatatggtgaagaaccggatgcagcaacccgcagatgctcgacatgacttttactctttcgtcgctgattcgttgaaaacagcagagaacagcagtctccgagtcaatgatctctggatggaagcaattctgttcatcgtcgccggtataactcca

SEQ ID NO: 6632 - DNA, 807 bp, Muscodor strobelii
  misc_feature: SGI cDNA ID NO. 561956
  misc_feature: Elevated expression when VOC is produced
  misc_feature: Encodes the peptide sequence at SEQ ID NO 6633
atgaagaagttacgccagaagttgagtattcgtagggagcggtctgggggccaggagggcagtggcagcgccaagactatcgaagaggaggtctccaggcctgcactaattggtacagtccgcagatacaaagacccagcccaggtctcatcaccgatttcgccagccgttatagcttccgcacaaccgactccgttcttcgggaaacagactcggggcttacaggtgttgtacacgccgccgaactacggcggcattgacattatcttcattcacggcttgacgggtgattctcttcgaacatggcttcatccctcgggtatatactggccgacggatttgctacctgctgatatacccacagcacgaattatctcattcggatacgacgcagacgtaaccaagattaccggcgccgtaggtcaaggcaatctacgcaatcatgcgaatgcgttggtcgcagaatatgccgccctaagagctgatgatccagcgcgttcgagaagagtgatactagttgctcacagcttgggcggactggttgccaagaaggctctatgcgttgctgcagagtcggctttccatcatcatggagttcttgaccgcgacgtggtaggcttatgtttccttggcacgcctcatcgtggagcagatcttgccgactatgcctcgatagtgactcgtcttctgaaaataacgggaaagcgtgtcaacgaagttattgtggatgttttgaggccggattcagaaggcaggctttgttcaccggatatttcgtacaccaatgttgacaagtcgcagttctga

SEQ ID NO: 6633 - protein, 268 aa, Muscodor strobelii
  misc_feature: SGI Peptide ID NO. 561956
  misc_feature (69)..(249): NCBI GI: 238482873 Blast Desc: ribonuclease p/mrp subunit, [Aspergillus flavus NRRL3357] gi|220700725|gb|EED57063.1| ribonuclease p/mrp subunit, [Aspergillus flavus NRRL3357]
  misc_feature (73)..(230): NCBI GI: 238843056 Blast Desc: LipA and NB-ARC domain-containing protein [Microsporum canis CBS 113480]
  misc_feature (86)..(249): NCBI GI: 116199449 Blast Desc: CHGG_07880 [Chaetomium globosum CBS 148.51] gi|88179159|gb|EAQ86627.1| CHGG_07880 [Chaetomium globosum CBS 148.51]
  misc_feature (73)..(250): NCBI GI: 255951354 Blast Desc: Pc22g25590 [Penicillium chrysogenum Wisconsin 54-1255] gi|211593461|emb|CAP99847.1| Pc22g25590 [Penicillium chrysogenum Wisconsin 54-1255]
  misc_feature (73)..(250): NCBI GI: 169768646 Blast Desc: [Aspergillus oryzae RIB40] gi|83766651|dbj|BAE56791.1| protein product [Aspergillus oryzae]
  misc_feature (73)..(250): NCBI GI: 255946169 Blast Desc: Pc20g13740 [Penicillium chrysogenum Wisconsin 54-1255] gi|211588587|emb|CAP86703.1| Pc20g13740 [Penicillium chrysogenum Wisconsin 54-1255]
  misc_feature (73)..(250): NCBI GI: 159123454 Blast Desc: SesB-related regulatory protein, [Aspergillus fumigatus A1163]
  misc_feature (1)..(250): NCBI GI: 46114472 Blast Desc: FG03078.1 [Gibberella zeae PH-1]
  misc_feature (81)..(267): NCBI GI: 238845994 Blast Desc: SesB [Microsporum canis CBS 113480]
  misc_feature (73)..(250): NCBI GI: 256729456 Blast Desc: NECHADRAFT_47331 [Nectria haematococca mpVI 77-13-4]
  misc_feature: Useful for introducing or modulating the production of volatile compounds
MKKLRQKLSIRRERSGGQEGSGSAKTIEEEVSRPALIGTVRRYKDPAQVSSPISPAVIASAQPTPFFGKQTRGLQVLYTPPNYGGIDIIFIHGLTGDSLRTWLHPSGIYWPTDLLPADIPTARIISFGYDADVTKITGAVGQGNLRNHANALVAEYAALRADDPARSRRVILVAHSLGGLVAKKALCVAAESAFHHHGVLDRDVVGLCFLGTPHRGADLADYASIVTRLLKITGKRVNEVIVDVLRPDSEGRLCSPDISYTNVDKSQF

SEQ ID NO: 6634 - DNA, 4874 bp, Muscodor strobelii
  misc_feature: SGI EST ID NO. CUFF.16532.0
  misc_feature: Variant of the nucleotide sequence at SEQ ID NO 6632
cttgagcctgcagtatgcgtacttgacaattttcttgtcagctgggtgactggcaaataaatcgttttcgaaatagaatacagtggcacatgaagaagttacgccagaagttgagtattcgtagggagcggtctgggggccaggagggcagtggcagcgccaagactatcgaagaggaggtctccaggcctgcactaattggtacagtccgcagatacaaagacccagcccaggtctcatcaccgatttcgccagccgttatagcttccgcacaaccgactccgttcttcgggaaacagactcggggcttacaggtgttgtacacgccgccgaactacggcggcattgacattatcttcattcacggcttgacgggtgattctcttcgaacatggcttcatccctcgggtatatactggccgacggatttgctacctgctgatatacccacagcacgaattatctcattcggatacgacgcagacgtaaccaagattaccggcgccgtaggtcaaggcaatctacgcaatcatgcgaatgcgttggtcgcagaatatgccgccctaagagctgatgatccagcgcgttcgagaagagtgatactagttgctcacagcttgggcggactggttgccaagaaggctctatgcgttgctgcagagtcggctttccatcatcatggagttcttgaccgcgacgtggtaggcttatgtttccttggcacgcctcatcgtggagcagatcttgccgactatgcctcgatagtgactcgtcttctgaaaataacgggaaagcgtgtcaacgaagttattgtggatgttttgaggccggattcagaagttctgaccgatgtacaagaatcctttgccatgtggtggttgaagaatcggcatcgctgttctatatcatgtttctacgaagagcatgaaatgggaggcataggaatgatagtcccaaagaggtctgcaaatctagaaggatgcattcctcttcccatcccgagcgatcatcgcgatatggctagatttgcctctactgagtctcttggatatatcagggttctaggtcagatcaaatttgcgctcagccagcaggatatatatcaagggactgaacagccttcgattgagactaaagcgaagatgagtttcgaagactataagagatggctcaagattctttcatttccacagttgaatgccagacgtgacgggatctctgccgccgctcccaagacatgcgattggatactgacccacccaacatactgtcgatggctcagcagtccttaccctccgatactatggctccttggccacccgggtaccggcaaatcaaccttgatgagacatctcagtcgcagggcaggtcagaatctatcttcggacccaagaaacacattcgtcgcctcattctacttcgacaatctcggatcgattgagcaaaaaacagtaaacggtctttaccggtcattacttttccaactccttgagagttttcctattgcgatagagagtttcagtaaacatcaaatccacctagaagcagacgtgaaatcagacgagatattgaaagagttgaacttctctgaaatactcaaggacgtgctcaacattgtattaaatgatgcacacgtgtggatattcctagatgctcttgacgaatgcagaacagcaaaggacgaccctgaagatgagtcgaaagaagtgcgatgtcttatcagagactttaaaaatctcgggcaggatttcgaatcgtcggcgtaccagctgcgaatatgctgttctagccgacattacccgagcatcgcaaaggcaggcgaggcgtgtcagatattcacggaagaagaaaacgaagaagacataaatgagttcataaagtgtgaatttcaatgcgaaataagcgaagctgaagcgagcatttcaaagcgccttcagtctgcaattgcgaagaacgctggcggcagctttcagtggacaagattagtaactgacacagctatgcgacaataccgagctgggaaaagcacagctcagataatcaagcaaattcagacaacacctcaacaactttcgatgttatatcttgatatactaaagtcaatccctgcagaggacaaaatgcgatctctgtagttatttcgatgggcactattctctgtagaaccgctgaacatcatggcgcttcggagattgatgaatgtcaggataaacccagacgcaaaggcctgcacgatatctgaagaggatcccgagttcatcgaaagtgaagcgcatatgagtcgtttggtccaatcactttccgggggtcttgctggtttccgcgagttactcgatcaaaacgtttctggatgcacctctacccaaagctcctcctcatcaagtacaatatcgtcatcgacgattgagtcttgggactcctcctctgatgatgacgctaaaaactccgagctagaaacgccagttcactcccccaagatttccagcagctatctctacttgatacatcaatcagtgaaggactacctaattgccgagggacttgcataccttcttgaccataccggctcaaaaaagtcaattgtttacgacagtcacatgcacttatgtctcagctacgcagctaggtgggaaatcatgtctgtttcacacacagcgctagagcgagcgcatggccggggtgtcatcgcaaaggcgaacgaattctctctgtgttacccagtagaaagcaaaagatgtgcgcgcctcgtcagatatcgaagttctaaaaagtacagtgcattattcactggcatcgatctaggcgatctcaaggctctagcacaaagagctttccccttgactagcattcgaagggaaacttggattgatatttttgtaacgatcgcagcagagacggtctggaaagatacggatcaagaatgttatctatgttatacttctggattcgtctggaaggctttttaccatctggaggaagcccgcagtattgaggctcataacggagatgcagaaggagcgtttatccgttgcctacaatctcaactcggcgcccaccccaacttttcttttgttttactattcaccgcccttcgctgggatttgcctcggatcttgtgtgtcatcatcaagcaaattcccccagatgattacaatcgtcttacgcatcctgcggctcttcgctggagtttgcgtgaaattataacgcgagggcttctcgaaaatctgaagattcttctaagccaccaacgtgttgctcaaagagcgataatgtattccggtgctctaacactagcagtcgaaagtgagcagttagaaatcgctaggttccttctaaataaaggctttgacccaaaccagatagaagtggtaggagaaaacaagggacggtcacccctggggcttgctgttcaacaaaacaactctcggatgtgttcgttgctgctacaatacggtgcagacgcgcatcaagctgacgactacggccagactcctttgctgcttttgtggtcggctcgcgtattcgatcccagtatctttgcaatgctggctcatactgcgagacccgaccgtgtgaaacttggaactttctgtcctccgttgaacaatggcgacgtgagcctcttcaactcatggcaagatgaactggcagtccacctgcggcatccctgtcaaccccttacacccgagctccgaaaggccataccgaacattatagcctgctatgggcctcgacgcccgaatccgttcctagatttgtcacgtaacaaattagcttatcggaagcgagccgcagcggccgttctcacttgcgggggagtagatttgcgccgagtatcaactaagaaactgaatatcctgatgcgagcggtcggggctgattggctgccgcaatcccaggccgtcacgattctcctcaatactggagacgtcaaatgcgagctcgtatacgagatagatgttgcagggcgtacagcattagattgggcattggactactactcctatatgaggactgaacttggcgaatctcatccggctgtccaagacgaggtcatatggcaagaggaaccttatcaccctcagtttaggatggatcccccgttcaggctcgggccgcgagaagcagtgaacgccataaagcaatcgaaatatatcgtccgacggctgagaggcgttaatgctccctgtagtgaatgtcggcttgggatgatggagaaggatagaaaacaattatagtttatagagattcgtcggaaattaatgaagatgctggaggcaaatacagcaacagagctctcgagatctacaaaaaatttagataggtccccatcttttcaagataggaagcaaacgcgcagagacttacaaatacgtgtcatcatcagcaggattgttagtattacataaataaatatgaagaaagcatatcaaagcaactgaaaagtcgaaacaagaaatgcattcataagagtaggagagccaagacagacagccgatttttttcatgacgctgtcaaaaaggctgtctagtgttcgagaaggaaaagttctcttcgaaaatatgggagcagaggacagtcctttatttcacggaaaagagtttggcccgttatggatagagtgttcacgacaagaatttgtattccatggcttaagaaacggttgaattcaagtaattactcttaatacttcttcagggttgtgatgcctctcccatcgctgtaatcaacgcatctttttgtgtaccgaaatagcccacgatgctgcgcatgctatacgtgtgcacgctatgtattgccaaggctagcgtcgccgttgaccttagcatagactgaatatatcatctgcaggcatgctcaacctgtccatgtg

SEQ ID NO: 6635 - DNA, 1638 bp, Muscodor strobelii
  misc_feature: SGI cDNA ID NO. 561957
  misc_feature: Encodes the peptide sequence at SEQ ID NO 6636
atggcatccaacttgagcgatgctgatcagtatcctgtatatcttggtctatggaccaattggtcgcgtggccagattctaggtctgactctcacactcacgcgtcaagatgccaattttcttgttgcattcaccgcgttctttatcgcattcataggaacacgtttctggagaattgcctgctttgcctttcaccagttgctcggccgcttcacgccattaccgatggctggggtcgggtttctttgcgtcgttgtgtttatcgctgctggtgggctgtcctcacaaatctctaccgcagtgggtaacgaagtcctgatacgaagttcgaattgcggaatcctcgttctcagcaacgatcaaggcagcgacacggctaatttcttcaaattatcttcaaccaaggcagaaatgattgacaatgccgcgaattatgcacagcaatgctactcgaatcttaccgcaggaaacctcgactgcggacgatttgttaccaaaaagttgccaagctctgttgacaccaacgcaccgtgccctttcgatgacaaaatatgccgctctacttcaaacaatttgcgcattgactctggatacatgagtaatgaccaacactttggcgttaatagtcgtgacaggttcttcgttagggaggtcttgcattgtgcacccatcaaaactacaggttacacaagtcagcgaaacacctcaatagggaatctcaccctatatcactacggaaagctattggcgccgactggatggaaagattacgtttttgcggccaagtctgtcgagtcgcaatacgcatttggtctttcgcccgactatccaaccgtcgggagcagctttggcgtgtccgtgcaaagtgccccggtagagaacaagactgctctagtctcctctgctacgattctcccaatcgaccctctcgtgagagacgatgcggacgtcacaatcgccttcttgtctggtaacggagtcaccgggtatcaatcggcagacctcggcgaattattgggacagctcggatcaacgagcttggcctccaagagctcattgacggctgccattcaaggccccctaccatctgatcagtggcaattagacgtcatccgttggtgggatataatgatggcatccttgcaggcatcatatctgggcatctcttacttcaaaccatctgataaatctctatattcatatcgctggaatttcacatctgagggattcgaaaaattgtgtcataaccaaaaaatcagaagcacgaattttacgtcgtttagcgtcttcggtctgctcttcacctatatcgcgggcgggctaatcatattcatatcgtactccctagagcccatatctcaactgctttatgtacgatggggattcagaaaattcgcgcacctagagtggaagaccagcacaaccttacagtttcagcgcctggctcacgagcagatcggctctggtacatggtctcaaggactagccgaggtcccaatgactaaggcgggcgatgttctgagctcactcgataactcaaatcctgatcatccagtgctgcgatcgcagacccgtcactatcatttcgataataagagcacgtccggatcaaacgctacgtacatcgagagttcatag

SEQ ID NO: 6636 - protein, 545 aa, Muscodor strobelii
  misc_feature: SGI Peptide ID NO. 561957
  misc_feature (11)..(327): NCBI GI: 169615058 Blast Desc: SNOG_10683 [Phaeosphaeria nodorum SN15] gi|111060957|gb|EAT82077.1| SNOG_10683 [Phaeosphaeria nodorum SN15]
  misc_feature (8)..(229): NCBI GI: 189194015 Blast Desc: conserved [Pyrenophora tritici-repentis Pt-1C-BFP] gi|187978910|gb|EDU45536.1| conserved [Pyrenophora tritici-repentis Pt-1C-BFP]
  misc_feature (13)..(349): NCBI GI: 115399382 Blast Desc: [Aspergillus terreus NIH2624] gi|114192163|gb|EAU33863.1| [Aspergillus terreus NIH2624]
  misc_feature (8)..(330): NCBI GI: 115433432 Blast Desc: [Aspergillus terreus NIH2624] gi|114189705|gb|EAU31405.1| [Aspergillus terreus NIH2624]
  misc_feature (13)..(327): NCBI GI: 119474227 Blast Desc: NFIA_004500 [Neosartorya fischeri NRRL 181] gi|119407142|gb|EAW17092.1| conserved [Neosartorya fischeri NRRL 181]
  misc_feature (8)..(327): NCBI GI: 121699395 Blast Desc: ACLA_082720 [Aspergillus clavatus NRRL 1] gi|119396149|gb|EAW06581.1| ACLA_082720 [Aspergillus clavatus NRRL 1]
  misc_feature (13)..(327): NCBI GI: 159128250 Blast Desc: conserved [Aspergillus fumigatus A1163]
  misc_feature (13)..(327): NCBI GI: 70986226 Blast Desc: conserved [Aspergillus fumigatus Af293] gi|66846236|gb|EAL86569.1| conserved [Aspergillus fumigatus Af293]
  misc_feature (361)..(521): NCBI GI: 189194015 Blast Desc: conserved [Pyrenophora tritici-repentis Pt-1C-BFP] gi|187978910|gb|EDU45536.1| conserved [Pyrenophora tritici-repentis Pt-1C-BFP]
  misc_feature (13)..(334): NCBI GI: 169618215 Blast Desc: SNOG_12297 [Phaeosphaeria nodorum SN15] gi|160703576|gb|EAT80110.2| SNOG_12297 [Phaeosphaeria nodorum SN15]
MASNLSDADQYPVYLGLWTNWSRGQILGLTLTLTRQDANFLVAFTAFFIAFIGTRFWRIACFAFHQLLGRFTPLPMAGVGFLCVVVFIAAGGLSSQISTAVGNEVLIRSSNCGILVLSNDQGSDTANFFKLSSTKAEMIDNAANYAQQCYSNLTAGNLDCGRFVTKKLPSSVDTNAPCPFDDKICRSTSNNLRIDSGYMSNDQHFGVNSRDRFFVREVLHCAPIKTTGYTSQRNTSIGNLTLYHYGKLLAPTGWKDYVFAAKSVESQYAFGLSPDYPTVGSSFGVSVQSAPVENKTALVSSATILPIDPLVRDDADVTIAFLSGNGVTGYQSADLGELLGQLGSTSLASKSSLTAAIQGPLPSDQWQLDVIRWWDIMMASLQASYLGISYFKPSDKSLYSYRWNFTSEGFEKLCHNQKIRSTNFTSFSVFGLLFTYIAGGLIIFISYSLEPISQLLYVRWGFRKFAHLEWKTSTTLQFQRLAHEQIGSGTWSQGLAEVPMTKAGDVLSSLDNSNPDHPVLRSQTRHYHFDNKSTSGSNATYIESS

SEQ ID NO: 6637 - DNA, 492 bp, Muscodor strobelii
  misc_feature: SGI EST ID NO. CUFF.16536.0
  misc_feature: Variant of the nucleotide sequence at SEQ ID NO 6635
ttagacgtcatccgttggtgggatataatgatggcatccttgcaggcatcatatctgggcatctcttacttcaaaccatctgataaatctctatattcatatcgctggaatttcacatctgagggattcgaaaaattgtgtcataaccaaaaaatcagaagcacgaattttacgtcgtttagcgtcttcggtctgctcttcacctatatcgcgggcgggctaatcatattcatatcgtactccctagagcccatatctcaactgctttatgtacgatggggattcagaaaattcgcgcacctagagtggaagaccagcacaaccttacagtttcagcgcctggctcacgagcagatcggctctggtacatggtctcaaggactagccgaggtcccaatgactaaggcgggcgatgttctgagctcactcgataactcaaatcctgatcatccagtgctgcgatcgcagacccgtcactatcatttcgataat

SEQ ID NO: 6638 - DNA, 594 bp, Muscodor strobelii
  misc_feature: SGI cDNA ID NO. 561958
  misc_feature: Encodes the peptide sequence at SEQ ID NO 6639
atggcgtcacaaagcgatgatcctgctaccgctctcgagagaatggccaggtacagtgacttcgccgctcttacgcgctctcaaagagcgcaagttcgaggtgaaacaggcggcgaagagatatccgagtgctggggaaattttcttatcggtgatggtgatcagttcaacggacctgtctttgagggtagcgccaccgaattcaatacagccatgggaagtggaactgttcaatggccaagccgctctatgaacaatgttcgtgctgaaggcacaggagatcagtacaatggtctttatgcgcgaatcacaggaccacctggaagcctacaactgccgcgacaagagaatcagtactcctgcttcaatgtcgcctttgggagaggcaatcaatataacggtacgaggattgtggaggtcgagtccaaggaggcggacaaagcagaagaggaagagaagaaggaggaatgtaacagcatgcctaagataaagaagaaatttattacctttgagaagcctaaagagagcaagaacggaacggtagcagcgggacgatccggcgcgaatcctgaggtgcaatctatggatggttga

SEQ ID NO: 6639 - protein, 197 aa, Muscodor strobelii
  misc_feature: SGI Peptide ID NO. 561958
MASQSDDPATALERMARYSDFAALTRSQRAQVRGETGGEEISECWGNFLIGDGDQFNGPVFEGSATEFNTAMGSGTVQWPSRSMNNVRAEGTGDQYNGLYARITGPPGSLQLPRQENQYSCFNVAFGRGNQYNGTRIVEVESKEADKAEEEEKKEECNSMPKIKKKFITFEKPKESKNGTVAAGRSGANPEVQSMDG

SEQ ID NO: 6640 - DNA, 237 bp, Muscodor strobelii
  misc_feature: SGI cDNA ID NO. 561959
  misc_feature: Reduced expression when VOC is produced
  misc_feature: Encodes the peptide sequence at SEQ ID NO 6641
atgggaaacggaaacagagctcaacagaagcgcgagcgaaacaaggacaagcaaggcaaagcgccgaagtcccagctcaagagcaatgccgcggccatcgctcaccaatgcacgaaatgccgccatcaattctttgctacatcccgtcgccctgagattgagaagcacttcgagaacgagcacccgggtctcgacgtgcaagggaacctcacgaactacgacaagatcagaggctga

SEQ ID NO: 6641 - protein, 78 aa, Muscodor strobelii
  misc_feature: SGI Peptide ID NO. 561959
  misc_feature (2)..(71): Pfam Id: PF08927 Pfam Desc: Domain of function (DUF1909)
  misc_feature (2)..(62): Pfam Id: PF08927 Pfam Desc: Domain of function (DUF1909)
  misc_feature (2)..(63): NCBI GI: 281203473 Blast Desc: transmembrane protein [Polysphondylium pallidum PN500]
  misc_feature (1)..(76): NCBI GI: 58263050 Blast Desc: CNB04380 [Cryptococcus neoformans var. neoformans JEC21] gi|134107906|ref|XP_777335.1| CNBB1370 [Cryptococcus neoformans var. neoformans B-3501A] gi|50260025|gb|EAL22688.1|
  misc_feature (1)..(61): NCBI GI: 170086127 Blast Desc: [Laccaria bicolor S238N-H82] gi|164651839|gb|EDR16079.1| [Laccaria bicolor S238N-H82]
  misc_feature (2)..(61): NCBI GI: 85116169 Blast Desc: NCU02602 [Neurospora crassa OR74A] gi|28926805|gb|EAA35769.1| conserved [Neurospora crassa OR74A]
  misc_feature (1)..(61): NCBI GI: 238603954 Blast Desc: MPER_03756 [Moniliophthora perniciosa FA553] gi|215467945|gb|EEB97011.1| MPER_03756 [Moniliophthora perniciosa FA553]
  misc_feature (1)..(61): NCBI GI: 121712076 Blast Desc: conserved [Aspergillus clavatus NRRL 1] gi|119401805|gb|EAW12227.1| conserved [Aspergillus clavatus NRRL 1]
  misc_feature (1)..(61): NCBI GI: 67901260 Blast Desc: AN7617.2 [Aspergillus nidulans FGSC A4] gi|40742613|gb|EAA61803.1| AN7617.2 [Aspergillus nidulans FGSC A4] gi|259483946|tpe|CBF79751.1| TPA: conserved [Aspergillus FGSC
  misc_feature (1)..(73): NCBI GI: 238500033 Blast Desc: conserved [Aspergillus flavus NRRL3357] gi|220693004|gb|EED49350.1| conserved [Aspergillus flavus NRRL3357]
  misc_feature (2)..(62): NCBI GI: 66820080 Blast Desc: DDB_G0275367 [Dictyostelium discoideum AX4] gi|60471794|gb|EAL69749.1| DDB_G0275367 [Dictyostelium discoideum AX4]
  misc_feature (1)..(61): NCBI GI: 71016212 Blast Desc: UM02732.1 [Ustilago maydis 521] gi|46098397|gb|EAK83630.1| UM02732.1 [Ustilago maydis 521]
  misc_feature: Useful for introducing or modulating the production of volatile compounds
MGNGNRAQQKRERNKDKQGKAPKSQLKSNAAAIAHQCTKCRHQFFATSRRPEIEKHFENEHPGLDVQGNLTNYDKIRG

SEQ ID NO: 6642 - DNA, 2775 bp, Muscodor strobelii
  misc_feature: SGI EST ID NO. CUFF.16554.0
  misc_feature: Variant of the nucleotide sequence at SEQ ID NO 6640
cggcgcagtgcgtgcattctaaacagaaattacagatcagccctcacggtcgcttaccattgttataatcatgaaccccttaatcacttggtgcggcgcggtgcagatattggatcttgtcacagaaaccctgccagcggcctccacacaaccgagcaccattatcaacgccagctccgatttcttcactcagtcggcttcgttgactggaagaatgaggacgacaataccctgttaagatcagctttctacactcgagactgggaaacctttctttttgcacttgaaattgtgaaatacaatccgaacgatttcaatggaaattcggatcttccaatacactggggcgcaactgaaagtgatcatgttgcatttaccgctgcgttaattgagagcggtgcccacgtagatggtggggataacgcctgggatggtactgcgctgtctagatgttttcgttctagctgcaaccacgacatggcacattgtttgctcttctacggagctaatgtcaactcgactgatgcagactgggagtcatcatggtatatgttatgggaaatgattatgctgagctggggtttcaattttatcgaccttgagctgctgctaactcacttattgctccatggtgcagatcctttcgaaccagctgcagattcccactgcgaagaggaattcgatgacgaggatgagtacaaactagattatgaggattgcgacagcgtgcgatcgtggtattttcatctggatcagatcaagtctcctgcatttgcgagagcatggagcttcgacgacaagattgcggttgcttacagacacaagaagtctgggagaataatacagccgaaatacgaaatattaacaccagattatgaggcgtttgaggatgacagacagccgaggctccgcatctcctggttagcggatggtctaatccgtcggattgtaagacttgagatggcgaatctctactcagaccaccaatggtccgatgcagacgccaactcgcgtaaccaagaatgggatagaatattcgaccgtgccgattactacgatgacgattttacccagccaaagaatgaacgaatcacgtaccctcgtgatgaacattccctattctatgagacagtctcgacaccagagggccgagatcagctgtccacgttccccgccgttcgacttctctgtaacgcattgaagagagccggctatagggcagaggtggatagcgaaggcgatatatggtatgaagacgatgatggagacatttatcacgacgctacagagcatcagacagatcgtgaaaaccaagatgctgcgtcgcaatgtttcatctgccaagacatggccaagtatggtctcggccacgtctttgaccagatacaggaaggtaaacaacgcgtgcacagatacagagaagaagtgaaagctgggcggaagaaatggtcgatataatgataaagggggcaggcaggtgttgcatgtgactttaatggtcttcgctgttcttgcttcggtgcctgcactcgactgccgtggtaagcggttgtgtgcaggtgccgaaaagaaccatatatccccagggttgtcccggaggagtggtcttaccctgcaggactaggcagccaattggaccaattagacacccaattctaaaccggagtctgacggagctgacattcgatatgggcaaattattttcttcggtctgcctaagacgccgacgagactgcagaaatctgtcttctctccatcctgtctgcatcctatcttcgtcaccgccaagcccgcctccatcgcaaccctcctcatattcatcaagcgcctgatataaaggagccacagatccgatcaaaatgggaaacggaaacagagctcaacagaagcgcgagcgaaacaaggacaagcaaggcaaagcgccgaagtcccagctcaagagcaatgccgcggccatcgctcaccaatgcacgaaatgccgccatcaattctttgctacatcccgtcgccctgagattgagaagcacttcgagaacgagcacccgggtctcgacgtgcaagggaacctcacgaactacgacaagatcagaggctgaaggaaagccggcgaacgagacaatctgcattgcatgagagcgatggcgcatttttgatttccagcgccgggggcacaatgttttcggaaggcgcatggacagggtttattcgacgagcaacgacgctacgagtaccgagagattagacaagaagagagagaaaatcgtccactgaagtatgaaattattgacatgaaatcacgaaggtctctttcggcacgtgctccgcaacctatacacatgggggccagacaactttccgccgttgcattgtgatgtaaacggaactgattctaggatccgatatctcgacaaatcgtatattcgctctagatattgtgcaaaacacatagcattcaatcaattgcaaccaagtcttacatgccattccaagagactccttcatcccaagatgtctctccaagaccaccgagtaggggtaaagcggataaggagataggtatcaccaagaccccggaatgatattcttgtcactgtattccccgtgcggagcatttcgtgtcggtacatcttactcgggagtgtgattgaagcaaaccacgcaaccactaggccacaacagagcggtaatctagcctaggatgcactggaatgcgggcaccacatattcgacttcatagtgtataggataaacaatttactgcccatacatagtttc

SEQ ID NO: 6643 - DNA, 2463 bp, Muscodor strobelii
  misc_feature: SGI cDNA ID NO. 561960
  misc_feature: Encodes the peptide sequence at SEQ ID NO 6644
atggacccattaagcgcaattggcgcaactgcttcggtcgttcaagtcgtcgaggtggctgctaaagccgcagcagcagcatggaatctcacgcagtccatcatcaatgcgccggcggaaatcgccaggcttgcagagaaattggagcgtttcaagttgctgattgaacagacccagaagcagagcttcgactatcggactgttgaattcgatgatctcttccccccattgtatcgcaacttgctctacgagttcctggaacgtaacgttgatgccttggagtcattgaaaagtttacacgcagcgtctgcgggtagtagctcgatggcgattcgaggcagactacgttgggtagctattgacaaaagaaaagctaaagcaattttagaagatctgagagatgcagaaagctctttggatgtggcattaagcatggtaacgatgcgtattgcttcactgaaccagttgtcactagcagcaattagatccagtcaggatatcctgtttccacaattgataaaaggatttgaagacgttaaacaatgcgtcaacgaaaaaatattggatatgaaaaagcaggctgcttttgacacaacagcgagcgttattgattcaaggatctggttccaacgacaatccaagtttgccgggatgcaccgttcatcaaatccgacatatcttacatacaagcgcctggcgcttctgtcccggtcgttcacaatctggaccagcatggatattcgtcacagtctccaagaaggattcatcaagattgtcctgctgaaccaggcatgttatgattgggatttcgaatcagttcggtacttactagatacgggtcaagcaagtatctacgatgtcgatgacaaatatcgtcttggtctgcttgagtatgtgttccgcaatactactgacactaatccggaatcactgtggtgtggtggcggagacaactttgatggttaccaggtaatagattacctcctagattgtggatatgatccaaacgtcttccatggtctcttcccaggcatcataccatcagccctcacggtcgcttaccattgttataatcatgaaccccttaatcacttggtgcggcgcggtgcagatattggatcttgtcacagaaaccctgccagcggcctccacacaaccgagcaccattatcaacgccagctccgatttcttcactcagtcggcttcgttgactggaagaatgaggacgacaataccctgttaagatcagctttctacactcgagactgggaaacctttctttttgcacttgaaattgtgaaatacaatccgaacgatttcaatggaaattcggatcttccaatacactggggcgcaactgaaagtgatcatgttgcatttaccgctgcgttaattgagagcggtgcccacgtagatggtggggataacgcctgggatggtactgcgctgtctagatgttttcgttctagctgcaaccacgacatggcacattgtttgctcttctacggagctaatgtcaactcgactgatgcagactgggagtcatcatggtatatgttatgggaaatgattatgctgagctggggtttcaattttatcgaccttgagctgctgctaactcacttattgctccatggtgcagatcctttcgaaccagctgcagattcccactgcgaagaggaattcgatgacgaggatgagtacaaactagattatgaggattgcgacagcgtgcgatcgtggtattttcatctggatcagatcaagtctcctgcatttgcgagagcatggagcttcgacgacaagattgcggttgcttacagacacaagaagtctgggagaataatacagccgaaatacgaaatattaacaccagattatgaggcgtttgaggatgacagacagccgaggctccgcatctcctggttagcggatggtctaatccgtcggattgtaagacttgagatggcgaatctctactcagaccaccaatggtccgatgcagacgccaactcgcgtaaccaagaatgggatagaatattcgaccgtgccgattactacgatgacgattttacccagccaaagaatgaacgaatcacgtaccctcgtgatgaacattccctattctatgagacagtctcgacaccagagggccgagatcagctgtccacgttccccgccgttcgacttctctgtaacgcattgaagagagccggctatagggcagaggtggatagcgaaggcgatatatggtatgaagacgatgatggagacatttatcacgacgctacagagcatcagacagatcgtgaaaaccaagatgctgcgtcgcaatgtttcatctgccaagacatggccaagtatggtctcggccacgtctttgaccagatacaggaaggtaaacaacgcgtgcacagatacagagaagaagtgaaagctgggcggaagaaatggtcgatataa

SEQ ID NO: 6644 - protein, 820 aa, Muscodor strobelii
  misc_feature: SGI Peptide ID NO. 561960
  misc_feature (430)..(818): NCBI GI: 171691460 Blast Desc: protein product [Podospora anserina] gi|170945678|emb|CAP71791.1| protein product [Podospora anserina]
  misc_feature (1)..(182): NCBI GI: 256726357 Blast Desc: [Nectria haematococca mpVI 77-13-4]
  misc_feature (704)..(808): NCBI GI: 256726357 Blast Desc: [Nectria haematococca mpVI 77-13-4]
  misc_feature (261)..(512): NCBI GI: 189502738 Blast Desc: Aasi_1435 [Candidatus Amoebophilus asiaticus 5a2] gi|189498179|gb|ACE06726.1| Aasi_1435 [Candidatus Amoebophilus asiaticus 5a2]
  misc_feature (393)..(648): NCBI GI: 256726357 Blast Desc: [Nectria haematococca mpVI 77-13-4]
  misc_feature (348)..(555): NCBI GI: 123445293 Blast Desc: ankyrin repeat protein [Trichomonas vaginalis G3] gi|121893216|gb|EAX98478.1| ankyrin repeat protein, [Trichomonas vaginalis G3]
  misc_feature (324)..(557): NCBI GI: 123426570 Blast Desc: ankyrin repeat protein [Trichomonas vaginalis G3] gi|121888674|gb|EAX94136.1| ankyrin repeat protein, [Trichomonas vaginalis G3]
  misc_feature (348)..(532): NCBI GI: 123445293 Blast Desc: ankyrin repeat protein [Trichomonas vaginalis G3] gi|121893216|gb|EAX98478.1| ankyrin repeat protein, [Trichomonas vaginalis G3]
  misc_feature (348)..(555): NCBI GI: 123445293 Blast Desc: ankyrin repeat protein [Trichomonas vaginalis G3] gi|121893216|gb|EAX98478.1| ankyrin repeat protein, [Trichomonas vaginalis G3]
  misc_feature (282)..(560): NCBI GI: 123402177 Blast Desc: ankyrin repeat protein [Trichomonas vaginalis G3] gi|121883248|gb|EAX89073.1| ankyrin repeat protein, [Trichomonas vaginalis G3]
MDPLSAIGATASVVQVVEVAAKAAAAAWNLTQSIINAPAEIARLAEKLERFKLLIEQTQKQSFDYRTVEFDDLFPPLYRNLLYEFLERNVDALESLKSLHAASAGSSSMAIRGRLRWVAIDKRKAKAILEDLRDAESSLDVALSMVTMRIASLNQLSLAAIRSSQDILFPQLIKGFEDVKQCVNEKILDMKKQAAFDTTASVIDSRIWFQRQSKFAGMHRSSNPTYLTYKRLALLSRSFTIWTSMDIRHSLQEGFIKIVLLNQACYDWDFESVRYLLDTGQASIYDVDDKYRLGLLEYVFRNTTDTNPESLWCGGGDNFDGYQVIDYLLDCGYDPNVFHGLFPGIIPSALTVAYHCYNHEPLNHLVRRGADIGSCHRNPASGLHTTEHHYQRQLRFLHSVGFVDWKNEDDNTLLRSAFYTRDWETFLFALEIVKYNPNDFNGNSDLPIHWGATESDHVAFTAALIESGAHVDGGDNAWDGTALSRCFRSSCNHDMAHCLLFYGANVNSTDADWESSWYMLWEMIMLSWGFNFIDLELLLTHLLLHGADPFEPAADSHCEEEFDDEDEYKLDYEDCDSVRSWYFHLDQIKSPAFARAWSFDDKIAVAYRHKKSGRIIQPKYEILTPDYEAFEDDRQPRLRISWLADGLIRRIVRLEMANLYSDHQWSDADANSRNQEWDRIFDRADYYDDDFTQPKNERITYPRDEHSLFYETVSTPEGRDQLSTFPAVRLLCNALKRAGYRAEVDSEGDIWYEDDDGDIYHDATEHQTDRENQDAASQCFICQDMAKYGLGHVFDQIQEGKQRVHRYREEVKAGRKKWSI

SEQ ID NO: 6645 - DNA, 789 bp, Muscodor strobelii
  misc_feature: SGI cDNA ID NO. 561961
  misc_feature: Encodes the peptide sequence at SEQ ID NO 6646
atggagaaggaagtccttccaatcaatatttcgattgatctgttccagggcctcttgatccgctatagcaccctaatcgaatccatttcatcggacaagccggccaaacccgatcagaagtccctcattcagcttgatggatttcggtatcaagaagcggtggattcattcagatctgcaaaaccaaatcgtcagatgacacacgaggatgttaagaccttggtggaatggaaattacgccatggcaaatttcgccctactctgatgaagctcgtttcttccaacgagagtagtactgtcgagaaaacaatccaacaagtgatgataaagtattggtccgttcaagacattctacaagctgtagatggtatttctaagctcaaggggattggccctgcgactgcatcgcttctgctctcggtacatgaccccaatcgagtcatcttcttctcggatgaagcattttggtggctatgttgcaacggacagaagtcgccgatcaaatacaacgccaaggagtatcagcaattaatagcagccgcaaacgagattatcaagagactgggagtgggcgctactgatgttgaaaaggtggcatacgtgttatttagagatgatcttggtcgttcccagccatccgcgactaatggccaagactctatgtccaaacagagcggaaattcagcggacaatgactcgggcaagctcagcgcaaaaaggaagaaagctccggccggagatgtgagcgacgttgctgtccgacgatctaaacgtgggaaagcttcctag

SEQ ID NO: 6646 - protein, 262 aa, Muscodor strobelii
  misc_feature: SGI Peptide ID NO. 561961
  misc_feature (10)..(261): NCBI GI: 256735418 Blast Desc: NECHADRAFT_75242 [Nectria haematococca mpVI 77-13-4]
  misc_feature (10)..(261): NCBI GI: 46108028 Blast Desc: FG00896.1 [Gibberella zeae PH-1]
  misc_feature (15)..(228): NCBI GI: 261355221 Blast Desc: conserved [Verticillium albo-atrum VaMs.102]
  misc_feature (7)..(244): NCBI GI: 116182138 Blast Desc: CHGG_01697 [Chaetomium globosum CBS 148.51] gi|88185994|gb|EAQ93462.1| CHGG_01697 [Chaetomium globosum CBS 148.51]
  misc_feature (77)..(262): NCBI GI: 85116165 Blast Desc: NCU02601 [Neurospora crassa OR74A] gi|28926804|gb|EAA35768.1| [Neurospora crassa OR74A]
  misc_feature (80)..(260): NCBI GI: 171695048 Blast Desc: protein product [Podospora anserina] gi|170947766|emb|CAP59929.1| protein product [Podospora anserina]
  misc_feature (5)..(213): NCBI GI: 39950513 Blast Desc: MGG_01221 [Magnaporthe grisea 70-15] gi|145020978|gb|EDK05107.1| MGG_01221 [Magnaporthe grisea 70-15]
  misc_feature (7)..(205): NCBI GI: 156054006 Blast Desc: SS1G_05851 [Sclerotinia sclerotiorum 1980] gi|154703631|gb|EDO03370.1| SS1G_05851 [Sclerotinia sclerotiorum 1980]
  misc_feature (20)..(227): NCBI GI: 169603902 Blast Desc: SNOG_04960 [Phaeosphaeria nodorum SN15] gi|111066231|gb|EAT87351.1| SNOG_04960 [Phaeosphaeria nodorum SN15]
  misc_feature (7)..(205): NCBI GI: 154321531 Blast Desc: BC1G_01640 [Botryotinia fuckeliana B05.10] gi|150852178|gb|EDN27370.1| BC1G_01640 [Botryotinia fuckeliana B05.10]
MEKEVLPINISIDLFQGLLIRYSTLIESISSDKPAKPDQKSLIQLDGFRYQEAVDSFRSAKPNRQMTHEDVKTLVEWKLRHGKFRPTLMKLVSSNESSTVEKTIQQVMIKYWSVQDILQAVDGISKLKGIGPATASLLLSVHDPNRVIFFSDEAFWWLCCNGQKSPIKYNAKEYQQLIAAANEIIKRLGVGATDVEKVAYVLFRDDLGRSQPSATNGQDSMSKQSGNSADNDSGKLSAKRKKAPAGDVSDVAVRRSKRGKAS

SEQ ID NO: 6647 - DNA, 6434 bp, Muscodor strobelii
  misc_feature: SGI EST ID NO. CUFF.16745.1
  misc_feature: Variant of the nucleotide sequence at SEQ ID NO 6645
ctgcatctctcagatcttctaaaattgctttagcttttcttttgtcaatagctacccaacgtagtctgcctcgaatcgccatcgagctactacccgcagacgctgcgtgtaaacttttcaatgactccaaggcatcaacgttacgttccaggaactcgtagagcaagttgcgatacaatggggggaagagatcatcgaattcaacagtccgatagtcgaagctctgcttctgggtctgttcaatcagcaacttgaaacgctccaatttctctgcaagcctggcgatttccgccggcgcattgatgatggactgcgtgagattccatgctgctgctgcggctttagcagccacctcgacgacttgaacgaccgaagcagttgcgccaattgcgcttaatgggtccatggcagatcatgagcagtaatcattgcaatatatcgaaaaacgaacgataagctacatatcttaatagccaatcggaaggtagacttaattgacaagaggtgtttcacagcattaagttgtcaatctttgttgaggaagaaaattgattaatttgccatccttctcccctcatcaagagccctcccggtcacccagatgcacaatgttcgacaagacatgccaaaaacatcatctcagcgcctacttgtcgaatgagatgctacgatttcgcctctccccggccaacagacataccaaatgtggagaacctaccctaaagtactggtcagacgggagaccagccccacaccttttcgcaagctgtccatgagaaggctatcgagacgctgtccgaaatgcaaatcacacccagcgcattgacgctgcagcctgcaggtaagtctggtcatccaaattgaattttagggttgagtgcttcaacttggattccaagcttccattttcccttaaaacactcacgatcttgtctgaggtggctctcaaaagccttcagcttttccaactattttcaagcgccgagatcccgagcagttcaagagcgcaacctgatcctatcctatgacttcttagagacaagaaatcattgtctacctgaaacaaaacgatggagaaggaagtccttccaatcaatatttcgattgatctgttccagggcctcttgatccgctatagcaccctaatcgaatccatttcatcggacaagccggccaaacccgatcagaagtccctcattcagcttgatggatttcggtatcaagaagcggtggattcattcagatctgcaaaaccaaatcgtcagatgacacacgaggatgttaagaccttggtggaatggaaattacgccatggcaaatttcgccctactctgatgaagctcgtttcttccaacgagagtagtactgtcgagaaaacaatccaacaagtgatgataaagtattggtccgttcaagacattctacaagctgtagatggtatttctaagctcaaggggattggccctgcgactgcatcgcttctgctctcggtacatgaccccaatcgagtcatcttcttctcggatgaagcattttggtggctatgttgcaacggacagaagtcgccgatcaaatacaacgccaaggagtatcagcaattaatagcagccgcaaacgagattatcaagagactgggagtgggcgctactgatgttgaaaaggtggcatacgtgttatttagagatgatcttggtcgttcccagccatccgcgactaatggccaagactctatgtccaaacagagcggaaattcagcggacaatgactcgggcaagctcagcgcaaaaaggaagaaagctccggccggagatgtgagcgacgttgctgtccgacgatctaaacgtgggaaagcttcctagtcctagtcctaccgggtcgttcggtggctagatggaaggacgagaacagaaactcattcatgacgccaatgcaagaggcacaatgtagcaggtgggataaccacaggctgcaaaaaagctctaaacaacaacttgcatgacgcatggaaatctcgctagcatcatcggtctgcaaggcacgttatcggtgagactatatttgttcgctctagaccttggggtctgctctcattggccattgcgatcgaaaacttccgagttggtagcattgctaactgagcggctcgacggcccgcggatgcgaacagcaacttccgaccgtgaaaacgacagtcgacgtaatgggcagccccgatcctttgtcggccaaatccaatgcatttgcatctctattaattgatcattattgaccttaaatctcattatactgtacgaataatccgcgactcgagccatagtgctctgtagggatcttcaaatacgaataatgcagtcaaaacgactagttcatcccacgcgcgtccgggaacgtcagccggagatcacaagcttatcatggggcgggtccctgaatgcagaatgcattccacccttaatggatcacctcacacaacatatctgacacggtggtcgtggcctaacatcatgttggtcaagctgcagggtcatggcatctgctgtggctcggtggttcagtcgatctcgaggaatttactgagaatggcagttgttcatcacatgccagttgctgtacaactcattgaacaatacgagactaattttagacgatatatgaacatcaaagcctagaacaagttcattgtcaatgctatcgaacgacggatcctgtggtgaagatacaacaaccgcacaatcggcggtgtgcagctattcgaagccccgaatccactcacaaaatctcgatatcgcacggaacgccagatcttgtcgtcgtccctcgggttagtagtgaatcatgtcgatactcgactcagagcctattgctctcgcgcctcgctttgccgcgatgaagagaaacatgatagcctgtcgagaaaaacaggttgcagagtcattctaccggctgctgcggcagctcagaaaagagacggagacaattgcatcctgcggatcagacattatacccgttatcgactacttcgacatccagaatagtaccaaagtgtcggcatttaaaaaggcagtgcaaaatcgaggtgttgccatcatcagacacgtcataccaccaaccgtggcacaatcatggaaagaggaaacgacggattacgtcaacgatagtccacagatgaggggccatctctggaatgattctcaactcttcaatatgtggtaggtatagaaacgtcccgcgcgagttattatttgaccgtacttataagacatcatgctaacttctttgtagtaagtaatctaatctataaaatatcggaaaccatcctttgtcttaaagctcgcagccgcgcctgcggggaaaatcgtgaaaaataactaatgcaatacctttcgggctaccagactggagtccagggcaagttagggctcgagctgattcgagattacttgatgctcagcgttttgctatgagtatctggcacaccacggacgaaactgcgctcgttagtagtaatcaccctgtcgcatatgccgaccgtctacacatccgaacgataggcgatacttctcttgcgatcggcccacatatcgacaatggcagtgtcgaaagatgggagccggatggttatggccaagcaggcacgtatcagcctatatttgacggccgatgggaggactacgacccgtgggatagtacctcgaggctccgcgtgacggctgacttatacaataaggctagctcttgtagtatgttcaggatgtttcagggatggctttccttgtcccagattccacctggagacgattctctgcttgtttgtcctatgctgcagctcactacagcataccttcttctccgtcccttcttcacgccccgttataagaatccggcttcaaataactttctacacccgagcaactggaatttgaatgtctcacaaacaagtgttcttcatggtgctgtcccgggctatacgcaagagttgagtatagcactccatccacacttggagcttaatcgcacgttggtgtcggttccgactctatctcccggcgactatgtaatctggcatccagatattattcacgcaacaggtcctttatatcccggaaccaatgcctggccgtcccgtacccctcgacctatctctgaatccagttttgattctggattcagcatagacagcaacggttccgcacacacaaatttgtcgacgacagttttatacgtgccggcttgcccacttacacaaaccaacgcattgtatctctcccgtcagcgtcgagccttcttactcggcctatccgcgccggatttttcacagtcaggaaattataatgcagcatctgaacgagaccacttagctcggccaggggttcaggatattagcgatgctggaggtgaagaaggactacgcagcatgggcttgacaccttgggaagaccgacgcattacccgaggaagtagtagttgggattctggaagaggcatttcacatgccgatgagttgtatagagacgagcgggaacagaaggaggtggagctcttgaggctcgcgaatgcgattttgtttccagatcgattcgacactttcgcaaagaatgggagacgatgaaatgaaaatgatcgcttgtagggaacgaaaaggccttgcgaattgtcaacagccttagtaatgcaaaaatgagtaatgatcactgaacatgaattgctcttatgaattgcgctttaaggagtttcaactattccggaacttgttctgaatagtctgaatttgcatatgtttcgatacagcataagtcaaagccacttcttttcgtggaggccgcattgcaattcattggtcgtcctacctcgtctaaacaacacagtcggtctcgcgatatctccgacgcagcgacagttaagttatgaacggcaagaatagcagaggttaaagtttggggaaaagggcgacaccctgaccctgcaatgaaaatcatgttcccatctacaacgtccccctcactctgctacccctcgtctccgtaagcgggtatgcttcattgtcgatctcggtaataagaggcatgcggactactctcatagcatttacactggcaattggattggcattcgtgtcagttctcagatacgatgtttcgtcttgcactttttccaagataacttgcagctgtaactttgcctcatagcacctcgccatgttgctcatgcagctctctgtacttgccgtcctcctactaggcgcacaggctcagattagcagactcatcattggaacattcagtactaagtttctttacacggttgaatatgatcacgaacaagaggcaatcagccttattggcaacacatcggtaccgtacgctggaaattggatagctctcgatcattcaaaatcgaatctctacacaacagcctacggccaatcaaacgttgctcagaatcccatgttcgtcagctactctctcgccaacgcaacatctataacccatcgtgccacaatctccgccggcggggactgcaaagcaacttcaatatttgtagttgccgatcctaacccaccattctgggtctacggcacctattttgcgtccgtgaagggtatcaatgcgggttgtggcacagtcttcgctgtagatgaacaggggaccatagccagcgtggagcagaattacacatacatcaccaacgtatctggcgttcacggaactgtcctatctcctgactctaagtttctatactcagcagacgacacgggaaatacactgtggacgcacagtgtcgacgaagacacgggcatggtaacatacgtcgcgaatctcactggaccctccccaggctcagacccgcggcacgtagcgattcaccccagcggtaaatatctctacgtcatcctcgaaggcacaagtcaacttgcgcaatacgccattgatcaagacagaattccccatctcgacgagacttatgctcttctatactcaggtcaaagcaccgcagcattttgggccgacgaagtcgccgtctcagctaacgccaagtacctctgggccagtaaccgggctcgagacccaagtacaccgggtttgatatctgcgttctcgttagctgaggatggctgtatcataaagcagaatttcctgctcccaactacctccagcggtgggatatcgaatatcctgaccccaagtccgtatgatgataagttagttgcgttgacgagtaactcgactgggagtattgagatgtggaggatgagctcaaatgagagcttggcgagggctgttgcacgcttggatttggatgatgggggcggatgttgttcgaatgctgtgtggtatgagtgacgagaatgagttcatgactttgcgatagggggaaaaatagcgttttcttttcatgaagactgaaaatttgatgcggacagcgcatgattcgaa

SEQ ID NO: 6648 - DNA, 1146 bp, Muscodor strobelii
  misc_feature: SGI cDNA ID NO. 561962
  misc_feature: Encodes the peptide sequence at SEQ ID NO 6649
atgttgctcatgcagctctctgtacttgccgtcctcctactaggcgcacaggctcagattagcagactcatcattggaacattcagtactaagtttctttacacggttgaatatgatcacgaacaagaggcaatcagccttattggcaacacatcggtaccgtacgctggaaattggatagctctcgatcattcaaaatcgaatctctacacaacagcctacggccaatcaaacgttgctcagaatcccatgttcgtcagctactctctcgccaacgcaacatctataacccatcgtgccacaatctccgccggcggggactgcaaagcaacttcaatatttgtagttgccgatcctaacccaccattctgggtctacggcacctattttgcgtccgtgaagggtatcaatgcgggttgtggcacagtcttcgctgtagatgaacaggggaccatagccagcgtggagcagaattacacatacatcaccaacgtatctggcgttcacggaactgtcctatctcctgactctaagtttctatactcagcagacgacacgggaaatacactgtggacgcacagtgtcgacgaagacacgggcatggtaacatacgtcgcgaatctcactggaccctccccaggctcagacccgcggcacgtagcgattcaccccagcggtaaatatctctacgtcatcctcgaaggcacaagtcaacttgcgcaatacgccattgatcaagacagaattccccatctcgacgagacttatgctcttctatactcaggtcaaagcaccgcagcattttgggccgacgaagtcgccgtctcagctaacgccaagtacctctgggccagtaaccgggctcgagacccaagtacaccgggtttgatatctgcgttctcgttagctgaggatggctgtatcataaagcagaatttcctgctcccaactacctccagcggtgggatatcgaatatcctgaccccaagtccgtatgatgataagttagttgcgttgacgagtaactcgactgggagtattgagatgtggaggatgagctcaaatgagagcttggcgagggctgttgcacgcttggatttggatgatgggggcggatgttgttcgaatgctgtgtggtatgagtga

SEQ ID NO: 6649 - protein, 381 aa, Muscodor strobelii
  misc_feature: SGI Peptide ID NO. 561962
  misc_feature (20)..(381): NCBI GI: 242822171 Blast Desc: carboxy-cis,cis-muconate cyclase, [Talaromyces stipitatus ATCC 10500] gi|218712751|gb|EED12176.1| carboxy-cis,cis-muconate cyclase, [Talaromyces stipitatus ATCC
  misc_feature (20)..(381): NCBI GI: 212546879 Blast Desc: carboxy-cis,cis-muconate cyclase, [Penicillium marneffei ATCC 18224] gi|210065113|gb|EEA19208.1| carboxy-cis,cis-muconate cyclase, [Penicillium marneffei ATCC
  misc_feature (19)..(381): NCBI GI: 256725414 Blast Desc: NECHADRAFT_95122 [Nectria haematococca mpVI 77-13-4]
  misc_feature (22)..(381): NCBI GI: 121699978 Blast Desc: carboxy-cis,cis-muconate cyclase, [Aspergillus clavatus NRRL 1] gi|119396396|gb|EAW06828.1| carboxy-cis,cis-muconate cyclase, [Aspergillus clavatus NRRL 1]
  misc_feature (22)..(381): NCBI GI: 261194815 Blast Desc: carboxy-cis,cis-muconate cyclase [Ajellomyces dermatitidis SLH14081] gi|239588350|gb|EEQ70993.1| carboxy-cis,cis-muconate cyclase [Ajellomyces dermatitidis
  misc_feature (22)..(381): NCBI GI: 239613372 Blast Desc: carboxy-cis,cis-muconate cyclase [Ajellomyces dermatitidis ER-3]
  misc_feature (1)..(381): NCBI GI: 145613830 Blast Desc: 3-carboxy-cis,cis-muconate cyclase [Magnaporthe grisea 70-15] gi|145020845|gb|EDK04974.1| 3-carboxy-cis,cis-muconate cyclase [Magnaporthe grisea 70-15]
  misc_feature (22)..(381): NCBI GI: 225682819 Blast Desc: carboxy-cis,cis-muconate cyclase [Paracoccidioides brasiliensis Pb03]
  misc_feature (22)..(381): NCBI GI: 119472089 Blast Desc: carboxy-cis,cis-muconate cyclase, [Neosartorya fischeri NRRL 181] gi|119406427|gb|EAW16378.1| carboxy-cis,cis-muconate cyclase, [Neosartorya fischeri NRRL 181]
  misc_feature (22)..(381): NCBI GI: 226285331 Blast Desc: carboxy-cis,cis-muconate cyclase [Paracoccidioides brasiliensis Pb01]
  misc_feature (20)..(381): SWISSPROT Homolog: EC 5.5.1.5 Carboxy-cis,cis-muconate cyclase
MLLMQLSVLAVLLLGAQAQISRLIIGTFSTKFLYTVEYDHEQEAISLIGNTSVPYAGNWIALDHSKSNLYTTAYGQSNVAQNPMFVSYSLANATSITHRATISAGGDCKATSIFVVADPNPPFWVYGTYFASVKGINAGCGTVFAVDEQGTIASVEQNYTYITNVSGVHGTVLSPDSKFLYSADDTGNTLWTHSVDEDTGMVTYVANLTGPSPGSDPRHVAIHPSGKYLYVILEGTSQLAQYAIDQDRIPHLDETYALLYSGQSTAAFWADEVAVSANAKYLWASNRARDPSTPGLISAFSLAEDGCIIKQNFLLPTTSSGGISNILTPSPYDDKLVALTSNSTGSIEMWRMSSNESLARAVARLDLDDGGGCCSNAVWYE

SEQ ID NO: 6650 - DNA, 6587 bp, Muscodor strobelii
  misc_feature: SGI EST ID NO. CUFF.16745.0
  misc_feature: Variant of the nucleotide sequence at SEQ ID NO 6648
ctgcatctctcagatcttctaaaattgctttagcttttcttttgtcaatagctacccaacgtagtctgcctcgaatcgccatcgagctactacccgcagacgctgcgtgtaaacttttcaatgactccaaggcatcaacgttacgttccaggaactcgtagagcaagttgcgatacaatggggggaagagatcatcgaattcaacagtccgatagtcgaagctctgcttctgggtctgttcaatcagcaacttgaaacgctccaatttctctgcaagcctggcgatttccgccggcgcattgatgatggactgcgtgagattccatgctgctgctgcggctttagcagccacctcgacgacttgaacgaccgaagcagttgcgccaattgcgcttaatgggtccatggcagatcatgagcagtaatcattgcaatatatcgaaaaacgaacgataagctacatatcttaatagccaatcggaaggtagacttaattgacaagaggtgtttcacagcattaagttgtcaatctttgttgaggaagaaaattgattaatttgccatccttctcccctcatcaagagccctcccggtcacccagatgcacaatgttcgacaagacatgccaaaaacatcatctcagcgcctacttgtcgaatgagatgctacgatttcgcctctccccggccaacagacataccaaatgtggagaacctaccctaaagtactggtcagacgggagaccagccccacaccttttcgcaagctgtccatgagaaggctatcgagacgctgtccgaaatgcaaatcacacccagcgcattgacgctgcagcctgcaggtaagtctggtcatccaaattgaattttagggttgagtgcttcaacttggattccaagcttccattttcccttaaaacactcacgatcttgtctgaggtggctctcaaaagccttcagcttttccaactattttcaagcgccgagatcccgagcagttcaagagcgcaacctgatcctatcctatgacttcttagagacaagaaatcattgtctacctgaaacaaaacgatggagaaggaagtccttccaatcaatatttcgattgatctgttccagggcctcttgatccgctatagcaccctaatcgaatccatttcatcggacaagcgtgagtggacggggaaatcttccgtatcgtctaaatcattgctgatcgacgccagcggccaaacccgatcagaagtccctcattcagcttgatggatttcggtatcaagaagcggtggattcattcagatctgcaaaaccaaatcgtcagatgacacacgaggatgttaagaccttggtggaatggaaattgtaagtcgatgttttggcacgacaaagatgcacgcttcacgtgccagcactgccagatcgcaccgttatttttagctactttcctctgacgcatttagacgccatggcaaatttcgccctactctgatgaagctcgtttcttccaacgagagtagtactgtcgagaaaacaatccaacaagtgatgataaagtattggtccgttcaagacattctacaagctgtagatggtatttctaagctcaaggggattggccctgcgactgcatcgcttctgctctcggtacatgaccccaatcgagtcatcttcttctcggatgaagcattttggtggctatgttgcaacggacagaagtcgccgatcaaatacaacgccaaggagtatcagcaattaatagcagccgcaaacgagattatcaagagactgggagtgggcgctactgatgttgaaaaggtggcatacgtgttatttagagatgatcttggtcgttcccagccatccgcgactaatggccaagactctatgtccaaacagagcggaaattcagcggacaatgactcgggcaagctcagcgcaaaaaggaagaaagctccggccggagatgtgagcgacgttgctgtccgacgatctaaacgtgggaaagcttcctagtcctagtcctaccgggtcgttcggtggctagatggaaggacgagaacagaaactcattcatgacgccaatgcaagaggcacaatgtagcaggtgggataaccacaggctgcaaaaaagctctaaacaacaacttgcatgacgcatggaaatctcgctagcatcatcggtctgcaaggcacgttatcggtgagactatatttgttcgctctagaccttggggtctgctctcattggccattgcgatcgaaaacttccgagttggtagcattgctaactgagcggctcgacggcccgcggatgcgaacagcaacttccgaccgtgaaaacgacagtcgacgtaatgggcagccccgatcctttgtcggccaaatccaatgcatttgcatctctattaattgatcattattgaccttaaatctcattatactgtacgaataatccgcgactcgagccatagtgctctgtagggatcttcaaatacgaataatgcagtcaaaacgactagttcatcccacgcgcgtccgggaacgtcagccggagatcacaagcttatcatggggcgggtccctgaatgcagaatgcattccacccttaatggatcacctcacacaacatatctgacacggtggtcgtggcctaacatcatgttggtcaagctgcagggtcatggcatctgctgtggctcggtggttcagtcgatctcgaggaatttactgagaatggcagttgttcatcacatgccagttgctgtacaactcattgaacaatacgagactaattttagacgatatatgaacatcaaagcctagaacaagttcattgtcaatgctatcgaacgacggatcctgtggtgaagatacaacaaccgcacaatcggcggtgtgcagctattcgaagccccgaatccactcacaaaatctcgatatcgcacggaacgccagatcttgtcgtcgtccctcgggttagtagtgaatcatgtcgatactcgactcagagcctattgctctcgcgcctcgctttgccgcgatgaagagaaacatgatagcctgtcgagaaaaacaggttgcagagtcattctaccggctgctgcggcagctcagaaaagagacggagacaattgcatcctgcggatcagacattatacccgttatcgactacttcgacatccagaatagtaccaaagtgtcggcatttaaaaaggcagtgcaaaatcgaggtgttgccatcatcagacacgtcataccaccaaccgtggcacaatcatggaaagaggaaacgacggattacgtcaacgatagtccacagatgaggggccatctctggaatgattctcaactcttcaatatgtggtaggtatagaaacgtcccgcgcgagttattatttgaccgtacttataagacatcatgctaacttctttgtagtaagtaatctaatctataaaatatcggaaaccatcctttgtcttaaagctcgcagccgcgcctgcggggaaaatcgtgaaaaataactaatgcaatacctttcgggctaccagactggagtccagggcaagttagggctcgagctgattcgagattacttgatgctcagcgttttgctatgagtatctggcacaccacggacgaaactgcgctcgttagtagtaatcaccctgtcgcatatgccgaccgtctacacatccgaacgataggcgatacttctcttgcgatcggcccacatatcgacaatggcagtgtcgaaagatgggagccggatggttatggccaagcaggcacgtatcagcctatatttgacggccgatgggaggactacgacccgtgggatagtacctcgaggctccgcgtgacggctgacttatacaataaggctagctcttgtagtatgttcaggatgtttcagggatggctttccttgtcccagattccacctggagacgattctctgcttgtttgtcctatgctgcagctcactacagcataccttcttctccgtcccttcttcacgccccgttataagaatccggcttcaaataactttctacacccgagcaactggaatttgaatgtctcacaaacaagtgttcttcatggtgctgtcccgggctatacgcaagagttgagtatagcactccatccacacttggagcttaatcgcacgttggtgtcggttccgactctatctcccggcgactatgtaatctggcatccagatattattcacgcaacaggtcctttatatcccggaaccaatgcctggccgtcccgtacccctcgacctatctctgaatccagttttgattctggattcagcatagacagcaacggttccgcacacacaaatttgtcgacgacagttttatacgtgccggcttgcccacttacacaaaccaacgcattgtatctctcccgtcagcgtcgagccttcttactcggcctatccgcgccggatttttcacagtcaggaaattataatgcagcatctgaacgagaccacttagctcggccaggggttcaggatattagcgatgctggaggtgaagaaggactacgcagcatgggcttgacaccttgggaagaccgacgcattacccgaggaagtagtagttgggattctggaagaggcatttcacatgccgatgagttgtatagagacgagcgggaacagaaggaggtggagctcttgaggctcgcgaatgcgattttgtttccagatcgattcgacactttcgcaaagaatgggagacgatgaaatgaaaatgatcgcttgtagggaacgaaaaggccttgcgaattgtcaacagccttagtaatgcaaaaatgagtaatgatcactgaacatgaattgctcttatgaattgcgctttaaggagtttcaactattccggaacttgttctgaatagtctgaatttgcatatgtttcgatacagcataagtcaaagccacttcttttcgtggaggccgcattgcaattcattggtcgtcctacctcgtctaaacaacacagtcggtctcgcgatatctccgacgcagcgacagttaagttatgaacggcaagaatagcagaggttaaagtttggggaaaagggcgacaccctgaccctgcaatgaaaatcatgttcccatctacaacgtccccctcactctgctacccctcgtctccgtaagcgggtatgcttcattgtcgatctcggtaataagaggcatgcggactactctcatagcatttacactggcaattggattggcattcgtgtcagttctcagatacgatgtttcgtcttgcactttttccaagataacttgcagctgtaactttgcctcatagcacctcgccatgttgctcatgcagctctctgtacttgccgtcctcctactaggcgcacaggctcagattagcagactcatcattggaacattcagtactaagtttctttacacggttgaatatgatcacgaacaagaggcaatcagccttattggcaacacatcggtaccgtacgctggaaattggatagctctcgatcattcaaaatcgaatctctacacaacagcctacggccaatcaaacgttgctcagaatcccatgttcgtcagctactctctcgccaacgcaacatctataacccatcgtgccacaatctccgccggcggggactgcaaagcaacttcaatatttgtagttgccgatcctaacccaccattctgggtctacggcacctattttgcgtccgtgaagggtatcaatgcgggttgtggcacagtcttcgctgtagatgaacaggggaccatagccagcgtggagcagaattacacatacatcaccaacgtatctggcgttcacggaactgtcctatctcctgactctaagtttctatactcagcagacgacacgggaaatacactgtggacgcacagtgtcgacgaagacacgggcatggtaacatacgtcgcgaatctcactggaccctccccaggctcagacccgcggcacgtagcgattcaccccagcggtaaatatctctacgtcatcctcgaaggcacaagtcaacttgcgcaatacgccattgatcaagacagaattccccatctcgacgagacttatgctcttctatactcaggtcaaagcaccgcagcattttgggccgacgaagtcgccgtctcagctaacgccaagtacctctgggccagtaaccgggctcgagacccaagtacaccgggtttgatatctgcgttctcgttagctgaggatggctgtatcataaagcagaatttcctgctcccaactacctccagcggtgggatatcgaatatcctgaccccaagtccgtatgatgataagttagttgcgttgacgagtaactcgactgggagtattgagatgtggaggatgagctcaaatgagagcttggcgagggctgttgcacgcttggatttggatgatgggggcggatgttgttcgaatgctgtgtggtatgagtgacgagaatgagttcatgactttgcgatagggggaaaaatagcgttttcttttcatgaagactgaaaatttgatgcggacagcgcatgattcgaa

SEQ ID NO: 6651 - DNA, 1338 bp, Muscodor strobelii
  misc_feature: SGI cDNA ID NO. 561963
  misc_feature: Encodes the peptide sequence at SEQ ID NO 6652
atggacgaagcaaatagcggcacaaacacgaaggagcacgcaggaaggaagacgaggcgcacggataaaaagaagatgcgactcatttataagcagcaactagatgatgcagtgaacaataggctccctccagttgctcatcgcggggagtgtggaaactgcggccaaactaatcacagagccgctatctgtgtcgaccctagcccaagtggctggatggaggcgtgtccaaagtgcgatagcaaagagcatctatatgaactttgccccagtcgcgaccctcgtcaagattttgagtatctcattatcaatcgccagaggaaacctcctgtgaaatcgcgactaagtctaagcaaagttgtcaaaagggagctatcgagggagggtactgaacggcgtggccacgaaaggcttgatttgcgtaagtttgtagtccgcattttcttaacatactctcccttttacgctcgagtcgacttcaacgaaggtcccttcgtatggctgtaccctcatgccccagatccggctaaagaggctaagtcgcgaagttacgatccaatgagaatgtggtctaggtggcttcctttgcagttgcgggatgccgctgagtatgtgttgaaatacactggtgttggatggagcgagtatgatgacaagtacaaaaactatactcatagtgatccagaacatgaatatccccaccgaaaacgttctcctcgtgaggtgcaccagatagaagaattgctggcttttactcaacaaatctcaatgaacactaaggtgaataagcaacacattacagactacggaaacagcgtcatgaaagaaggctttctgggtcaggggtacgattctgatgacgatcttgatgatgagtctaatgacggttctgatgcggattccgaggacgatttcgaggacgataatgagaacgactttcagggagatatcgaggacgatacaatagacgagccaaaccctgaagatagcatcgcagaacaaagtcgcaagttgaacctcctgctagaacgacagaagcagaaggacagcgaaaggagtcacacgtggctcttcgcccccagagctgtcaaaaaagaagcagggcgagtcgccagggaaatgatagagcgtgtacatgcaaccgagaaggagaagagacaacgtgaacggcaggaaaaacaggagcataatcgaggtgtcaaggaactgacgaaacagctgaagatggaactgcatgaggagagaatggaagaagcgaggaagaagaaagcggagaggaaacaggccaaagcaaagtccagtcaggaggaagatatggtccttgactacggtgactaa

SEQ ID NO: 6652 - protein, 445 aa, Muscodor strobelii
  misc_feature: SGI Peptide ID NO. 561963
MDEANSGTNTKEHAGRKTRRTDKKKMRLIYKQQLDDAVNNRLPPVAHRGECGNCGQTNHRAAICVDPSPSGWMEACPKCDSKEHLYELCPSRDPRQDFEYLIINRQRKPPVKSRLSLSKVVKRELSREGTERRGHERLDLRKFVVRIFLTYSPFYARVDFNEGPFVWLYPHAPDPAKEAKSRSYDPMRMWSRWLPLQLRDAAEYVLKYTGVGWSEYDDKYKNYTHSDPEHEYPHRKRSPREVHQIEELLAFTQQISMNTKVNKQHITDYGNSVMKEGFLGQGYDSDDDLDDESNDGSDADSEDDFEDDNENDFQGDIEDDTIDEPNPEDSIAEQSRKLNLLLERQKQKDSERSHTWLFAPRAVKKEAGRVAREMIERVHATEKEKRQRERQEKQEHNRGVKELTKQLKMELHEERMEEARKKKAERKQAKAKSSQEEDMVLDYGD

SEQ ID NO: 6653 - DNA, 1197 bp, Muscodor strobelii
  misc_feature: SGI cDNA ID NO. 561964
  misc_feature: Reduced expression when VOC is produced
  misc_feature: Encodes the peptide sequence at SEQ ID NO 6654
atggcttttgaacttcacgtttggggcccggcactggggcttgattccattgatggtgaatgcctcgctgcaattgcttactttcgtcatgtgttaccctctcaaggctggtccctcgtagctagtaatgatgtgtcagtcagtccagacaatatccttcctgctctgtttcatgacaacacttggatatctgggtacatgaatatcatatcatacttgagacaccactcgacgtcacttggaaagccactgccagacgatgatctcactccgcagcaaaatgcagatctccttgcatactcatcctatctcacaacacgtggcgctggcctgatagcgttatcactctatgcctccccaaacgcctggatagatgtcactcgacccgcttatgccacactgttaacgttccccttgacatggaccgttcccttagcaattcgcaatgcggccatagagaaggcggaacatatgggcttcggctacctggccgaggaagccgagtctgaacaagagaatgcgcggaatgccgtcgagacaacgtccacaggatttctccgcctgcgccaacaactcggcctgaaagacaccatgcagccggaacagaaggccgccatccgcttgcagaaacttgcagatgacttcttcacaacgctagacgactcgctgcaaagcaacaaatacttcctggggacttcaggtccaacatcgcttgattttttagcttatgggtatctgtcggtgatgggagtagaaacgccatacccaattataagccgagcactgaagacaaacaaccgagcttccttcatcttccttcaaacaatggcatcaggattgaaagagtaccctctgccacgcaaagacccgattccgagaagcgttgtcggaagaacggcgacttttggagattttgtgattgagaacatcgcgggtgtaggtgatggttggaagaggtggcgtcgaggcggcatcaagccttatgacggagaggacgcacgaaatttgacgtcgatggtctttgcctttggtgggattgctgcggctctatcggcgatcggagcatcgattctgtctaagggcatggctcctgcaggtgctgaaactcaccgcttcgagccggacagaggcaacaaggggctggcgagatttggcgagctaggtgccatgcttgatggattaccgatatttgagtag

SEQ ID NO: 6654 - protein, 398 aa, Muscodor strobelii
  misc_feature: SGI Peptide ID NO. 561964
  misc_feature (3)..(391): NCBI GI: 46107620 Blast Desc: FG00693.1 [Gibberella zeae PH-1]
  misc_feature (1)..(256): NCBI GI: 240104880 Blast Desc: metaxin, [Coccidioides posadasii C735 delta SOWgp]
  misc_feature (1)..(256): NCBI GI: 119178493 Blast Desc: CIMG_08082 [Coccidioides immitis RS]
  misc_feature (1)..(265): NCBI GI: 159128927 Blast Desc: mitochondrial import receptor subunit (Tom37), [Aspergillus fumigatus A1163]
  misc_feature (1)..(265): NCBI GI: 70989333 Blast Desc: mitochondrial import receptor subunit (Tom37) [Aspergillus fumigatus Af293] gi|66847147|gb|EAL87478.1| mitochondrial import receptor subunit (Tom37), [Aspergillus
  misc_feature (1)..(266): NCBI GI: 212537783 Blast Desc: mitochondrial import receptor subunit (Tom37), [Penicillium marneffei ATCC 18224] gi|210068789|gb|EEA22880.1| mitochondrial import receptor subunit (Tom37), [Penicillium ATCC
  misc_feature (1)..(266): NCBI GI: 242808229 Blast Desc: mitochondrial import receptor subunit (Tom37), [Talaromyces stipitatus ATCC 10500] gi|218715745|gb|EED15167.1| mitochondrial import receptor subunit (Tom37), [Talaromyces ATCC
  misc_feature (1)..(282): NCBI GI: 156035563 Blast Desc: SS1G_12985 [Sclerotinia sclerotiorum 1980] gi|154698390|gb|EDN98128.1| SS1G_12985 [Sclerotinia sclerotiorum 1980]
  misc_feature (1)..(265): NCBI GI: 119479977 Blast Desc: mitochondrial import receptor subunit (Tom37), [Neosartorya fischeri NRRL 181] gi|119408171|gb|EAW18120.1| mitochondrial import receptor subunit (Tom37), [Neosartorya NRRL
  misc_feature (1)..(263): NCBI GI: 121710370 Blast Desc: mitochondrial import receptor subunit (Tom37), [Aspergillus clavatus NRRL 1] gi|119400951|gb|EAW11375.1| mitochondrial import receptor subunit (Tom37), [Aspergillus NRRL
  misc_feature: Useful for introducing or modulating the production of volatile compounds
MAFELHVWGPALGLDSIDGECLAAIAYFRHVLPSQGWSLVASNDVSVSPDNILPALFHDNTWISGYMNIISYLRHHSTSLGKPLPDDDLTPQQNADLLAYSSYLTTRGAGLIALSLYASPNAWIDVTRPAYATLLTFPLTWTVPLAIRNAAIEKAEHMGFGYLAEEAESEQENARNAVETTSTGFLRLRQQLGLKDTMQPEQKAAIRLQKLADDFFTTLDDSLQSNKYFLGTSGPTSLDFLAYGYLSVMGVETPYPIISRALKTNNRASFIFLQTMASGLKEYPLPRKDPIPRSVVGRTATFGDFVIENIAGVGDGWKRWRRGGIKPYDGEDARNLTSMVFAFGGIAAALSAIGASILSKGMAPAGAETHRFEPDRGNKGLARFGELGAMLDGLPIFE

SEQ ID NO: 6655 - DNA, 2172 bp, Muscodor strobelii
  misc_feature: SGI EST ID NO. CUFF.16706.0
  misc_feature: Variant of the nucleotide sequence at SEQ ID NO 6653
tgcgggtcttgaatctcttcaatagatcgcccgaagtcccggtgtgttcgcaagaaacccggtctctgctcgttacgtatctgcaagtgatgtttctcattcaatgaacaggaaaatatgttgtgatcttcagaaatgccaggacagagtttcatcacaccatgctctgtagataggcaattctttgagatgtgtcattttcatggcatttccaacaatcgcacaattcgatgctcttggtgcggtgtcctgattggtggagtaaagcactgacgtcaatagtcaatttccttcggcagcacgtggacagaccctgaaattcctgaaacaccgccattaactgagattagaccagattttcgatctgcccatgttgccccagactactcagacgccatcaacaccaatcgcacaaatccatctgcgatctcactaccgtttcgggcattccgtgcgtcttgggaccgatcttcggccctcaatcttgcagatcgataggcgcatctccatcatcctttagtgagatctccacgaacttgtccgaactgttgaactgccgagttgttaagctgccaaggctgcgatatcctgtctcgcctgttgcgtctcttgaagttgcattccaggctccacgttcggtcaacatccagtccgacgaccgaaatcatctgctcctttcacccgcttaccagtagaaactacgaggaatcaatatctgctccaccccatcggcctttcgccacctcacggctgtgccgtggatatccttgaaaatggcttttgaacttcacgtttggggcccggcactggggcttgattccattgatggtgaatgcctcgctgcaattgcttactttcgtcatgtgttaccctctcaaggctggtccctcgtagctagtaatgatgtgtcagtcagtccagacaatatccttcctgctctgtttcatgacaacacttggatatctgggtacatgaatatcatatcatacttgagacaccactcgacgtcacttggaaagccactgccagacgatgatctcactccgcagcaaaatgcagatctccttgcatactcatcctatctcacaacacgtggcgctggcctgatagcgttatcactctatgcctccccaaacgcctggatagatgtcactcgacccgcttatgccacactgttaacgttccccttgacatggaccgttcccttagcaattcgcaatgcggccatagagaaggcggaacatatgggcttcggctacctggccgaggaagccgagtctgaacaagagaatgcgcggaatgccgtcgagacaacgtccacaggatttctccgcctgcgccaacaactcggcctgaaagacaccatgcagccggaacagaaggccgccatccgcttgcagaaacttgcagatgacttcttcacaacgctagacgactcgctgcaaagcaacaaatacttcctggggacttcaggtccaacatcgcttgattttttagcttatgggtatctgtcggtgatgggagtagaaacgccatacccaattataagccgagcactgaagacaaacaaccgagcttccttcatcttccttcaaacaatggcatcaggattgaaagagtaccctctgccacgcaaagacccgattccgagaagcgttgtcggaagaacggcgacttttggagattttgtgattgagaacatcgcgggtgtaggtgatggttggaagaggtggcgtcgaggcggcatcaagccttatgacggagaggacgcacgaaatttgacgtcgatggtctttgcctttggtgggattgctgcggctctatcggcgatcggagcatcgattctgtctaagggcatggctcctgcaggtgctgaaactcaccgcttcgagccggacagaggcaacaaggggctggcgagatttggcgagctaggtgccatgcttgatggattaccgatatttgagtaggccatcgtatatcggtggcaatcggaagcatagaggtttcagcattgacgtggcttggctttccggccttcgctgactgctgccataagtgggagccagatgttttgtacgatatttgttgtatatcaaaatggcaatgtactacagcgttaaggaacaatcagatacatatgaattaatcttaataccctcttacctgttc

SEQ ID NO: 6656 - DNA, 360 bp, Muscodor strobelii
  misc_feature: SGI cDNA ID NO. 561965
  misc_feature: Reduced expression when VOC is produced
  misc_feature: Encodes the peptide sequence at SEQ ID NO 6657
gaagacgacaacctgttcgtccagagtcctgcagacgacagcacggcgcccccaccagccaagcgccgcaaggctgccgacgacaacgacccggatgatctagcctccgatgacaaaaagaagatggccatggacatatcctacgagggcttttctatttacggccgcgtgctctgcctcgtagtcaagcgccgagacaccgccaccgggcccgatctggcggctcgcagcggcaacgcaggcaccgcggcggctacgggagggcccgggagcaacgcagccaggccacagggccaagccatgatggagaactttatcatttccacccaagtacctgctggtattgacgggatgccatga

SEQ ID NO: 6657 - protein, 119 aa, Muscodor strobelii
  misc_feature: SGI Peptide ID NO. 561965
  misc_feature (1)..(112): NCBI GI: 85114743 Blast Desc: NCU00921 [Neurospora crassa OR74A] gi|28926540|gb|EAA35511.1| conserved [Neurospora crassa OR74A] gi|38567294|emb|CAE76583.1| [Neurospora crassa]
  misc_feature (2)..(112): NCBI GI: 171694860 Blast Desc: protein product [Podospora anserina] gi|170947672|emb|CAP59834.1| protein product [Podospora anserina]
  misc_feature (1)..(116): NCBI GI: 46107616 Blast Desc: FG00691.1 [Gibberella zeae PH-1]
  misc_feature (35)..(111): NCBI GI: 145614070 Blast Desc: MGG_01166 [Magnaporthe grisea 70-15] gi|145021045|gb|EDK05174.1| MGG_01166 [Magnaporthe grisea 70-15]
  misc_feature (13)..(116): NCBI GI: 156035549 Blast Desc: SS1G_12978 [Sclerotinia sclerotiorum 1980] gi|154698383|gb|EDN98121.1| SS1G_12978 [Sclerotinia sclerotiorum 1980]
  misc_feature (5)..(112): NCBI GI: 261358882 Blast Desc: conserved [Verticillium albo-atrum VaMs.102]
  misc_feature (2)..(84): NCBI GI: 116182646 Blast Desc: CHGG_01951 [Chaetomium globosum CBS 148.51] gi|88186248|gb|EAQ93716.1| CHGG_01951 [Chaetomium globosum CBS 148.51]
  misc_feature (13)..(116): NCBI GI: 154312449 Blast Desc: BC1G_05827 [Botryotinia fuckeliana B05.10] gi|150849928|gb|EDN25121.1| BC1G_05827 [Botryotinia fuckeliana B05.10]
  misc_feature (13)..(112): NCBI GI: 258577327 Blast Desc: conserved [Uncinocarpus reesii 1704] gi|237903111|gb|EEP77512.1| conserved [Uncinocarpus reesii 1704]
  misc_feature (19)..(113): NCBI GI: 169596050 Blast Desc: SNOG_00774 [Phaeosphaeria nodorum SN15] gi|160701217|gb|EAT92269.2| SNOG_00774 [Phaeosphaeria nodorum SN15]
  misc_feature: Useful for introducing or modulating the production of volatile compounds
EDDNLFVQSPADDSTAPPPAKRRKAADDNDPDDLASDDKKKMAMDISYEGFSIYGRVLCLVVKRRDTATGPDLAARSGNAGTAAATGGPGSNAARPQGQAMMENFIISTQVPAGIDGMP

SEQ ID NO: 6658 - DNA, 1518 bp, Muscodor strobelii
  misc_feature: SGI EST ID NO. CUFF.16629.0
  misc_feature: Variant of the nucleotide sequence at SEQ ID NO 6656
aagacgacaacctgttcgtccagagtcctgcagacgacagcacggcgcccccaccagccaagcgccgcaaggctgccgacgacaacgacccggatgatctagcctccgatgacaaaaagaagatggccatggacatatcctacgagggcttttctatttacggccgcgtgctctgcctcgtagtcaagcgccgagacaccgccaccgggcccgatctggcggctcgcagcggcaacgcaggcaccgcggcggctacgggagggcccgggagcaacgcagccaggccacagggccaagccatgatggagaactttatcatttccacccaagtacctgctggtattgacgggatgccatgagtcagtgagtgcgcggacagaatgacaccgagattaggcacacattgcatacgaaaattagacatctcaataattataggtgattgtgagttgttccattcagccacgatcgcccgcgtatgcgatgtcacgtcaatcaatcatgatcaacaagccgcgctgcggagcggcagaccaaatactccggtcggcggtgggagttcccgggtggcgcttgcctgcgctccccctttcctcgtgggggcgatgcgatgcaactttgttgtgtttatatttggagatttccgggggaacacggcattgctgctgccgtcagcaactctggtactaccgttacattgagatgtaggcgcgcatgtaacgccacaccaacaacaactaccaacagctaaacgcctaccatcagccgcccccaggttgccattttgcctatgcgaggacgggcaaagaaggcagagactttgtgttgtgtttactagaggcatgcggcatgcggcttatctgcatatactgactcaacctccccatggtccccgtgccgtcaccgcgattcattctgaagtctgggtttcgaccccaatggcccccaacgtcgtatgatcccgtgcggaatcattggggaatagtgatctagactgcgacagaacaccttgctcatcgtgcctcagacgtcagtgtgatgacggagacggggtaggtaagctgactgctgtgagattgaagatgcatcgacgggaactatcagcacgatgaaacgaagcggtttgacgactttgcggctgggaagaagggcttgcggccgcgtttacgagatgcattgtgtacatgccgtgtcaacaacagtagccaaggccacacacgatgcagtcagacggcattggggattcaaagtttcatgcatatgaggcgaaggaagaaagcatatcgcgatgacgctattggacaatctcgagagtatgagactgtccatttaggtataatcagcttcaagaattaatcactgttgaaccagcaatatagtatgtttacagtcgtagctgagagccagatgttcttcagagaaacaaaactgtacccaagctcattccttgaatgtttcattggcacacataaccatatattgcgaagataggtggtatggaaagaaacaggacatcaa

SEQ ID NO: 6659 - DNA, 1749 bp, Muscodor strobelii
  misc_feature: SGI cDNA ID NO. 561966
  misc_feature: Encodes the peptide sequence at SEQ ID NO 6660
atgtcaattaaaagaaagccggtcggactgtcggcttctgcggtgtcgacgccggcagcctcgggccctacatccaagtctaaaaagcgggtgtcatcgatatctagcatattatctgcatattcacacagttcgacagattcaacacaacgatcatcacatgagagtgattttaccaaagatagcgagccttcgtattcaccagaaaggcaagacttagagatcccaccaccagtaccaacaaagatctttggggataacacgaaaaagaatttgagcaatggtgttaatgagggtacagaaagcaaaattgtcgacgctttcccgccaccaccttcattcaaagatgttttcagaccgcagacaccaattaaagggtcggatgcattagaaaataggggaaaggaagggtctgaatcttcaccacagtccggagtaagcgggtccccgagtgcagtcggccgggagatatggaggaggagggcgtcctcaaaatcagaccgtagcctaatcattactgagctcaagcttcctgtatcgaacggggcaacaacagcaccctcactttttcctgttgccaaagttaaagcggacccagctgctcctcttccacctcccaaaccgataaatagccaagcaacaacacctttacctccgagaaccgcttctctaccaggtaaaaacattcgtccccttaaacctacagaatcagcggaagaagaggacgacatggagaagctaaagctgggcaagctcagggagcttcttcgcagtggaagcaaggagcacaatcaaacctcgacagggcaatccgtatcggaaaaagacacaaagagcaacgacaacaagctttcagccaagggtcttcccagcttgcccaacgatgccactaagcttgatgctgcgccggcggcgccaccaaaggaggccgcgaaacctacctcaattgctcgtcgtccagtcggcgggcaattggatttagcaaagaaatcaagtaaacctaacctgaagccactgacccttccccacccaagtcagcgaccttccccaggttaccactcagatggtcaagataagatcaaatctccagcatcgcaagaaacgggtgaggcaaagagcagccctaaaaacaaaaccgagtctcgaccagagccccctatgtctttgtcacagtctgccgtgccttccattcaaccttcaactctacttcatcaggatgttgcttaccctccaaccaaagctgcttctttatcgacacgtaaccacgaagagaatcttacaactctgtatcctacagagccacccatttttgagcgatcggccgctctctccgacgtccaagaagcttctgagactagcctgaccttggtacccaaggacctagatgattctctaagtgcggagtgcgttcttgccctctccaagtttccgcgcaatcaaccgaaaactgtccagcccacagcaaatggcatttggcctgcgtttcctctcggagataaacactacaactgctacaaaaatcataaccggttcatcatgtcgcgaaatatgcaccactcgctttcatgccagatgtgtcatgttcctgataataagccgcgccgagtttgcgactggtgcaatttgcgcatctgtgtcccatgtcacgatcttctgactgcgaatggacgcgatcttcgaggaacgatgggtttactcaagggaaagaccccggccagtcacgagtcggagaccatgaaagctgcctaa

SEQ ID NO: 6660 - protein, 582 aa, Muscodor strobelii
  misc_feature: SGI Peptide ID NO. 561966
  misc_feature (18)..(560): NCBI GI: 85083912 Blast Desc: NCU00085 [Neurospora crassa OR74A] gi|28918297|gb|EAA27973.1| [Neurospora crassa OR74A]
  misc_feature (486)..(560): NCBI GI: 256732726 Blast Desc: NECHADRAFT_38925 [Nectria haematococca mpVI 77-13-4]
  misc_feature (472)..(581): NCBI GI: 145614360 Blast Desc: MGG_10142 [Magnaporthe grisea 70-15] gi|145021297|gb|EDK05426.1| MGG_10142 [Magnaporthe grisea 70-15]
  misc_feature (473)..(567): NCBI GI: 46125303 Blast Desc: FG07029.1 [Gibberella zeae PH-1]
  misc_feature (501)..(559): NCBI GI: 169595050 Blast Desc: SNOG_00258 [Phaeosphaeria nodorum SN15] gi|160701000|gb|EAT91753.2| SNOG_00258 [Phaeosphaeria nodorum SN15]
  misc_feature (501)..(563): NCBI GI: 189202896 Blast Desc: [Pyrenophora tritici-repentis Pt-1C-BFP] gi|187984883|gb|EDU50371.1| [Pyrenophora tritici-repentis Pt-1C-BFP]
  misc_feature (488)..(575): NCBI GI: 238508491 Blast Desc: conserved [Aspergillus flavus NRRL3357] gi|220688957|gb|EED45309.1| conserved [Aspergillus flavus NRRL3357]
  misc_feature (496)..(581): NCBI GI: 238845226 Blast Desc: conserved [Microsporum canis CBS 113480]
  misc_feature (33)..(263): NCBI GI: 116192169 Blast Desc: CHGG_05802 [Chaetomium globosum CBS 148.51] gi|88181715|gb|EAQ89183.1| CHGG_05802 [Chaetomium globosum CBS 148.51]
  misc_feature (488)..(575): NCBI GI: 169784380 Blast Desc: [Aspergillus oryzae RIB40] gi|83775398|dbj|BAE65518.1| protein product [Aspergillus oryzae]
MSIKRKPVGLSASAVSTPAASGPTSKSKKRVSSISSILSAYSHSSTDSTQRSSHESDFTKDSEPSYSPERQDLEIPPPVPTKIFGDNTKKNLSNGVNEGTESKIVDAFPPPPSFKDVFRPQTPIKGSDALENRGKEGSESSPQSGVSGSPSAVGREIWRRRASSKSDRSLIITELKLPVSNGATTAPSLFPVAKVKADPAAPLPPPKPINSQATTPLPPRTASLPGKNIRPLKPTESAEEEDDMEKLKLGKLRELLRSGSKEHNQTSTGQSVSEKDTKSNDNKLSAKGLPSLPNDATKLDAAPAAPPKEAAKPTSIARRPVGGQLDLAKKSSKPNLKPLTLPHPSQRPSPGYHSDGQDKIKSPASQETGEAKSSPKNKTESRPEPPMSLSQSAVPSIQPSTLLHQDVAYPPTKAASLSTRNHEENLTTLYPTEPPIFERSAALSDVQEASETSLTLVPKDLDDSLSAECVLALSKFPRNQPKTVQPTANGIWPAFPLGDKHYNCYKNHNRFIMSRNMHHSLSCQMCHVPDNKPRRVCDWCNLRICVPCHDLLTANGRDLRGTMGLLKGKTPASHESETMKAA

SEQ ID NO: 6661 - DNA, 2514 bp, Muscodor strobelii
  misc_feature: SGI EST ID NO. CUFF.16638.0
  misc_feature: Variant of the nucleotide sequence at SEQ ID NO 6659
gtcgctcaaggttctcaaaagccttaccgactcctccgcctaggctagaatctttacgaaaactgcccgctatcccaccagcgccgattcctctcaggaaagatacagttttagtgaaaagtaaatctactactaaccttcagacgaaagtagtcgattcgcctttaccagctctgccagcaatgtcaattaaaagaaagccggtcggactgtcggcttctgcggtgtcgacgccggcagcctcgggccctacatccaagtctaaaaagcgggtgtcatcgatatctagcatattatctgcatattcacacagttcgacagattcaacacaacgatcatcacatgagagtgattttaccaaagatagcgagccttcgtattcaccagaaaggcaagacttagagatcccaccaccagtaccaacaaagatctttggggataacacgaaaaagaatttgagcaatggtgttaatgagggtacagaaagcaaaattgtcgacgctttcccgccaccaccttcattcaaagatgttttcagaccgcagacaccaattaaagggtcggatgcattagaaaataggggaaaggaagggtctgaatcttcaccacagtccggagtaagcgggtccccgagtgcagtcggccgggagatatggaggaggagggcgtcctcaaaatcagaccgtagcctaatcattactgagctcaagcttcctgtatcgaacggggcaacaacagcaccctcactttttcctgttgccaaagttaaagcggacccagctgctcctcttccacctcccaaaccgataaatagccaagcaacaacacctttacctccgagaaccgcttctctaccaggtaaaaacattcgtccccttaaacctacagaatcagcggaagaagaggacgacatggagaagctaaagctgggcaagctcagggagcttcttcgcagtggaagcaaggagcacaatcaaacctcgacagggcaatccgtatcggaaaaagacacaaagagcaacgacaacaagctttcagccaagggtcttcccagcttgcccaacgatgccactaagcttgatgctgcgccggcggcgccaccaaaggaggccgcgaaacctacctcaattgctcgtcgtccagtcggcgggcaattggatttagcaaagaaatcaagtaaacctaacctgaagccactgacccttccccacccaagtcagcgaccttccccaggttaccactcagatggtcaagataagatcaaatctccagcatcgcaagaaacgggtgaggcaaagagcagccctaaaaacaaaaccgagtctcgaccagagccccctatgtctttgtcacagtctgccgtgccttccattcaaccttcaactctacttcatcaggatgttgcttaccctccaaccaaagctgcttctttatcgacacgtaaccacgaagagaatcttacaactctgtatcctacagagccacccatttttgagcgatcggccgctctctccgacgtccaagaagcttctgagactagcctgaccttggtacccaaggacctagatgattctctaagtgcggagtgcgttcttgccctctccaagtttccgcgcaatcaaccgaaaactgtccagcccacagcaaatggcatttggcctgcgtttcctctcggagataaacactacaactgctacaaaaatcataaccggttcatcatgtcgcgaaatatgcaccactcgctttcatgccagatgtgtcatgttcctgataataagccgcgccgagtttgcgactggtgcaatttgcgcatctgtgtcccatgtcacgatcttctgactgcgaatggacgcgatcttcgaggaacgatgggtttactcaagggaaagaccccggccagtcacgagtcggagaccatgaaagctgcctaagatccgcttggtgattcatcctacgaacttcgaccgacatttcgagatgcatcattcgacttacgtctagagcaacgacaccttatcgtggttgccgttgttcttttttattttgtacaaacttcaattcttgcacaaattttggtactataaacgacatcgattcagacttctacaaaggagcacttacaaacccctggaggactgcaatatgggcattgtgtcgcctccggatgcagacgggcctggattatgtatggggacgtatgaagaactcggctcaaggatataggcgttttgcatgaaaaggagataccaggatgatatatttggcttttgcttaggcacaagttacgttagagacacctgatgaatgatgtggtcactattggaacattcagaacagagaaccacacggtttttgtgaagggagttgtctgtatggatcggcaggatgaaagatcaatagcaaccgtaggcttttcacgaccagctagggataattcttacgtcttatcaccatgttagctgtaagcatgccgtacgaaatagattcgcattggcaaccaaagcaacactgaac

SEQ ID NO: 6662 - DNA, 2937 bp, Muscodor strobelii
  misc_feature: SGI cDNA ID NO. 561967
  misc_feature: Elevated expression when VOC is produced
  misc_feature: Encodes the peptide sequence at SEQ ID NO 6663
atggatcctgttacagccattggcctggcctcggctatcctcagctttgtcgacattacttggaaagtgactaagtcaacgattgagatatatcattcggctgaaggtacctcggatgaaaatgtccgtgtgaaaatgagcacgcttgaattcaaatccctcaccacgagactccagaagtgtgattcagaaacgaatggcgaatctaaagtcgaatctgagtccgagaaagccatccgggtgttagccaagcaatgcgaacgtgacgctaataagctcttgagcattctcacctacgtcgaagctgataccaagaagtctatctggtcggcggtcaaatccgcgattaaattaatgctgaagatgggcgacatcaaggatattaagcaaagagtaaaagacgcacagtccgagatctgcgttcatctctcttcattaatcagagagagacagtctgaattttacgaaagctttgaaagctttcgcaaagacaatgccgaattcagagtgtcttctgccaaaaaaatcgacactattctcgctgaaatcgaaaagatgaaagccggcgcagaccagtgtcgcttgaagaaggtgaggtatgagattgactctttcatagccacgttgtctgctatacctttgcaacatcgcatcctgcgtcagcttcatttcgagacgatcaacacgcgaagattacaaatcaggaaatcagatttggtgacttgctcatggatctacgaagagtctaacgaaggcgaaaagagctccatttcaagattacgccacgaagcaagcgtaaaaattcgggaatggctagaaaatggacaaggcgtcttgcatattaccggcaaaacagggtcagggaagtcaacaatcatagacttcctcgctaagcaccaagaaactcttgaacatctccagagatgggcagacacaaaaccaatggtaattaccgctttctattcctacaaagccgccagggatccgttgcagaagtccctgcagggtctgtaccgtacgattttgtttcaggctctcacaagcgaccctgacatgacgaaacggatattcccattgcaataccagaagtacaagaatatcggcggggaccgggacgtcgagaggatggatttcgacgaaactgatattgaagaaggttttcatctcctccttaagactatcgatgccctgaatcatcggtactgcatttttattgacggccttgacgagtttgacggagatcccattgatcagcataacttaacgaccgagttgtgcacgtggtcccaaaaaagctcggtaaagatctgttcgtcatctagaccatacgctgagcacatcgaggtcgtcaatcggttcaaatccccgatcatcgatctagcagagctcaatgagcctgaaattcgctcgtattgccgcgaatccttttccgaacaccacaaggtgaaagaaatcaattttgattactccgacatcgtggagaagattgcgaagagggctcagggagtttttctttgggctcggacggtaactcgcattctcctcagagaagtcagaatcgaaaatctcccggacgtccggtcggcaggtctctctgcgaagcttgaccaactcccagggaatatgagccagctatactcagaaatgctcccagatcttggttcaagcaccatcgatcgaagaagagccatcgagatgctgctactcgcagcttggcgaccggatcgttgcgatctttctgcaatagctttctcctggatctacgacgacaacggtattaactataatgagtttccctttctgcagaatagcaggccgtatacggagaagcagattgaatctagggggatagcggtaaaaagcaatgccaatgtgctcactcgcggcctcttagaagtatacgagcttgaaagatggaatggacatcttacaggaggtattttccgcctcggggtacagttttttcacaggactgcttgggattatgttcgtgagaagattgaacgcagttctgggttccacgacatttcagacgacgaactatatcagaaagttttccttggtcagcttatcttcgggcgtgaaactttccgagactcgcggcttctgcaagaatatctattgaactgtatcgctagcatagaaagagagaagaggttagacttcatccaacaagcgcagagagtggtcgatggctggcaggatgaatatgaccaatggaaggaaagtgatgaggccgacaaaggacagtttcctgtttctttccatggtgtttttgtgccgattctcgacaggcgtcaagaacttgaactgccttccaagggacggtatcgcgctgcatcggtacttcatttagcgttcagtgaagatcctaccgatgacttctcgtgcaagaaagtatcgagcgacctaagcttctttggtactgttttgatgcaaaactctatcgtgtccgtctttaaggcagaagacatgattaggcgatcgcaggttgacctaaacgaactgctagatctccaaatcttgtctggatctcaaaatgagtggtgtacggaaacgtgcccgatatggtttgtaggctttgtggcagcattccaatgccttgagagcaaacctgtgctggcgaaagagatgggaggtaacataaaggagtggactgctttagctatgcactgtttgctccacggcctcaacgagcagaacagtgtatccatcattgatgtcagcgatcgccgcattgacctgatacccgaagaagacttcgaaaatggaaatgtggctaatttagccaggcgcttagcccctgcacaagaggaattgactgaagagcgtcttgaacgtgcgttgaaggcgcatctcaatattggagtcgcaacccctgggtccgtatctggtgagcctgatgccagtctctcgaatggcgatggtaaaagctag

SEQ ID NO: 6663 - protein, 978 aa, Muscodor strobelii
  misc_feature: SGI Peptide ID NO. 561967
  misc_feature (253)..(757): NCBI GI: 212540446 Blast Desc: conserved [Penicillium marneffei ATCC 18224] gi|210067677|gb|EEA21769.1| conserved [Penicillium marneffei ATCC 18224]
  misc_feature (1)..(663): NCBI GI: 261190024 Blast Desc: conserved [Ajellomyces dermatitidis SLH14081] gi|239591250|gb|EEQ73831.1| conserved [Ajellomyces dermatitidis SLH14081]
  misc_feature (1)..(665): NCBI GI: 156048628 Blast Desc: SS1G_09046 [Sclerotinia sclerotiorum 1980] gi|154693442|gb|EDN93180.1| SS1G_09046 [Sclerotinia sclerotiorum 1980]
  misc_feature (1)..(662): NCBI GI: 46111055 Blast Desc: FG02409.1 [Gibberella zeae PH-1]
  misc_feature (1)..(664): NCBI GI: 226293863 Blast Desc: conserved [Paracoccidioides brasiliensis Pb18]
  misc_feature (1)..(664): NCBI GI: 225684243 Blast Desc: conserved [Paracoccidioides brasiliensis Pb03]
  misc_feature (4)..(632): NCBI GI: 169616506 Blast Desc: SNOG_11426 [Phaeosphaeria nodorum SN15] gi|160703200|gb|EAT81134.2| SNOG_11426 [Phaeosphaeria nodorum SN15]
  misc_feature (1)..(584): NCBI GI: 169606622 Blast Desc: SNOG_06357 [Phaeosphaeria nodorum SN15] gi|160707042|gb|EAT86188.2| SNOG_06357 [Phaeosphaeria nodorum SN15]
  misc_feature (1)..(666): NCBI GI: 256722300 Blast Desc: NECHADRAFT_54363 [Nectria haematococca mpVI 77-13-4]
  misc_feature (1)..(571): NCBI GI: 171692629 Blast Desc: protein product [Podospora anserina] gi|170946263|emb|CAP73064.1| protein product [Podospora anserina]
  misc_feature: Useful for introducing or modulating the production of volatile compounds
MDPVTAIGLASAILSFVDITWKVTKSTIEIYHSAEGTSDENVRVKMSTLEFKSLTTRLQKCDSETNGESKVESESEKAIRVLAKQCERDANKLLSILTYVEADTKKSIWSAVKSAIKLMLKMGDIKDIKQRVKDAQSEICVHLSSLIRERQSEFYESFESFRKDNAEFRVSSAKKIDTILAEIEKMKAGADQCRLKKVRYEIDSFIATLSAIPLQHRILRQLHFETINTRRLQIRKSDLVTCSWIYEESNEGEKSSISRLRHEASVKIREWLENGQGVLHITGKTGSGKSTIIDFLAKHQETLEHLQRWADTKPMVITAFYSYKAARDPLQKSLQGLYRTILFQALTSDPDMTKRIFPLQYQKYKNIGGDRDVERMDFDETDIEEGFHLLLKTIDALNHRYCIFIDGLDEFDGDPIDQHNLTTELCTWSQKSSVKICSSSRPYAEHIEVVNRFKSPIIDLAELNEPEIRSYCRESFSEHHKVKEINFDYSDIVEKIAKRAQGVFLWARTVTRILLREVRIENLPDVRSAGLSAKLDQLPGNMSQLYSEMLPDLGSSTIDRRRAIEMLLLAAWRPDRCDLSAIAFSWIYDDNGINYNEFPFLQNSRPYTEKQIESRGIAVKSNANVLTRGLLEVYELERWNGHLTGGIFRLGVQFFHRTAWDYVREKIERSSGFHDISDDELYQKVFLGQLIFGRETFRDSRLLQEYLLNCIASIEREKRLDFIQQAQRVVDGWQDEYDQWKESDEADKGQFPVSFHGVFVPILDRRQELELPSKGRYRAASVLHLAFSEDPTDDFSCKKVSSDLSFFGTVLMQNSIVSVFKAEDMIRRSQVDLNELLDLQILSGSQNEWCTETCPIWFVGFVAAFQCLESKPVLAKEMGGNIKEWTALAMHCLLHGLNEQNSVSIIDVSDRRIDLIPEEDFENGNVANLARRLAPAQEELTEERLERALKAHLNIGVATPGSVSGEPDASLSNGDGKS

SEQ ID NO: 6664 - DNA, 619 bp, Muscodor strobelii
  misc_feature: SGI EST ID NO. CUFF.16654.0
  misc_feature: Variant of the nucleotide sequence at SEQ ID NO 6662
cgctagagtcgtttggcgacatggcctcaaggtcttcttggcgtacctttcccgtgctgttcaggatcgcagtcccggtgtcctcatttcttctcttgtctttcatatcgagctcgactgatattttgaggacatggatcctgttacagccattggcctggcctcggctatcctcagctttgtcgacattacttggaaagtgactaagtcaacgattgagatatatcattcggctgaaggtacctcggatgaaaatgtccgtgtgaaaatgagcacgcttgaattcaaatccctcaccacgagactccagaagtgtgattcagaaacgaatggcgaatctaaagtcgaatctgagtccgagaaagccatccgggtgttagccaagcaatgcgaacgtgacgctaataagctcttgagcattctcacctacgtcgaagctgataccaagaagtctatctggtcggcggtcaaatccgcgattaaattaatgctgaagatgggcgacatcaaggatattaagcaaagagtaaaagacgcacagtccgagatctgcgttcatctctcttcattaatcagagagagacagtctgaattttacgaaagctttgaaagctttcgc

SEQ ID NO: 6665 - DNA, 942 bp, Muscodor strobelii
  misc_feature: SGI cDNA ID NO. 561968
  misc_feature: Encodes the peptide sequence at SEQ ID NO 6666
atgaacggaacttcggccatcatcatcgccaccgccatggagccacttcgcgagttttctctgttcccaaaactgccgaccgaactaagatttctcatttgggagttcgccattttgaatcacaacagagatcgattggttcccttgaacgaggtcaccaacagagtcatttgtatccgtaatctcgcatgctccccacacttccgagcaacgcgcgagagccgcgcagaggctaaacgtctttaccctatccggcttcacgtttcaaaaatggtcgtacatttacgaggagatgcacatgttcgatgggtagatgaccatgttgaaactgatatgagtaggtacgcacataaaggccaggtcgtttacctcagcgcaaagcacgacatctttgtagttcgcgtcggtagactaggaggattcgataagatgtttcatttgctctttgagagaaacttcgggggccgcggcccctgccgccaagggaacttcggctatagatcgcaaagcctatcatcgctgcagtgcgccgatgtgcgccgtcttatggttttcgacgagcaggataaagagttgagcaaacccggatgtcttggcaacgctaattgcgttgtcaaaacccgcgcgtcaaggtatggcttcgacaggacttggtaccagaaagctattttccctaatgtacagaaaattctctacgctgttttcgacaacgagcgcgtagagagtacgcacatgtacctttatctactcgagtacactggccatcggatgctaaaatgtctggcgagggaaaattggttggcttgctttgatgcagacgattttgaaacgcatctcaggagcggtctttcttctgcatgcgtctgcgatgagtccattcgtcgtcggagaacgttgacggccgaggaagggaaaggacggtatgaagctcatggcatctaa

SEQ ID NO: 6666 - protein, 313 aa, Muscodor strobelii
  misc_feature: SGI Peptide ID NO. 561968
MNGTSAIIIATAMEPLREFSLFPKLPTELRFLIWEFAILNHNRDRLVPLNEVTNRVICIRNLACSPHFRATRESRAEAKRLYPIRLHVSKMVVHLRGDAHVRWVDDHVETDMSRYAHKGQVVYLSAKHDIFVVRVGRLGGFDKMFHLLFERNFGGRGPCRQGNFGYRSQSLSSLQCADVRRLMVFDEQDKELSKPGCLGNANCVVKTRASRYGFDRTWYQKAIFPNVQKILYAVFDNERVESTHMYLYLLEYTGHRMLKCLARENWLACFDADDFETHLRSGLSSACVCDESIRRRRTLTAEEGKGRYEAHGI

SEQ ID NO: 6667 - DNA, 1620 bp, Muscodor strobelii
  misc_feature: SGI cDNA ID NO. 561969
  misc_feature: Reduced expression when VOC is produced
  misc_feature: Encodes the peptide sequence at SEQ ID NO 6668
atgtcttcctcgacggggctgagccgcacgcgctcgctgaggaaccctcagacaaaaagcaatattccagcatacaatgagcctggcagtccgagccgcctgcgcagtgatgcgactcgaaatgtatcaccaagtcggctgcccatgaagccacccgcgacccggccgtcgggaacagcgacaacgacatcgacatctacgttgtcgacctcttcatcgaacacagtaccgcggacgagagccccaacaacggcgaccagcagacatatttccgctctctcatcaagcagagctccgtcgtcaaggatagcagcagcgcatgaaggcgcatcgtcatctacaaagcccctgagcagggcaccatcagtgcgacaagcaccaccgctgacatcctcaaatcgcatcgccagcgccgccagcaccacccgacccaaatcctccggcggtccaccaccaaccgctgcaccacgggaacgacaattgggacattctcgcgccaaatctaccgttaccgccctcacatccgcaaccaccctcaggcctctctcatccaaaaacccaagcccgcccgcctccgtcatctcaacatccagcacatcaacgaccgcaaccaggccctcaacacgctcacagacacagagcttacaaacaacgcgcacccaagcacctgccacgaccacaacctcaacactcgccgcccgccgcccagccttcaacacaaatcagcaacactacagccccgccagatcccttgcgcctaagcccctgacctcgaccttcctagcaccgccctcaccctcaaagcagcccgccaacatcctcataacagcagagacctcccgtctccaaacagagctcctccagctctccctcctccaccgcgaagccaacgccgtcaccaccgcctggcacgagagcgctcgctccaaactcggcgcgcgatttgaggaactagtcatcgctgatagagacctacgcgcacttgaaagagattccgccgaggtgggtgcagtaagtgacttgatacgctggggtcagggggagaaagggacggatttaggattagacgagaagatacagatcctcgaccaagtcctaaacggtgtttggcagcttggcgaacaagggggtcggtatcaacgcatggtctctgcgtttgaggagtgggccgaaagggtgaaggagataaggacggcgcaacgacggaatgacgtcgatgctttgctcgatcgcggtggaggaattgcggatgagggggagggaggtctgttcgtgagtgatttggatgccccttggaaacgagactatgctggtctcgtgaggatgcttgaagggtggaggaagttattgagtcaattaggggatgtgccagatgatgagaaggataaagggactagggttgagatgaagaaatctggtcttaggcgcatggtggagggttgtagggccctggtacatgacatgctcaaggagctggagatcatggataagattgagagggatgcgatatctgctgaggaagactggatcgagatgatgagcgctaggttaaaggaggtagagcgcaagaagccgcgtaggaaggaggatgtcccgccttggaagttgcttgctttatag

SEQ ID NO: 6668 - protein, 539 aa, Muscodor strobelii
  misc_feature: SGI Peptide ID NO. 561969
  misc_feature (117)..(514): NCBI GI: 256732727 Blast Desc: NECHADRAFT_79216 [Nectria haematococca mpVI 77-13-4]
  misc_feature (1)..(514): NCBI GI: 39969055 Blast Desc: MGG_10138 [Magnaporthe grisea 70-15] gi|145021299|gb|EDK05428.1| MGG_10138 [Magnaporthe grisea 70-15]
  misc_feature (163)..(514): NCBI GI: 46125305 Blast Desc: FG07030.1 [Gibberella zeae PH-1]
  misc_feature (124)..(519): NCBI GI: 154315208 Blast Desc: BC1G_04643 [Botryotinia fuckeliana B05.10] gi|150847606|gb|EDN22799.1| BC1G_04643 [Botryotinia fuckeliana B05.10]
  misc_feature (235)..(509): NCBI GI: 85083909 Blast Desc: NCU00084 [Neurospora crassa OR74A] gi|28918296|gb|EAA27972.1| [Neurospora crassa OR74A]
  misc_feature (235)..(535): NCBI GI: 169596286 Blast Desc: SNOG_00900 [Phaeosphaeria nodorum SN15] gi|111071275|gb|EAT92395.1| SNOG_00900 [Phaeosphaeria nodorum SN15]
  misc_feature (217)..(537): NCBI GI: 240111222 Blast Desc: CPC735_070570 [Coccidioides posadasii C735 delta SOWgp]
  misc_feature (172)..(509): NCBI GI: 115387265 Blast Desc: [Aspergillus terreus NIH2624] gi|114195222|gb|EAU36922.1| [Aspergillus terreus NIH2624]
  misc_feature (217)..(537): NCBI GI: 119189469 Blast Desc: CIMG_04782 [Coccidioides immitis RS]
  misc_feature (195)..(524): NCBI GI: 255951324 Blast Desc: Pc22g25440 [Penicillium chrysogenum Wisconsin 54-1255] gi|211593446|emb|CAP99832.1| Pc22g25440 [Penicillium chrysogenum Wisconsin 54-1255]
  misc_feature: Useful for introducing or modulating the production of volatile compounds
MSSSTGLSRTRSLRNPQTKSNIPAYNEPGSPSRLRSDATRNVSPSRLPMKPPATRPSGTATTTSTSTLSTSSSNTVPRTRAPTTATSRHISALSSSRAPSSRIAAAHEGASSSTKPLSRAPSVRQAPPLTSSNRIASAASTTRPKSSGGPPPTAAPRERQLGHSRAKSTVTALTSATTLRPLSSKNPSPPASVISTSSTSTTATRPSTRSQTQSLQTTRTQAPATTTTSTLAARRPAFNTNQQHYSPARSLAPKPLTSTFLAPPSPSKQPANILITAETSRLQTELLQLSLLHREANAVTTAWHESARSKLGARFEELVIADRDLRALERDSAEVGAVSDLIRWGQGEKGTDLGLDEKIQILDQVLNGVWQLGEQGGRYQRMVSAFEEWAERVKEIRTAQRRNDVDALLDRGGGIADEGEGGLFVSDLDAPWKRDYAGLVRMLEGWRKLLSQLGDVPDDEKDKGTRVEMKKSGLRRMVEGCRALVHDMLKELEIMDKIERDAISAEEDWIEMMSARLKEVERKKPRRKEDVPPWKLLAL

SEQ ID NO: 6669 - DNA, 3878 bp, Muscodor strobelii
  misc_feature: SGI EST ID NO. CUFF.16913.0
  misc_feature: Variant of the nucleotide sequence at SEQ ID NO 6667
ctgagcctgacccactacgaggctcaaagtggagtgatagtgcgaaggacccctgctacccatgcgtccaggggtccctccgataaaggtaacattatacaaaacaacatgatgtaaacatcgagatactcgaactgcgacatgtcttcctcgacggggctgagccgcacgcgctcgctgaggaaccctcagacaaaaagcaatattccagcatacaatgagcctggcagtccgagccgcctgcgcagtgatgcgactcgaaatgtatcaccaagtcggctgcccatgaagccacccgcgacccggccgtcgggaacagcgacaacgacatcgacatctacgttgtcgacctcttcatcgaacacagtaccgcggacgagagccccaacaacggcgaccagcagacatatttccgctctctcatcaagcagagctccgtcgtcaaggatagcagcagcgcatgaaggcgcatcgtcatctacaaagcccctgagcagggcaccatcagtgcgacaagcaccaccgctgacatcctcaaatcgcatcgccagcgccgccagcaccacccgacccaaatcctccggcggtccaccaccaaccgctgcaccacgggaacgacaattgggacattctcgcgccaaatctaccgttaccgccctcacatccgcaaccaccctcaggcctctctcatccaaaaacccaagcccgcccgcctccgtcatctcaacatccagcacatcaacgaccgcaaccaggccctcaacacgctcacagacacagagcttacaaacaacgcgcacccaagcacctgccacgaccacaacctcaacactcgccgcccgccgcccagccttcaacacaaatcagcaacactacagccccgccagatcccttgcgcctaagcccctgacctcgaccttcctagcaccgccctcaccctcaaagcagcccgccaacatcctcataacagcagagacctcccgtctccaaacagagctcctccagctctccctcctccaccgcgaagccaacgccgtcaccaccgcctggcacgagagcgctcgctccaaactcggcgcgcgatttgaggaactagtcatcgctgatagagacctacgcgcacttgaaagagattccgccgaggtgggtgcagtaagtgacttgatacgctggggtcagggggagaaagggacggatttaggattagacgagaagatacagatcctcgaccaagtcctaaacggtgtttggcagcttggcgaacaagggggtcggtatcaacgcatggtctctgcgtttgaggagtgggccgaaagggtgaaggagataaggacggcgcaacgacggaatgacgtcgatgctttgctcgatcgcggtggaggaattgcggatgagggggagggaggtctgttcgtgagtgatttggatgccccttggaaacgagactatgctggtctcgtgaggatgcttgaagggtggaggaagttattgagtcaattaggggatgtgccagatgatgagaaggataaagggactagggttgagatgaagaaatctggtcttaggcgcatggtggagggttgtagggccctggtacatgacatgctcaaggagctggagatcatggataagattgagagggatgcgatatctgctgaggaagactggatcgagatgatgagcgctaggttaaaggaggtagagcgcaagaagccgcgtaggaaggaggatgtcccgccttggaagttgcttgctttatagtgtagtgactgtggatggtggggattgtgtagattgatgttcagagaagacaagggtgagcaggagaatcgactgttatcaactacattccattgcctagctgttcgtattctcgcactatctgcgcgtaattggccatcaagtcatgtgcatcaatttatttaaacaagctcctgaaggtgatcatgcatgaaacgtcaaaatcaacaatttgaccacacactacactcctgagacttaagagtagtcggaaccggactttgacgtgtacacaaaggatgtagcaaatgttaacgacttagtaagaaaactcgcgatcaacgcattcctttttcgatattaacgcaataggtgataaaaaatcactctgttgctttttttacctgatgtatcaaatttcaaatatttctctccgtcttattcttttttcgtttttttgcctcatctttttccttacttatgagcggtaagaatattggatgagcgagatacggatgtcgagtacgaaaaatgaattccgactcgtgggtgtttttagtctatcgtcttctcgtttcgtggctcagttagcactctccaaattctcgtagaatctagccagatgttcttcggattctgcgagtctccttctcagttgtgcagtatcacgtaaagccgtcgatattgtgttttggattggcgcttgatggcttatgtaaactgaatcaccatcgaaggtccccgttggtgatctgatgggttcttccttctgtgtttccctgacattagaagtacccgccatttcgaagccctcctcgcagtgtctttgatcattacggctgccttctatgtcatggcgttgttcctttaacgttgtttgtccttcagaacttggtacttctattgcgttaagctcttgcgaagtaggatctatttcttcaccattcaactcagctccaagttttttcgtccagtctctcagtgtttcctgctgcagaacggacatagttgccaagttatatatcgagtaggatacgccaagtccgacaatatacaggaaaaaaaccgctcgagtatttgtctgagacgcgtctgggtctaaattccgagtccagacgaagccaagccagataccaaatccaattaagaacgagttgagggctactaccaagaggccgaatggggctgaaaaagtgatgacgcccgaaattgacggagcgttcctgatgcccaaccttgtcgttgcggtcttggacggatgaatttggccatcagagagtaccataccgaggaaaaatgtcgcaagtgttttctggccttgaaattgaatcacgtagggggctataagctgtcgaatgtcatcggcgctagtacagcggcccaaaatacggtactggctgcaggccgtgtacaccgacatagtagccgatgcaagactaacaacgaagaaaccttgcgcagtccagtgagcaaggctcaggttgtccaacgacagggcagtgatggctacttggactataatggaagactttgcaaaaggtatccgtgagatgctgcttcaagacaggaaatcgaaagtaagctgcttactgccacagcgatgttcgtgctctcatctagcactagttttctgagctcaaaggggcgctcttcgttctccgtgtttgtcacttcggcctggagcttccagattgagcgatcaccgaatactacaaggataatgccagggagaccgtataattcgatatagaagaaagcatcgaaagttgtgactaagaatagatagaatataggcgcaagcaatatctcgcggacattcatgtttaatttctcggtgaacgaacattgggagaagaatggtgccaatacaatattcatccaagatcgacatagctcaaaatttcagggtagattcgctcttataatggaaagtagacgattgttgaaaaatcaagtcgaaagctagcctatattgatactcaagctcgccatgcagatctgccgtgcgactagcaatgtattcgtcagccatttattctcattgtcccagctagattcgtttcgcatgtccaagaagttgtattgccgaggctgtgcgcgcttccagctggtggacagcgaatcagagcaaggagaca

SEQ ID NO: 6670 - DNA, 1176 bp, Muscodor strobelii
  misc_feature: SGI cDNA ID NO. 561970
  misc_feature: Elevated expression when VOC is produced
  misc_feature: Encodes the peptide sequence at SEQ ID NO 6671
atgaatgtccgcgagatattgcttgcgcctatattctatctattcttagtcacaactttcgatgctttcttctatatcgaattatacggtctccctggcattatccttgtagtattcggtgatcgctcaatctggaagctccaggccgaagtgacaaacacggagaacgaagagcgcccctttgagctcagaaaactagtgctagatgagagcacgaacatcgctgtggcatcttccattatagtccaagtagccatcactgccctgtcgttggacaacctgagccttgctcactggactgcgcaaggtttcttcgttgttagtcttgcatcggctactatgtcggtgtacacggcctgcagccagtaccgtattttgggccgctgtactagcgccgatgacattcgacagcttatagccccctacgtgattcaatttcaaggccagaaaacacttgcgacatttttcctcggtatggtactctctgatggccaaattcatccgtccaagaccgcaacgacaaggttgggcatcaggaacgctccgtcaatttcgggcgtcatcactttttcagccccattcggcctcttggtagtagccctcaactcgttcttaattggatttggtatctggcttggcttcgtctggactcggaatttagacccagacgcgtctcagacaaatactcgagcggtttttttcctgtatattgtcggacttggcgtatcctactcgatatataacttggcaactatgtccgttctgcagcaggaaacactgagagactggacgaaaaaacttggagctgagttgaatggtgaagaaatagatcctacttcgcaagagcttaacgcaatagaagtaccaagttctgaaggacaaacaacgttaaaggaacaacgccatgacatagaaggcagccgtaatgatcaaagacactgcgaggagggcttcgaaatggcgggtacttctaatgtcagggaaacacagaaggaagaacccatcagatcaccaacggggaccttcgatggtgattcagtttacataagccatcaagcgccaatccaaaacacaatatcgacggctttacgtgatactgcacaactgagaaggagactcgcagaatccgaagaacatctggctagattctacgagaatttggagagtgctaactga

SEQ ID NO: 6671 - protein, 391 aa, Muscodor strobelii
  misc_feature: SGI Peptide ID NO. 561970
  misc_feature (74)..(311): NCBI GI: 119500668 Blast Desc: NFIA_106830 [Neosartorya fischeri NRRL 181] gi|119415256|gb|EAW25194.1| NFIA_106830 [Neosartorya fischeri NRRL 181]
  misc_feature (27)..(139): NCBI GI: 156058988 Blast Desc: [Sclerotinia sclerotiorum 1980] gi|154701293|gb|EDO01032.1| [Sclerotinia sclerotiorum 1980]
  misc_feature (75)..(248): NCBI GI: 261360254 Blast Desc: conserved [Verticillium albo-atrum VaMs.102]
  misc_feature (33)..(252): NCBI GI: 255931425 Blast Desc: [Penicillium chrysogenum Wisconsin 54-1255] gi|211581888|emb|CAP80017.1| [Penicillium chrysogenum Wisconsin 54-1255]
  misc_feature (33)..(238): NCBI GI: 239614685 Blast Desc: conserved [Ajellomyces dermatitidis ER-3]
  misc_feature (33)..(238): NCBI GI: 261189143 Blast Desc: conserved [Ajellomyces dermatitidis SLH14081] gi|239591768|gb|EEQ74349.1| conserved [Ajellomyces dermatitidis SLH14081]
  misc_feature: Useful for introducing or modulating the production of volatile compounds
MNVREILLAPIFYLFLVTTFDAFFYIELYGLPGIILVVFGDRSIWKLQAEVTNTENEERPFELRKLVLDESTNIAVASSIIVQVAITALSLDNLSLAHWTAQGFFVVSLASATMSVYTACSQYRILGRCTSADDIRQLIAPYVIQFQGQKTLATFFLGMVLSDGQIHPSKTATTRLGIRNAPSISGVITFSAPFGLLVVALNSFLIGFGIWLGFVWTRNLDPDASQTNTRAVFFLYIVGLGVSYSIYNLATMSVLQQETLRDWTKKLGAELNGEEIDPTSQELNAIEVPSSEGQTTLKEQRHDIEGSRNDQRHCEEGFEMAGTSNVRETQKEEPIRSPTGTFDGDSVYISHQAPIQNTISTALRDTAQLRRRLAESEEHLARFYENLESAN

SEQ ID NO: 6672 - DNA, 3816 bp, Muscodor strobelii
  misc_feature: SGI EST ID NO. CUFF.16914.1
  misc_feature: Variant of the nucleotide sequence at SEQ ID NO 6670
tgtctccttgctctgattcgctgtccaccagctggaagcgcgcacagcctcggcaatacaacttcttggacatgcgaaacgaatctagctgggacaatgagaataaatggctgacgaatacattgctagtcgcacggcagatctgcatggcgagcttgagtatcaatataggctagctttcgacttgatttttcaacaatcgtctactttccattataagagcgaatctaccctgaaattttgagctatgtcgatcttggatgaatattgtattggcaccattcttctcccaatgttcgttcaccgagaaattaaacatgaatgtccgcgagatattgcttgcgcctatattctatctattcttagtcacaactttcgatgctttcttctatatcgaattatacggtctccctggcattatccttgtagtattcggtgatcgctcaatctggaagctccaggccgaagtgacaaacacggagaacgaagagcgcccctttgagctcagaaaactagtgctagatgagagcacgaacatcgctgtggcatcttccattatagtccaagtagccatcactgccctgtcgttggacaacctgagccttgctcactggactgcgcaaggtttcttcgttgttagtcttgcatcggctactatgtcggtgtacacggcctgcagccagtaccgtattttgggccgctgtactagcgccgatgacattcgacagcttatagccccctacgtgattcaatttcaaggccagaaaacacttgcgacatttttcctcggtatggtactctctgatggccaaattcatccgtccaagaccgcaacgacaaggttgggcatcaggaacgctccgtcaatttcgggcgtcatcactttttcagccccattcggcctcttggtagtagccctcaactcgttcttaattggatttggtatctggcttggcttcgtctggactcggaatttagacccagacgcgtctcagacaaatactcgagcggtttttttcctgtatattgtcggacttggcgtatcctactcgatatataacttggcaactatgtccgttctgcagcaggaaacactgagagactggacgaaaaaacttggagctgagttgaatggtgaagaaatagatcctacttcgcaagagcttaacgcaatagaagtaccaagttctgaaggacaaacaacgttaaaggaacaacgccatgacatagaaggcagccgtaatgatcaaagacactgcgaggagggcttcgaaatggcgggtacttctaatgtcagggaaacacagaaggaagaacccatcagatcaccaacggggaccttcgatggtgattcagtttacataagccatcaagcgccaatccaaaacacaatatcgacggctttacgtgatactgcacaactgagaaggagactcgcagaatccgaagaacatctggctagattctacgagaatttggagagtgctaactgagccacgaaacgagaagacgatagactaaaaacacccacgagtcggaattcatttttcgtactcgacatccgtatctcgctcatccaatattcttaccgctcataagtaaggaaaaagatgaggcaaaaaaacgaaaaaagaataagacggagagaaatatttgaaatttgatacatcaggtaaaaaaagcaacagagtgattttttatcacctattgcgttaatatcgaaaaaggaatgcgttgatcgcgagttttcttactaagtcgttaacatttgctacatcctttgtgtacacgtcaaagtccggttccgactactcttaagtctcaggagtgtagtgtgtggtcaaattgttgattttgacgtttcatgcatgatcaccttcaggagcttgtttaaataaattgatgcacatgacttgatggccaattacgcgcagatagtgcgagaatacgaacagctaggcaatggaatgtagttgataacagtcgattctcctgctcacccttgtcttctctgaacatcaatctacacaatccccaccatccacagtcactacactataaagcaagcaacttccaaggcgggacatcctccttcctacgcggcttcttgcgctctacctcctttaacctagcgctcatcatctcgatccagtcttcctcagcagatatcgcatccctctcaatcttatccatgatctccagctccttgagcatgtcatgtaccagggccctacaaccctccaccatgcgcctaagaccagatttcttcatctcaaccctagtccctttatccttctcatcatctggcacatcccctaattgactcaataacttcctccacccttcaagcatcctcacgagaccagcatagtctcgtttccaaggggcatccaaatcactcacgaacagacctccctccccctcatccgcaattcctccaccgcgatcgagcaaagcatcgacgtcattccgtcgttgcgccgtccttatctccttcaccctttcggcccactcctcaaacgcagagaccatgcgttgataccgacccccttgttcgccaagctgccaaacaccgtttaggacttggtcgaggatctgtatcttctcgtctaatcctaaatccgtccctttctccccctgaccccagcgtatcaagtcacttactgcacccacctcggcggaatctctttcaagtgcgcgtaggtctctatcagcgatgactagttcctcaaatcgcgcgccgagtttggagcgagcgctctcgtgccaggcggtggtgacggcgttggcttcgcggtggaggagggagagctggaggagctctgtttggagacgggaggtctctgctgttatgaggatgttggcgggctgctttgagggtgagggcggtgctaggaaggtcgaggtcaggggcttaggcgcaagggatctggcggggctgtagtgttgctgatttgtgttgaaggctgggcggcgggcggcgagtgttgaggttgtggtcgtggcaggtgcttgggtgcgcgttgtttgtaagctctgtgtctgtgagcgtgttgagggcctggttgcggtcgttgatgtgctggatgttgagatgacggaggcgggcgggcttgggtttttggatgagagaggcctgagggtggttgcggatgtgagggcggtaacggtagatttggcgcgagaatgtcccaattgtcgttcccgtggtgcagcggttggtggtggaccgccggaggatttgggtcgggtggtgctggcggcgctggcgatgcgatttgaggatgtcagcggtggtgcttgtcgcactgatggtgccctgctcaggggctttgtagatgacgatgcgccttcatgcgctgctgctatccttgacgacggagctctgcttgatgagagagcggaaatatgtctgctggtcgccgttgttggggctctcgtccgcggtactgtgttcgatgaagaggtcgacaacgtagatgtcgatgtcgttgtcgctgttcccgacggccgggtcgcgggtggcttcatgggcagccgacttggtgatacatttcgagtcgcatcactgcgcaggcggctcggactgccaggctcattgtatgctggaatattgctttttgtctgagggttcctcagcgagcgcgtgcggctcagccccgtcgaggaagacatgtcgcagttcgagtatctcgatgtttacatcatgttgttttgtataatgttacctttatcggagggacccctggacgcatgggtagcaggggtccttcgcactatcactccactttgagcctcgtagtgggtcaggctcag

SEQ ID NO: 6673 - DNA, 3150 bp, Muscodor strobelii
  misc_feature: SGI cDNA ID NO. 561971
  misc_feature: Encodes the peptide sequence at SEQ ID NO 6674
atggctcagtattccaattcgaaactcttggaccgacctgaacctggtctcatcaaatggtcgccgaccaatagcattgacagctttgtacatgtcaatctgcagcatcgtgtcgtgcaactgtacaagcccacaggtcatgcacggcgggggcacttcgactacgaaagagtcgcaaagcttgatgacatcccgccgttgagcacatacgactggtctcctgcctatccaggcttcatcgccattggtaccgcctcggggacggtcaacctcttgaacctcaatgataacacgaatcattatttagaacagaggctcaaattcactcgcttctgtcaagccattgcctttaatactggcactttattggcggtaggtctggaacgtgtgcggaatgatcaatgtcttcaaatctgggacatcaatcgcctcgcaaagattgacccgagagactcttggtcgtccttgaatggatccatattgggcgaaccagtccaccgtctcgagcccgcaacaacagtctcaagtgccaaattttttgaagatagcccacaaacacttgtcgtcgggatcaagaatcagagcatccggatctatgaccttagagatcctcatggcggagttattacattccagacgaaatgcaacaataatctggctattgactatgccgatgctaactactttgcttcatcgtccttggaccggccaggagtagtcatttgggatcgtcgtgcaactcaacggtcaaccgcatcctccacctacctccatgccactgaagcggacggtctaccatggggtgccgctcttaaccttgatagggcgattgacatcaatccaagcaatgcacctgaaagagggtctctgatccgctcgatacgtttttgtaagaatcatcgcggccttcttgctgttctctctcgaaccgggcagctatgcgccatagataccaaaaaggagtctctcgctcccgaacgagagtatgatgcgagccccgaactactcgaagcaagaagatcccatgaactagatatgagcttcacaagagatgatcgcaagcttgaccagattgtttcctttgactgggttacgctcaactcgccgacattgcgacctcgtgtactagttttacgtgcgagtggtgcatacgaaatcctagagaagccttcgtacacagcagagcatatatacaagatgattccatggcaggcaccataccgtggactagaagagggctcaagctatcatagtctgatgcagttcgacaatactcaatactctgaaatgatgggctcactcctggtcgacgaagccgtcaaggacgtccctctgtttggcgaggagaagctacctatcataaatcttgtttcagcagcgatcggttcgccgccgcaacctgatattgacactataataagttccgaggaagaggaggtgcttcctgagtcatttgaggatgcatcttcgactgctgacaaattgcaaatactgagaagaatcttcagaaatactagctattcttccgatgggtcaatcggcgatagtcataaaggaacgaacagcagaaattcggaaagtagaaagggtgggataatgtcgaatcgccagtcgcacgagagtcttctcagcactatgctagacatgaggcgatgcccaaagcccggtcaaatcgtcattgaccatatcttgctactccggtccaaggagaggtatctatttgattacgctatgaatgttgatattgtgtccgacgatccatggttgcaagatgtatggcattggatctctggagcttccgccgctgcatatgacgatggcatggttagtcaggggatcgattttagctatatgggagttgtgcctttatgggaaaacgatctcggacggaatggagccgcccgacttgtggatggaacactacatccagacaacgccgcgtgggaacggagtcttcggaatctgaatgccagatctggagaggccctttatgaaatgaagacagacaaagctgcccatagacaagcagccttgcgtgtatgtggctggggaaagatcgcccaaagcactgtgtctgcaaactatgccaagttgtcattatccgagaagaattcgtcgtcgttcacaaggagtgctgctcgcgagctcttcgaagggaatcgtgcagaagcagtgaagatactgaagactgcgagcgcggaatatccggaactcctatttgtctctcttgctgttcaattgattgatcgaggggatatcaatcttgcgaaggaacaattggacttcgacgatgcggcggcatctaagacagacccttatctccgagctatttcctctttagttgcaacaggcgactgggaagcgatcgcgaaccaagagtctttgtccctgtctgagcgaacatacgtcgcagtccggtatttagacgacgataaacttacgcgttggttggacaaagaacaaaagaaagtcatcaaaaatggtgacattgaaggaatagtactcacaggcatcacggacaaaatggttgacatatttgcgaagtatatcgagaaattcagcgatgtacagaccgctacactggtattgtcgatctgtgcgcctcgctatatcgacgattaccgttgcaccgcctggcgaaacgcttatagggcctacctgcagcgacacaaggcgttcatccaacgcacgaaattcgaagtagaaagcacgaaaaagagcaagaaacacgggcgcccgctcatcaccccgccctcaaggcagattgccctgagatgcgtatactgtgatgcggagtacgagctctctaaaatggggtctggtataagtcagccgcaacagcagcccgctaacccattgatggcaacgagcatccacgcaggtgtaagctgtccaaactgtggacggcatctaccaaggtgtatcatttgtctcgaggtcgtagggatacctcggtctgatagacccgaactctcgcatgatcctcagattagggttgcggcgaagttcccgaccttctgtctcaagtgtgatcatgttctgcatcttgatcatgccagacaatggttcgcgaggcatgtcgagtgccctgtgcctgagtgtcgatgtcggtgtaatttccgggcgaaccctgagttgaactatcggtga

SEQ ID NO: 6674 - protein, 1049 aa, Muscodor strobelii
  misc_feature: SGI Peptide ID NO. 561971
  misc_feature (10)..(1049): NCBI GI: 46125187 Blast Desc: FG06971.1 [Gibberella zeae PH-1]
  misc_feature (10)..(1049): NCBI GI: 171686680 Blast Desc: protein product [Podospora anserina] gi|170943301|emb|CAP68954.1| protein product [Podospora anserina]
  misc_feature (10)..(1046): NCBI GI: 154315374 Blast Desc: BC1G_04726 [Botryotinia fuckeliana B05.10] gi|150847689|gb|EDN22882.1| BC1G_04726 [Botryotinia fuckeliana B05.10]
  misc_feature (10)..(1046): NCBI GI: 156051846 Blast Desc: SS1G_07330 [Sclerotinia sclerotiorum 1980] gi|154705108|gb|EDO04847.1| SS1G_07330 [Sclerotinia sclerotiorum 1980]
  misc_feature (11)..(945): NCBI GI: 145614364 Blast Desc: MGG_11344 [Magnaporthe grisea 70-15] gi|145021302|gb|EDK05431.1| MGG_11344 [Magnaporthe grisea 70-15]
  misc_feature (10)..(935): NCBI GI: 85083936 Blast Desc: NCU00091 [Neurospora crassa OR74A] gi|28918303|gb|EAA27979.1| conserved [Neurospora crassa OR74A]
  misc_feature (204)..(934): NCBI GI: 116192175 Blast Desc: CHGG_05805 [Chaetomium globosum CBS 148.51] gi|88181718|gb|EAQ89186.1| CHGG_05805 [Chaetomium globosum CBS 148.51]
  misc_feature (618)..(1037): NCBI GI: 261360306 Blast Desc: WD repeat-containing protein [Verticillium albo-atrum VaMs.102]
  misc_feature (10)..(411): NCBI GI: 261360305 Blast Desc: conserved [Verticillium albo-atrum VaMs.102]
  misc_feature (18)..(1039): NCBI GI: 145238306 Blast Desc: An07g07260 [Aspergillus niger] gi|134076284|emb|CAL00768.1| protein product [Aspergillus niger]
MAQYSNSKLLDRPEPGLIKWSPTNSIDSFVHVNLQHRVVQLYKPTGHARRGHFDYERVAKLDDIPPLSTYDWSPAYPGFIAIGTASGTVNLLNLNDNTNHYLEQRLKFTRFCQAIAFNTGTLLAVGLERVRNDQCLQIWDINRLAKIDPRDSWSSLNGSILGEPVHRLEPATTVSSAKFFEDSPQTLVVGIKNQSIRIYDLRDPHGGVITFQTKCNNNLAIDYADANYFASSSLDRPGVVIWDRRATQRSTASSTYLHATEADGLPWGAALNLDRAIDINPSNAPERGSLIRSIRFCKNHRGLLAVLSRTGQLCAIDTKKESLAPEREYDASPELLEARRSHELDMSFTRDDRKLDQIVSFDWVTLNSPTLRPRVLVLRASGAYEILEKPSYTAEHIYKMIPWQAPYRGLEEGSSYHSLMQFDNTQYSEMMGSLLVDEAVKDVPLFGEEKLPIINLVSAAIGSPPQPDIDTIISSEEEEVLPESFEDASSTADKLQILRRIFRNTSYSSDGSIGDSHKGTNSRNSESRKGGIMSNRQSHESLLSTMLDMRRCPKPGQIVIDHILLLRSKERYLFDYAMNVDIVSDDPWLQDVWHWISGASAAAYDDGMVSQGIDFSYMGVVPLWENDLGRNGAARLVDGTLHPDNAAWERSLRNLNARSGEALYEMKTDKAAHRQAALRVCGWGKIAQSTVSANYAKLSLSEKNSSSFTRSAARELFEGNRAEAVKILKTASAEYPELLFVSLAVQLIDRGDINLAKEQLDFDDAAASKTDPYLRAISSLVATGDWEAIANQESLSLSERTYVAVRYLDDDKLTRWLDKEQKKVIKNGDIEGIVLTGITDKMVDIFAKYIEKFSDVQTATLVLSICAPRYIDDYRCTAWRNAYRAYLQRHKAFIQRTKFEVESTKKSKKHGRPLITPPSRQIALRCVYCDAEYELSKMGSGISQPQQQPANPLMATSIHAGVSCPNCGRHLPRCIICLEVVGIPRSDRPELSHDPQIRVAAKFPTFCLKCDHVLHLDHARQWFARHVECPVPECRCRCNFRANPELNYR

SEQ ID NO: 6675 - DNA, 4237 bp, Muscodor strobelii
  misc_feature: SGI EST ID NO. CUFF.16669.0
  misc_feature: Variant of the nucleotide sequence at SEQ ID NO 6673
gaaagaccgtacgtgagatatgcaactctgaaatgaaaacagccggaaatttagatttagtggtgcacatgaatggatcaatggcattggtatgaggagtgattgctttggctttgcttgcacctttgcggcaaacgctgcttgaccaccttgaaatcgacgccaacccggacagcacactaggcaccgtgactgaaagcacgagatcgaactgattgactagcatagttggtgagagaagctatgctggcccgtcatggctcagtattccaattcgaaactcttggaccgacctgaacctggtctcatcaaatggtcgccgaccaatagcattgacagctttgtacatgtcaatctgcagcatcgtgtcgtgcaactgtacaagcccacaggtcatgcacggcgggggcacttcgactacgaaagagtcgcaaagcttgatgacatcccgccgttgagcacatacgactggtctcctgcctatccaggcttcatcgccattggtaccgcctcggggacggtcaacctcttgaacctcaatgataacacgaatcattatttagaacagaggctcaaattcactcgcttctgtcaagccattgcctttaatactggcactttattggcggtaggtctggaacgtgtgcggaatgatcaatgtcttcaaatctgggacatcaatcgcctcgcaaagattgacccgagagactcttggtcgtccttgaatggatccatattgggcgaaccagtccaccgtctcgagcccgcaacaacagtctcaagtgccaaattttttgaagatagcccacaaacacttgtcgtcgggatcaagaatcagagcatccggatctatgaccttagagatcctcatggcggagttattacattccagacgaaatgcaacaataatctggctattgactatgccgatgctaactactttgcttcatcgtccttggaccggccaggagtagtcatttgggatcgtcgtgcaactcaacggtcaaccgcatcctccacctacctccatgccactgaagcggacggtctaccatggggtgccgctcttaaccttgatagggcgattgacatcaatccaagcaatgcacctgaaagagggtctctgatccgctcgatacgtttttgtaagaatcatcgcggccttcttgctgttctctctcgaaccgggcagctatgcgccatagataccaaaaaggagtctctcgctcccgaacgagagtatgatgcgagccccgaactactcgaagcaagaagatcccatgaactagatatgagcttcacaagagatgatcgcaagcttgaccagattgtttcctttgactgggttacgctcaactcgccgacattgcgacctcgtgtactagttttacgtgcgagtggtgcatacgaaatcctagagaagccttcgtacacagcagagcatatatacaagatgattccatggcaggcaccataccgtggactagaagagggctcaagctatcatagtctgatgcagttcgacaatactcaatactctgaaatgatgggctcactcctggtcgacgaagccgtcaaggacgtccctctgtttggcgaggagaagctacctatcataaatcttgtttcagcagcgatcggttcgccgccgcaacctgatattgacactataataagttccgaggaagaggaggtgcttcctgagtcatttgaggatgcatcttcgactgctgacaaattgcaaatactgagaagaatcttcagaaatactagctattcttccgatgggtcaatcggcgatagtcataaaggaacgaacagcagaaattcggaaagtagaaagggtgggataatgtcgaatcgccagtcgcacgagagtcttctcagcactatgctagacatgaggcgatgcccaaagcccggtcaaatcgtcattgaccatatcttgctactccggtccaaggagaggtatctatttgattacgctatgaatgttgatattgtgtccgacgatccatggttgcaagatgtatggcattggatctctggagcttccgccgctgcatatgacgatggcatggttagtcaggggatcgattttagctatatgggagttgtgcctttatgggaaaacgatctcggacggaatggagccgcccgacttgtggatggaacactacatccagacaacgccgcgtgggaacggagtcttcggaatctgaatgccagatctggagaggccctttatgaaatgaagacagacaaagctgcccatagacaagcagccttgcgtgtatgtggctggggaaagatcgcccaaagcactgtgtctgcaaactatgccaagttgtcattatccgagaagaattcgtcgtcgttcacaaggagtgctgctcgcgagctcttcgaagggaatcgtgcagaagcagtgaagatactgaagactgcgagcgcggaatatccggaactcctatttgtctctcttgctgttcaattgattgatcgaggggatatcaatcttgcgaaggaacaattggacttcgacgatgcggcggcatctaagacagacccttatctccgagctatttcctctttagttgcaacaggcgactgggaagcgatcgcgaaccaagagtctttgtccctgtctgagcgaacatacgtcgcagtccggtatttagacgacgataaacttacgcgttggttggacaaagaacaaaagaaagtcatcaaaaatggtgacattgaaggaatagtactcacaggcatcacggacaaaatggttgacatatttgcgaagtatatcgagaaattcagcgatgtacagaccgctacactggtattgtcgatctgtgcgcctcgctatatcgacgattaccgttgcaccgcctggcgaaacgcttatagggcctacctgcagcgacacaaggcgttcatccaacgcacgaaattcgaagtagaaagcacgaaaaagagcaagaaacacgggcgcccgctcatcaccccgccctcaaggcagattgccctgagatgcgtatactgtgatgcggagtacgagctctctaaaatggggtctggtataagtcagccgcaacagcagcccgctaacccattgatggcaacgagcatccacgcaggtgtaagctgtccaaactgtggacggcatctaccaaggtgtatcatttgtctcgaggtcgtagggatacctcggtctgatagacccgaactctcgcatgatcctcagattagggttgcggcgaagttcccgaccttctgtctcaagtgtgatcatgttctgcatcttgatcatgccagacaatggttcgcgaggcatgtcgagtgccctgtgcctgagtgtcgatgtcggtgtaatttccgggcgaaccctgagttgaactatcggtgacggatggcacgtgttgtattgttaattatgaagatttagcaagcgtattgcctcatgcgaacagtgtcttgtcagtcatgcatctgatgaacagataagttaagaacgcatgacttgtcgcgcagttgaacccagagattctagatatcggctcgatgatacgcaccgagtcaacccatgcgcccgtggacttacctcttgttctgttatatgaggcagatgagaatttaatgatcaattgagtattggattccatcgtcattgccgggtgctgccataggccgcagctcccattggccacgggtagtgctcaagcatatagggtcaaactatagtccgttttatcgaatggcctaatgatatgttggttgttcggcgccttcaactaggggtccgattccgggcattgcgaggattacccactgactagatgtatagccttgtagcgaccttggcactggtctctctttagtattccattcacccaattttcccctttttgcttttcaaaaggttcgctttgcttttttttgcatcgtcgcaatcttcgctctcttgtcatttgcgccagtattcattgagctgtcaattatcttgccgttggtatgaaggtgtatatcaccattattaccacaactagatagccgttggcacttataccacgatagagtttccttttaagtgagaaattgtcacctgtgtttgctcttcctttcagtacaacttcagttttttagaccctgctttttatgtcgcttccaccctacatcgccacccaccaacaccatgcctatccttttgagagctgcatgcgcagacggtcaaacgaag

SEQ ID NO: 6676 - DNA, 870 bp, Muscodor strobelii
  misc_feature: SGI cDNA ID NO. 561972
  misc_feature: Reduced expression when VOC is produced
  misc_feature: Encodes the peptide sequence at SEQ ID NO 6677
atgagttccaaaaggaaattcgccgagttcagtaccgactccaagggcgtcggggagaaggagaagcctgcacgcgagtacatccccggcttccacccgcccagcaagaaaaacaagaatcgcgccaagatcaagcccaataacatcaactggaccaagaagcgagcacgcacgatcgagcgacgactgaagcacagagactccctaccggccaatgtcttgaacgatatggagagagagctggagcaccacaagggcaagatcgacgatatcaacgaccagaaacacaggaagaaaatgatcaagcagtaccacatggtccgcttcttcgaacgaaagaaagcagaacgcctcgcaaaacaaatcagaacccagctcgagaacgcgacggatgaagacgagaccaacaagctcaaggccgatttacacattgccgagacagatgcgctctatgccaaataccacccacacagggagagatacatcagtctttaccctgtatcgtcgctaggtttaggagagaaggagaaggagaaaaaggaggatgcaagctcagcagcaagacatcttcactccgaaagaccggagatgtggactgtcatcgaagaagcggcaaagtcaggcttccgagccttgaaggagctcatggagcgcaagtcagcaccaggctccaagcgtaaagcctcccaagacacgacttcgaaagccttaactatggctaaagacagccggtcggagagcaagagcacggcgagcgccaagcctgcagattcccgcaagggcaacggtaaactgcagaaattttcagagtcgtcatccgactccaacagtgacgatgatagcgatggtggcttctttgagaaggaatga

SEQ ID NO: 6677 - protein, 289 aa, Muscodor strobelii
  misc_feature: SGI Peptide ID NO. 561972
  misc_feature (31)..(289): NCBI GI: 85083939 Blast Desc: NCU00092 [Neurospora crassa OR74A] gi|74614134|sp|Q7RYN6.1|EFG1P_NEUCR RecName: Full=rRNA-processing protein efg-1 gi|28918304|gb|EAA27980.1| [Neurospora crassa
  misc_feature (1)..(279): NCBI GI: 256732722 Blast Desc: NECHADRAFT_100142 [Nectria haematococca mpVI 77-13-4]
  misc_feature (42)..(289): NCBI GI: 116192177 Blast Desc: CHGG_05806 [Chaetomium globosum CBS 148.51] gi|121786344|sp|Q2H6A9.1|EFG1P_CHAGB RecName: Full=rRNA-processing protein EFG1 gi|88181719|gb|EAQ89187.1| CBS
  misc_feature (35)..(231): NCBI GI: 171686682 Blast Desc: protein product [Podospora anserina] gi|170943302|emb|CAP68955.1| protein product [Podospora anserina]
  misc_feature (47)..(286): NCBI GI: 39969051 Blast Desc: MGG_10136 [Magnaporthe grisea 70-15] gi|187471116|sp|A4RMA9.1|EFG1P_MAGGR RecName: Full=rRNA-processing protein EFG1 gi|145021301|gb|EDK05430.1|
  misc_feature (31)..(264): NCBI GI: 46125189 Blast Desc: FG06972.1 [Gibberella zeae PH-1]
  misc_feature (43)..(233): NCBI GI: 261360304 Blast Desc: conserved [Verticillium albo-atrum VaMs.102]
  misc_feature (1)..(287): NCBI GI: 156051844 Blast Desc: SS1G_07329 [Sclerotinia sclerotiorum 1980] gi|187471119|sp|A7EPT0.1|EFG1P_SCLS1 RecName: Full=rRNA-processing protein efg1 gi|154705107|gb|EDO04846.1|
  misc_feature (1)..(208): NCBI GI: 154315376 Blast Desc: BC1G_04727 [Botryotinia fuckeliana B05.10] gi|187471061|sp|A6RVU0.1|EFG1P_BOTFB RecName: Full=rRNA-processing protein efg1 gi|150847690|gb|EDN22883.1|
  misc_feature (1)..(287): NCBI GI: 189188154 Blast Desc: conserved [Pyrenophora tritici-repentis Pt-1C-BFP] gi|187972022|gb|EDU39521.1| conserved [Pyrenophora tritici-repentis Pt-1C-BFP]
  misc_feature: Useful for introducing or modulating the production of volatile compounds
MSSKRKFAEFSTDSKGVGEKEKPAREYIPGFHPPSKKNKNRAKIKPNNINWTKKRARTIERRLKHRDSLPANVLNDMERELEHHKGKIDDINDQKHRKKMIKQYHMVRFFERKKAERLAKQIRTQLENATDEDETNKLKADLHIAETDALYAKYHPHRERYISLYPVSSLGLGEKEKEKKEDASSAARHLHSERPEMWTVIEEAAKSGFRALKELMERKSAPGSKRKASQDTTSKALTMAKDSRSESKSTASAKPADSRKGNGKLQKFSESSSDSNSDDDSDGGFFEKE

SEQ ID NO: 6678 - DNA, 1392 bp, Muscodor strobelii
  misc_feature: SGI EST ID NO. CUFF.16671.0
  misc_feature: Variant of the nucleotide sequence at SEQ ID NO 6676
gtccattccgacatcaaaacttggggaccgtctttcctctatatccgctctgcgcgtgggctatctgggtacacagcgcacgcagccgtacacatcatcaaaatgagttccaaaaggaaattcgccgagttcagtaccgactccaagggcgtcggggagaaggagaagcctgcacgcgagtacatccccggcttccacccgcccagcaagaaaaacaagaatcgcgccaagatcaagcccaataacatcaactggaccaagaagcgagcacgcacgatcgagcgacgactgaagcacagagactccctaccggccaatgtcttgaacgatatggagagagagctggagcaccacaagggcaagatcgacgatatcaacgaccagaaacacaggaagaaaatgatcaagcagtaccacatggtccgcttcttcgaacgaaagaaagcagaacgcctcgcaaaacaaatcagaacccagctcgagaacgcgacggatgaagacgagaccaacaagctcaaggccgatttacacattgccgagacagatgcgctctatgccaaataccacccacacagggagagatacatcagtctttaccctgtatcgtcgctaggtttaggagagaaggagaaggagaaaaaggaggatgcaagctcagcagcaagacatcttcactccgaaagaccggagatgtggactgtcatcgaagaagcggcaaagtcaggcttccgagccttgaaggagctcatggagcgcaagtcagcaccaggctccaagcgtaaagcctcccaagacacgacttcgaaagccttaactatggctaaagacagccggtcggagagcaagagcacggcgagcgccaagcctgcagattcccgcaagggcaacggtaaactgcagaaattttcagagtcgtcatccgactccaacagtgacgatgatagcgatggtggcttctttgagaaggaatgaaaaggagaagaaaggcaaagaaagaaaggcaaagaaagaaaggcaaagaaagaaaggcaaagaaagaaaggcaaagaaagaaaggcaaagaaagaaaggcagattttcatgcatgttggtacaaaaggagtaaagcattgtgaaaatccaagcaagcatgggctgctgcatagcgacgagcaaatgacggaacgatacccaatcccaagtctgacgtacctttttacgaattgtgtgacatactctattttgtctctattgtctttaggatcctttgagtgtagtgtagcggaaacatttcattagaccatagcttgtgcagctaagaggcaccgaattgtcctgagttgccggacccacgatagaccatacatacaagcacagagaaatcagcaagaaataatagatcatgttacacca

SEQ ID NO: 6679 - DNA, 903 bp, Muscodor strobelii
  misc_feature: SGI cDNA ID NO. 561973
  misc_feature: Encodes the peptide sequence at SEQ ID NO 6680
atggcgccagagccggcagtagtgaccgctgccaccttagacttgatccaagattggatcacgaagcagcggcaaacgccatcacaaccactgaatgcaaatttagaaagtgcgcttttaaaccttgagcgtcaaatccgtatacaaatagcctcggaacagactaccccagagatcggtgagacgaattggattgggttacttcaagaataccgagccgcacacccggtctcaggcagttctctcgatggcatctcatgggcagaggggcaacagatgtacccaggaagcccaaatagccattggacttctcacgtgaaaataaacgagcacgcaaacccatttcccggcatcacccatggtctgaactctgatggcacccatccatcattcgccagaaagaaggatgccaaggcctacgctgccaaatgtgccgtggagtggttgagagagacaggtcttatgccgaaggcgggcggtgtcaagtttcccaaggctcccgtggagaaggctccggttcaagtaaaatcccaaccatcatctcccagtgccaatcgcccatctgtgcaaacttcaccattcgacgaatcagagccgtcttcaactcacgaggtatcattgctcatacaacaactctcctatcccacaatgacttacgacgtccaccaagccgaggacggcttctggcacggacgggcgaacttcgggcattcgtacctactcgtgcccttcgagaaggaactcaagcatgtcaaagacgcgatgagtaagtcactggccaaggagaagattgccagagatctgttacctcacctccgtgccgagaaagccaagcgtgaggagaattacggaaagttcatggagggagtaactgttgtgaagaaggagccgtccgaagtctag

SEQ ID NO: 6680 - protein, 300 aa, Muscodor strobelii
  misc_feature: SGI Peptide ID NO. 561973
  misc_feature (1)..(300): NCBI GI: 116192181 Blast Desc: CHGG_05808 [Chaetomium globosum CBS 148.51] gi|88181721|gb|EAQ89189.1| CHGG_05808 [Chaetomium globosum CBS 148.51]
  misc_feature (54)..(281): NCBI GI: 156051084 Blast Desc: SS1G_06949 [Sclerotinia sclerotiorum 1980] gi|154704727|gb|EDO04466.1| SS1G_06949 [Sclerotinia sclerotiorum 1980]
  misc_feature (50)..(183): NCBI GI: 154295237 Blast Desc: [Botryotinia fuckeliana B05.10] gi|150844159|gb|EDN19352.1| [Botryotinia fuckeliana B05.10]
  misc_feature (13)..(156): NCBI GI: 85109325 Blast Desc: NCU06258 [Neurospora crassa OR74A] gi|28924502|gb|EAA33626.1| [Neurospora crassa OR74A]
MAPEPAVVTAATLDLIQDWITKQRQTPSQPLNANLESALLNLERQIRIQIASEQTTPEIGETNWIGLLQEYRAAHPVSGSSLDGISWAEGQQMYPGSPNSHWTSHVKINEHANPFPGITHGLNSDGTHPSFARKKDAKAYAAKCAVEWLRETGLMPKAGGVKFPKAPVEKAPVQVKSQPSSPSANRPSVQTSPFDESEPSSTHEVSLLIQQLSYPTMTYDVHQAEDGFWHGRANFGHSYLLVPFEKELKHVKDAMSKSLAKEKIARDLLPHLRAEKAKREENYGKFMEGVTVVKKEPSEV

SEQ ID NO: 6681 - DNA, 2933 bp, Muscodor strobelii
  misc_feature: SGI EST ID NO. CUFF.16972.0
  misc_feature: Variant of the nucleotide sequence at SEQ ID NO 6679
attgactcttaaaaacgcctttcccgcgctttcagacgaaattctgctctgacaaatcaatcccgtgccctttagtgtactttagtggtgcttaccgccattccagagaatggcgccagagccggcagtagtgaccgctgccaccttagacttgatccaagattggatcacgaagcagcggcaaacgccatcacaaccactgaatgcaaatttagaaagtgcgcttttaaaccttgagcgtcaaatccgtatacaaatagcctcggaacagactaccccagagatcggtgagacgaattggattgggttacttcaagaataccgagccgcacacccggtctcaggcagttctctcgatggcatctcatgggcagaggggcaacagatgtacccaggaagcccaaatagccattggacttctcacgtgaaaataaacgagcacgcaaacccatttcccggcatcacccatggtctgaactctgatggcacccatccatcattcgccagaaagaaggatgccaaggcctacgctgccaaatgtgccgtggagtggttgagagagacaggtcttatgccgaaggcgggcggtgtcaagtttcccaaggctcccgtggagaaggctccggttcaagtaaaatcccaaccatcatctcccagtgccaatcgcccatctgtgcaaacttcaccattcgacgaatcagagccgtcttcaactcacgaggtatcattgctcatacaacaactctcctatcccacaatgacttacgacgtccaccaagccgaggacggcttctggcacggacgggcgaacttcgggcattcgtacctactcgtgcccttcgagaaggaactcaagcatgtcaaagacgcgatgagtaagtcactggccaaggagaagattgccagagatctgttacctcacctccgtgccgagaaagccaagcgtgaggagaattacggaaagttcatggagggagtaactgttgtgaagaaggagccgtccgaagtctaggagtcttcatggccgcccacgaaaccccaactgggtcgttctctagagcgaattgccgattagtatggcacatgtgctggggaatcgacgacagtggcttgatgcgcttatgtttgttgattacgaaagtcgaataatctagagaatggcgcggcggctacgaggcttgtgcaccgtcgatttgagtgtgttggtgacgatgatacgaggacatgaacattgatacgatagacttagttcacgatagtaatatcacaagctgcctgttttcatccatagttctcatgatgtgaattccgagtacctcaaatcgttatgaggcagctcgagataactgcggctcataataacacatctgatagcagtcatcattctctccatgagagaacctcaacatcttcaaaccatcataccaccacctctaccaatcccacctctcttcctcccaccaccgccgcgtcccctctcaccaccagccttaccaccacctcgaccacccttcccctgcggcactctagcaacaacaccattcggcaaatcagcaaccttctccccatccctccaaagcgtcccaacgccctgtcttcgccccctaacctccttaaagaacatcgccggcaccatcccctcctcatctccctccgtaagcacaacattattctcactcatccaccacttaatctccggccgttccctcaacgccttctcaagatcaagaaaaatgagcaattcagcatcagccctcatcccactaatgaccttcggtttactgctacctcccccctcttcatcctcagccccgtgaacttgcggtttaccatcatcgggaagaccagtgccgaagtggacgtgcgtgcgactcatcttcttcagaccgccggaggcgaggatgttgggccagaatgcgaagtacgtcccgtggacgatagtctctgggatgttgccggcttctatggtgataggtgtgtgcagtccctcggacgctaaggcaatggagtgtccttgatttgcccggatcaaccagtgagctgcgtcatcttcgtatgatgagtctgctgtggtggggttgggcttcagaccgaagcgctgtttggcgtttgttgagacttcggcttttatctctgcgagtgttgggttgagagatttgaggcggggccattgcatctgtgcttgtcagtattcgctctcgtaaagacgtgggagatatgcgacgaaaagcgcgaaatgtagccggtgaagcaaaacccggaaatccataaaaaaaaaaactcacaacccggtccaaagcagcgaagccctcggaatctagatcgatcccagcattctgcgcctgatgtctcaaaagctgcgaaagcgccttcgagatctgaacctctctgttcgctcccccaccaccgcctcttcttccgccacgactccttccttttcccttgccctcaagagcgagatcctggatgcgatccgttgcttcatcgaactcagccgccatattctcacgccagccaactttcaagttcgtgtggcaagtgaatggatgactcgttggcggttccaaatttggccctttgcgaccaggtgttttgcgagaagcggtccgtcgccgatgttgaagaatgcagtgaaacggtgacagtggatatttgcttgagcttagcacactttgctgaatagccagtttaatgaccatatgagaaggtgacccgcagtgtcacaaagttttaatggagctttgttgcttgcgtctgtttgctgaggtattcggttactctttgccgatgtttgctggtatgactcgtcttgagatcgaaagcgattcccttagttgaccacttgcctattatgtgtcatacaccgagcagcttattcttagccgtccaaatcgatggattggtagtccaaactgaggctgaagtcatcagcc

SEQ ID NO: 6682 - DNA, 981 bp, Muscodor strobelii
  misc_feature: SGI cDNA ID NO. 561974
  misc_feature: Reduced expression when VOC is produced
  misc_feature: Encodes the peptide sequence at SEQ ID NO 6683
atggcggctgagttcgatgaagcaacggatcgcatccaggatctcgctcttgagggcaagggaaaaggaaggagtcgtggcggaagaagaggcggtggtgggggagcgaacagagaggttcagatctcgaaggcgctttcgcagcttttgagacatcaggcgcagaatgctgggatcgatctagattccgagggcttcgctgctttggaccgggttatgcaatggccccgcctcaaatctctcaacccaacactcgcagagataaaagccgaagtctcaacaaacgccaaacagcgcttcggtctgaagcccaaccccaccacagcagactcatcatacgaagatgacgcagctcactggttgatccgggcaaatcaaggacactccattgccttagcgtccgagggactgcacacacctatcaccatagaagccggcaacatcccagagactatcgtccacgggacgtacttcgcattctggcccaacatcctcgcctccggcggtctgaagaagatgagtcgcacgcacgtccacttcggcactggtcttcccgatgatggtaaaccgcaagttcacggggctgaggatgaagaggggggaggtagcagtaaaccgaaggtcattagtgggatgagggctgatgctgaattgctcatttttcttgatcttgagaaggcgttgagggaacggccggagattaagtggtggatgagtgagaataatgttgtgcttacggagggagatgaggaggggatggtgccggcgatgttctttaaggaggttagggggcgaagacagggcgttgggacgctttggagggatggggagaaggttgctgatttgccgaatggtgttgttgctagagtgccgcaggggaagggtggtcgaggtggtggtaaggctggtggtgagaggggacgcggcggtggtgggaggaagagaggtgggattggtagaggtggtggtatgatggtttga

SEQ ID NO: 6683 - protein, 326 aa, Muscodor strobelii
  misc_feature: SGI Peptide ID NO. 561974
  misc_feature (35)..(259): Pfam Id: PF01885 Pfam Desc: RNA 2'-phosphotransferase, Tpt1 / KptA family
  misc_feature (42)..(289): NCBI GI: 154295249 Blast Desc: BC1G_13438 [Botryotinia fuckeliana B05.10] gi|150844165|gb|EDN19358.1| BC1G_13438 [Botryotinia fuckeliana B05.10]
  misc_feature (37)..(289): NCBI GI: 156051094 Blast Desc: SS1G_06954 [Sclerotinia sclerotiorum 1980] gi|154704732|gb|EDO04471.1| SS1G_06954 [Sclerotinia sclerotiorum 1980]
  misc_feature (39)..(295): NCBI GI: 256733173 Blast Desc: NECHADRAFT_79207 [Nectria haematococca mpVI 77-13-4]
  misc_feature (39)..(294): NCBI GI: 145602059 Blast Desc: MGG_12911 [Magnaporthe grisea 70-15] gi|145010507|gb|EDJ95163.1| MGG_12911 [Magnaporthe grisea 70-15]
  misc_feature (36)..(291): NCBI GI: 116192183 Blast Desc: CHGG_05809 [Chaetomium globosum CBS 148.51] gi|88181722|gb|EAQ89190.1| CHGG_05809 [Chaetomium globosum CBS 148.51]
  misc_feature (39)..(291): NCBI GI: 85109317 Blast Desc: NCU06254 [Neurospora crassa OR74A] gi|28924498|gb|EAA33622.1| conserved [Neurospora crassa OR74A]
  misc_feature (39)..(291): NCBI GI: 46125193 Blast Desc: FG06974.1 [Gibberella zeae PH-1]
  misc_feature (42)..(263): NCBI GI: 261360302 Blast Desc: tRNA 2'-phosphotransferase [Verticillium albo-atrum VaMs.102]
  misc_feature (73)..(292): NCBI GI: 171686666 Blast Desc: protein product [Podospora anserina] gi|170943294|emb|CAP68947.1| protein product [Podospora anserina]
  misc_feature (25)..(307): NCBI GI: 121710608 Blast Desc: tRNA splicing 2' phosphotransferase 1 [Aspergillus clavatus NRRL 1] gi|119401070|gb|EAW11494.1| tRNA splicing 2' phosphotransferase 1 [Aspergillus clavatus NRRL 1]
  misc_feature (37)..(261): SWISSPROT Homolog: EC 2.7.1.160 2'-phosphotransferase
  misc_feature: Useful for introducing or modulating the production of volatile compounds
MAAEFDEATDRIQDLALEGKGKGRSRGGRRGGGGGANREVQISKALSQLLRHQAQNAGIDLDSEGFAALDRVMQWPRLKSLNPTLAEIKAEVSTNAKQRFGLKPNPTTADSSYEDDAAHWLIRANQGHSIALASEGLHTPITIEAGNIPETIVHGTYFAFWPNILASGGLKKMSRTHVHFGTGLPDDGKPQVHGAEDEEGGGSSKPKVISGMRADAELLIFLDLEKALRERPEIKWWMSENNVVLTEGDEEGMVPAMFFKEVRGRRQGVGTLWRDGEKVADLPNGVVARVPQGKGGRGGGKAGGERGRGGGGRKRGGIGRGGGMMV

SEQ ID NO: 6684 - DNA, 2566 bp, Muscodor strobelii
  misc_feature: SGI EST ID NO. CUFF.16973.1
  misc_feature: Variant of the nucleotide sequence at SEQ ID NO 6682
ggctgatgacttcagcctcagtttggactaccaatccatcgatttggacggctaagaataagctgctcggtgtatgacacataataggcaagtggtcaactaagggaatcgctttcgatctcaagacgagtcataccagcaaacatcggcaaagagtaaccgaatacctcagcaaacagacgcaagcaacaaagctccattaaaactttgtgacactgcgggtcaccttctcatatggtcattaaactggctattcagcaaagtgtgctaagctcaagcaaatatccactgtcaccgtttcactgcattcttcaacatcggcgacggaccgcttctcgcaaaacacctggtcgcaaagggccaaatttggaaccgccaacgagtcatccattcacttgccacacgaacttgaaagttggctggcgtgagaatatggcggctgagttcgatgaagcaacggatcgcatccaggatctcgctcttgagggcaagggaaaaggaaggagtcgtggcggaagaagaggcggtggtgggggagcgaacagagaggttcagatctcgaaggcgctttcgcagcttttgagacatcaggcgcagaatgctgggatcgatctagattccgagggcttcgctgctttggaccgggttatgcaatggccccgcctcaaatctctcaacccaacactcgcagagataaaagccgaagtctcaacaaacgccaaacagcgcttcggtctgaagcccaaccccaccacagcagactcatcatacgaagatgacgcagctcactggttgatccgggcaaatcaaggacactccattgccttagcgtccgagggactgcacacacctatcaccatagaagccggcaacatcccagagactatcgtccacgggacgtacttcgcattctggcccaacatcctcgcctccggcggtctgaagaagatgagtcgcacgcacgtccacttcggcactggtcttcccgatgatggtaaaccgcaagttcacggggctgaggatgaagaggggggaggtagcagtaaaccgaaggtcattagtgggatgagggctgatgctgaattgctcatttttcttgatcttgagaaggcgttgagggaacggccggagattaagtggtggatgagtgagaataatgttgtgcttacggagggagatgaggaggggatggtgccggcgatgttctttaaggaggttagggggcgaagacagggcgttgggacgctttggagggatggggagaaggttgctgatttgccgaatggtgttgttgctagagtgccgcaggggaagggtggtcgaggtggtggtaaggctggtggtgagaggggacgcggcggtggtgggaggaagagaggtgggattggtagaggtggtggtatgatggtttgaagatgttgaggttctctcatggagagaatgatgactgctatcagatgtgttattatgagccgcagttatctcgagctgcctcataacgatttgaggtactcggaattcacatcatgagaactatggatgaaaacaggcagcttgtgatattactatcgtgaactaagtctatcgtatcaatgttcatgtcctcgtatcatcgtcaccaacacactcaaatcgacggtgcacaagcctcgtagccgccgcgccattctctagattattcgactttcgtaatcaacaaacataagcgcatcaagccactgtcgtcgattccccagcacatgtgccatactaatcggcaattcgctctagagaacgacccagttggggtttcgtgggcggccatgaagactcctagacttcggacggctccttcttcacaacagttactccctccatgaactttccgtaattctcctcacgcttggctttctcggcacggaggtgaggtaacagatctctggcaatcttctccttggccagtgacttactcatcgcgtctttgacatgcttgagttccttctcgaagggcacgagtaggtacgaatgcccgaagttcgcccgtccgtgccagaagccgtcctcggcttggtggacgtcgtaagtcattgtgggataggagagttgttgtatgagcaatgatacctcgtgagttgaagacggctctgattcgtcgaatggtgaagtttgcacagatgggcgattggcactgggagatgatggttgggatttctgggttggtggtcagttcatcttgggagtaggtgcatgctcggatgattgcgtttgtctcactacttgaaccggagccttctccacgggagccttgggaaacttgacaccgcccgccttcggcataagacctgtctctctcaaccactccacggcacatttggcagcgtaggccttggcatccttctttctggcgaatgatggatgggtgccatcagagttcagaccatgggtgatgccgggaaatgggtttgcgtgctcgtttattttcacgtgagaagtccaatggctatttgggcttcctgggtacatctgttgcccctctgcccatgagatgccatcgagagaactgcctgagaccgggtgtgcggctcgg

SEQ ID NO: 6685 - DNA, 3222 bp, Muscodor strobelii
  misc_feature: SGI cDNA ID NO. 561975
  misc_feature: Encodes the peptide sequence at SEQ ID NO 6686
atggactcgagtttcgaagcgacccacgagtcgggggtgcaggggttgccaggagctgagggattcctatctggtagcggtggtagtggtggttatagtggtgcgacaggtgggatagcagccggagcaggctcagcactcgagccctcctccttttcgggcaccactacgagcgctaccagcactgcaccaccaccatcctctccgccgtcacagcacagcgtcttgcatgcgcatcgccagaccaataatccgtctaagctgccggcttaccgcttcgccgatctaaacaaggaagtcattggcctgccaccgcaacagcaacctcaccagtctcatccaccacagcaggagccacgacaacatcactctcaatctcatcagtcgcgcccgcaaaaacaacagcagcagcagtacatcccgccctcgcctgtctcactcgacctggatcagcaggccgaaacacacccaagcgcggccaccacccacgcccccccaccgatccccgactctcgtgctcgcccgtccgaaaccagcaccaactccaacaacaattctattctcaattcccacagcgcgcacgttgtctcacgcgctccaccgcctcccgagaccaccctggattcccgcacgtcgaggccgtcattcctgcaaacccgctcttcctcacaggcccccgccgcgtcgtcgccgtcgccgcatgtgaagcgctctgcatctctcgatttccccagcgtcgttgccaccgctggccgatcgccaaccgagtccaccgacaccatcgtcaccgcccaccacaggcgcgccactggatccggcgacacatccctggctcaaggtcccgacggtgcatcgggcggagagcctgccgacgctgcgactcgagactgggctgccggccagcgcgagctcctcctgcccaagaccctgcagcgaagtttgtcggatgacaagagggcgtccctggtgaagagaccgcccgtctcctacaaagctcgtgccaccgccagcgcctctggaggcgttgcgtccatcccacccattcgcgcattccgcacttctggcgagagacgcagcttcggcctcgacatgaatctacgatcttctcgcacctcgattgacggggacgactatggcgactcggcccatcgcgaccggactctgcgcgccttggaagggcggcgggccgacgactatctgcagcttactcctcccgactcggctggaccgcgacctgacggcgaggagagcatagaccctttcatgaagattgcccgtgaggactcgtatcagcgcacctcagatggcaacaaggtgtacgctgagaacagtgcaattacccgtgtagcacgtactgctcgacgaccactttctgttgccatttcttcatatagatctccttctccgcccagaatatcgaggcgattgtccgaacacgaaacgaatcggcctagaggcctcagtcatgatcagggagagaagaccggaccaccagtgtcgtaccgtggccattccagagagccacagtccgacgacttgaagcttagaagtaacgccggccgagttccaccgattacacctagggccgtggcatatcacgaagtcggctccgaaccgacgtctgcgcaccaccgacgccgacagccatccgtcgatgttggatctgctgttccctcacgaatgacctctctcaagcaggccagcgtaaactacagtcacccccgagcctacagctcttcaccactcgtccccaaatcgaccgatccacaaaaatacgattcgccgtacaatgagccgaaccaaacggaagggacagactcgacgaactcgacagcagatgcttcctcgatgtgggatgagtttcgggaactcaagtctaggatgcaaaagctcgagctgcgtcagaatctaccaccaacgtcaagcgctgccatgtcacgctcctcagatgaacgcccgacgacggcaaacaccaacgccaccacgttatccgcatcccctaaacgtggtgcttcaagcgtggtgcaagccaccgaaccttcagctccaccaaaagagagtcacccgcttcttcactcggcattggccaagtcaaaagatgtcctgcccactgaggtctacgatgctcttgagacggcaacggtcgatgccctcgcacttgcgacaatgatggggactgctggtcagcctggacccatctccagtggacgaagcgagattggtagcaatggtggcatgagtggggggacagtcacggaccgtcaactcaggagaaaagcagatagtgtctgccgaagcctcacagagttgtgcctggcactgagcgagaacatgggtacgaccaagcctcagcaagctgtggctccgcctgcctttgacgaagatataacggtgacaagcccgactgtcatccaacaaccaatgaacccggcgggaactccgacggctgcagctacagccatctcgagacgctcaagcatccctgtaaatcgcgctttggaattgactacaagcccaagggccgcttcccgcttcgaagagaagagaagcagtattttcgcgccgagtggtctcccgagcccacgttatagctctaacactgctgctggtcctatcgatactactgctgctggcaggaaaacgtcgcttctcctggcgcgaaccagacgtgcgggaacagaggaacccgaagatgggcgaagaacgtcgacgatgttcagaagtcgacgcgctggcaccgaagagccggaggattattcagatcggaaaccattggtgagtcgtggacgtcgctcttccaccatagatgatgcagaagacgactcccggtttcgcacaccgtcccgcgccgtgacggaggtgaatggcacacgatcgagagaatacagctcattcctcccggcaccaccaccactaccgaaggaagcagatgctctagccacatcggcacttccgagacggagaatgggctccacgacgatcaacacacgtttgacacaaccctcagtcatcactacaacagcgtcatccattgccacaccgagtcgaaggtacttcgaccgttcaacgcctacccgtgaaactagctatgaagagaagccctccgaagaccgggctcaaagacatttttctcttgcacgtgctgggagtcaaaatagacggacaaccaatcgtcagtccatgattgcgatgcccccatcaacgacgagcggctatagataa

SEQ ID NO: 6686 - protein, 1073 aa, Muscodor strobelii
  misc_feature: SGI Peptide ID NO. 561975
  misc_feature (298)..(1073): NCBI GI: 256733174 Blast Desc: NECHADRAFT_92815 [Nectria haematococca mpVI 77-13-4]
  misc_feature (299)..(1073): NCBI GI: 46125195 Blast Desc: FG06975.1 [Gibberella zeae PH-1]
  misc_feature (284)..(1054): NCBI GI: 39940044 Blast Desc: MGG_05218 [Magnaporthe grisea 70-15] gi|145010511|gb|EDJ95167.1| MGG_05218 [Magnaporthe grisea 70-15]
  misc_feature (222)..(1073): NCBI GI: 261360301 Blast Desc: conserved [Verticillium albo-atrum VaMs.102]
  misc_feature (296)..(1053): NCBI GI: 85109315 Blast Desc: NCU06253 [Neurospora crassa OR74A] gi|28924497|gb|EAA33621.1| [Neurospora crassa OR74A]
  misc_feature (291)..(1073): NCBI GI: 116192185 Blast Desc: CHGG_05810 [Chaetomium globosum CBS 148.51] gi|88181723|gb|EAQ89191.1| CHGG_05810 [Chaetomium globosum CBS 148.51]
  misc_feature (380)..(1027): NCBI GI: 154295247 Blast Desc: BC1G_13437 [Botryotinia fuckeliana B05.10] gi|150844164|gb|EDN19357.1| BC1G_13437 [Botryotinia fuckeliana B05.10]
  misc_feature (380)..(1027): NCBI GI: 156051092 Blast Desc: SS1G_06953 [Sclerotinia sclerotiorum 1980] gi|154704731|gb|EDO04470.1| SS1G_06953 [Sclerotinia sclerotiorum 1980]
  misc_feature (603)..(955): NCBI GI: 189188422 Blast Desc: conserved [Pyrenophora tritici-repentis Pt-1C-BFP] gi|187972156|gb|EDU39655.1| conserved [Pyrenophora tritici-repentis Pt-1C-BFP]
  misc_feature (598)..(783): NCBI GI: 255943087 Blast Desc: Pc18g04810 [Penicillium chrysogenum Wisconsin 54-1255] gi|211587045|emb|CAP94705.1| Pc18g04810 [Penicillium chrysogenum Wisconsin 54-1255]
MDSSFEATHESGVQGLPGAEGFLSGSGGSGGYSGATGGIAAGAGSALEPSSFSGTTTSATSTAPPPSSPPSQHSVLHAHRQTNNPSKLPAYRFADLNKEVIGLPPQQQPHQSHPPQQEPRQHHSQSHQSRPQKQQQQQYIPPSPVSLDLDQQAETHPSAATTHAPPPIPDSRARPSETSTNSNNNSILNSHSAHVVSRAPPPPETTLDSRTSRPSFLQTRSSSQAPAASSPSPHVKRSASLDFPSVVATAGRSPTESTDTIVTAHHRRATGSGDTSLAQGPDGASGGEPADAATRDWAAGQRELLLPKTLQRSLSDDKRASLVKRPPVSYKARATASASGGVASIPPIRAFRTSGERRSFGLDMNLRSSRTSIDGDDYGDSAHRDRTLRALEGRRADDYLQLTPPDSAGPRPDGEESIDPFMKIAREDSYQRTSDGNKVYAENSAITRVARTARRPLSVAISSYRSPSPPRISRRLSEHETNRPRGLSHDQGEKTGPPVSYRGHSREPQSDDLKLRSNAGRVPPITPRAVAYHEVGSEPTSAHHRRRQPSVDVGSAVPSRMTSLKQASVNYSHPRAYSSSPLVPKSTDPQKYDSPYNEPNQTEGTDSTNSTADASSMWDEFRELKSRMQKLELRQNLPPTSSAAMSRSSDERPTTANTNATTLSASPKRGASSVVQATEPSAPPKESHPLLHSALAKSKDVLPTEVYDALETATVDALALATMMGTAGQPGPISSGRSEIGSNGGMSGGTVTDRQLRRKADSVCRSLTELCLALSENMGTTKPQQAVAPPAFDEDITVTSPTVIQQPMNPAGTPTAAATAISRRSSIPVNRALELTTSPRAASRFEEKRSSIFAPSGLPSPRYSSNTAAGPIDTTAAGRKTSLLLARTRRAGTEEPEDGRRTSTMFRSRRAGTEEPEDYSDRKPLVSRGRRSSTIDDAEDDSRFRTPSRAVTEVNGTRSREYSSFLPAPPPLPKEADALATSALPRRRMGSTTINTRLTQPSVITTTASSIATPSRRYFDRSTPTRETSYEEKPSEDRAQRHFSLARAGSQNRRTTNRQSMIAMPPSTTSGYR

SEQ ID NO: 6687 - DNA, 4599 bp, Muscodor strobelii
  misc_feature: SGI EST ID NO. CUFF.16977.0
  misc_feature: Variant of the nucleotide sequence at SEQ ID NO 6685
cagtattcacggacccgtcccagggaacatcattcgtgaagaaaggggacacgatgggatatatccactggtcgccagtccgtgtggaaatagaatagagagccatggccagcttgtctacgtgttgacctgcagcattgttgatttggcagaaactaaagaccttggtgaccccttctggcgctcctcctcgtccattgtcctcgttcgttcgtcgtgagctgtgcgaagcgtcaaagtggacgagtcaactcgctcagaaaacaggggagacaagcgcaactggggtcattgggtgccaactcgacgttatacatcgtgtaccctggccacaaacacttattccgctgtcagtcgccggcttcttcctgtcaggccaaaaaaacgagcccagggcacatttggacaaatctcatttcttattttttctctttgcattcatggtgaatgcgtcggcaaactaaatgctgttctgtcccatctaaataccaaacattttgagaattttctaccacacgtaacgctcataacgctcgctcaaccgaaaatcgttctcatcaagtccgcaccaccaactaccgccatcaagtctgctgacctcgtgtctgacaacaactctcactcattcttacacacatgcgcagatttagacaaaagacagactacatggacagattgtctagccgacgggataatactaatataaacttgtgtctgctcattcgcaccacttcgctagacgtggattagagcaaactcaaacataacctagcaaaaacgcggtgtcatagttccccttcactacgccctagatacggaggcacgtaggaggttgttacttgtcggaagagcaagtgggaacaagggacagagaagagcaatggactcgagtttcgaagcgacccacgagtcgggggtgcaggggttgccaggagctgagggattcctatctggtagcggtggtagtggtggttatagtggtgcgacaggtgggatagcagccggagcaggctcagcactcgagccctcctccttttcgggcaccactacgagcgctaccagcactgcaccaccaccatcctctccgccgtcacagcacagcgtcttgcatgcgcatcgccagaccaataatccgtctaagctgccggcttaccgcttcgccgatctaaacaaggaagtcattggcctgccaccgcaacagcaacctcaccagtctcatccaccacagcaggagccacgacaacatcactctcaatctcatcagtcgcgcccgcaaaaacaacagcagcagcagtacatcccgccctcgcctgtctcactcgacctggatcagcaggccgaaacacacccaagcgcggccaccacccacgcccccccaccgatccccgactctcgtgctcgcccgtccgaaaccagcaccaactccaacaacaattctattctcaattcccacagcgcgcacgttgtctcacgcgctccaccgcctcccgagaccaccctggattcccgcacgtcgaggccgtcattcctgcaaacccgctcttcctcacaggcccccgccgcgtcgtcgccgtcgccgcatgtgaagcgctctgcatctctcgatttccccagcgtcgttgccaccgctggccgatcgccaaccgagtccaccgacaccatcgtcaccgcccaccacaggcgcgccactggatccggcgacacatccctggctcaaggtcccgacggtgcatcgggcggagagcctgccgacgctgcgactcgagactgggctgccggccagcgcgagctcctcctgcccaagaccctgcagcgaagtttgtcggatgacaagagggcgtccctggtgaagagaccgcccgtctcctacaaagctcgtgccaccgccagcgcctctggaggcgttgcgtccatcccacccattcgcgcattccgcacttctggcgagagacgcagcttcggcctcgacatgaatctacgatcttctcgcacctcgattgacggggacgactatggcgactcggcccatcgcgaccggactctgcgcgccttggaagggcggcgggccgacgactatctgcagcttactcctcccgactcggctggaccgcgacctgacggcgaggagagcatagaccctttcatgaagattgcccgtgaggactcgtatcagcgcacctcagatggcaacaaggtgtacgctgagaacagtgcaattacccgtgtagcacgtactgctcgacgaccactttctgttgccatttcttcatatagatctccttctccgcccagaatatcgaggcgattgtccgaacacgaaacgaatcggcctagaggcctcagtcatgatcagggagagaagaccggaccaccagtgtcgtaccgtggccattccagagagccacagtccgacgacttgaagcttagaagtaacgccggccgagttccaccgattacacctagggccgtggcatatcacgaagtcggctccgaaccgacgtctgcgcaccaccgacgccgacagccatccgtcgatgttggatctgctgttccctcacgaatgacctctctcaagcaggccagcgtaaactacagtcacccccgagcctacagctcttcaccactcgtccccaaatcgaccgatccacaaaaatacgattcgccgtacaatgagccgaaccaaacggaagggacagactcgacgaactcgacagcagatgcttcctcgatgtgggatgagtttcgggaactcaagtctaggatgcaaaagctcgagctgcgtcagaatctaccaccaacgtcaagcgctgccatgtcacgctcctcagatgaacgcccgacgacggcaaacaccaacgccaccacgttatccgcatcccctaaacgtggtgcttcaagcgtggtgcaagccaccgaaccttcagctccaccaaaagagagtcacccgcttcttcactcggcattggccaagtcaaaagatgtcctgcccactgaggtctacgatgctcttgagacggcaacggtcgatgccctcgcacttgcgacaatgatggggactgctggtcagcctggacccatctccagtggacgaagcgagattggtagcaatggtggcatgagtggggggacagtcacggaccgtcaactcaggagaaaagcagatagtgtctgccgaagcctcacagagttgtgcctggcactgagcgagaacatgggtacgaccaagcctcagcaagctgtggctccgcctgcctttgacgaagatataacggtgacaagcccgactgtcatccaacaaccaatgaacccggcgggaactccgacggctgcagctacagccatctcgagacgctcaagcatccctgtaaatcgcgctttggaattgactacaagcccaagggccgcttcccgcttcgaagagaagagaagcagtattttcgcgccgagtggtctcccgagcccacgttatagctctaacactgctgctggtcctatcgatactactgctgctggcaggaaaacgtcgcttctcctggcgcgaaccagacgtgcgggaacagaggaacccgaagatgggcgaagaacgtcgacgatgttcagaagtcgacgcgctggcaccgaagagccggaggattattcagatcggaaaccattggtgagtcgtggacgtcgctcttccaccatagatgatgcagaagacgactcccggtttcgcacaccgtcccgcgccgtgacggaggtgaatggcacacgatcgagagaatacagctcattcctcccggcaccaccaccactaccgaaggaagcagatgctctagccacatcggcacttccgagacggagaatgggctccacgacgatcaacacacgtttgacacaaccctcagtcatcactacaacagcgtcatccattgccacaccgagtcgaaggtacttcgaccgttcaacgcctacccgtgaaactagctatgaagagaagccctccgaagaccgggctcaaagacatttttctcttgcacgtgctgggagtcaaaatagacggacaaccaatcgtcagtccatgattgcgatgcccccatcaacgacgagcggctatagataaagctcatacgaaggtcacgatcacgacgacaatgtaccagtgacctatcatccagcaaaaggcgttcttgcaattaccgtctaacatggttagatgtttgttttcttgcacatattacttcgggattacccctgttttcagtcagtcgggttgaatgttgtataattatcaggcgacaacggatggggttggaatgtgtccacaaccatgcattgcaggcttgcatctggaggtacgcgtagtcatcaccaatcggggaatggcccggagttcaagttgacctcgattgcaaaacctaatgaatggcgtctgaaaataatgtcttagttcctaaaggggacttacaggaatgactcgtgtgtcgttgaacttcttattaagtcgcgggacacgaccataatgtataaataggtagttcggttctgggaacaatgcaaaagagcgtatgatcttctgtgtgcaaaatatcatgattcttgtagtgaaagcgattcaat

SEQ ID NO: 6688 - DNA, 651 bp, Muscodor strobelii
  misc_feature: SGI cDNA ID NO. 561976
  misc_feature: Encodes the peptide sequence at SEQ ID NO 6689
atggcagttaataattctattccagtggttcagttctgttgtggacaaggcgactgtgaggcagctgggattccttggggcagtaagcgtcgccagactatcggcaaccgggcagtaggaggtgttacaggcggccaatatctgagttacgccaatggaaccataatagagccattggaggtcggaaactattcaacgtctagcaacaagaaacgaaatcctaattgctctagtggatggttgagcgattcttttgtcccgaacggcgactcgtatctcgcaacgtttgacacccaaatcgtgagctctattctcaaaaatgacgacgaggaagcggtgacacttcacaagacttgcgaccaaacagttgaaacaactacaggcttcgatgtctcaattggcgatcccttcggcatcatatccgtaggcgcctcgttcgaattctccaagtcggaatcaaccggtgtccaatacgatattactgtgccgccctatgagcatggctatgcgggattcacgcctgtgtacaagtgcattaaaggaacgatcaagacgtgcgatggtacagagcaacccgaacaggagtcttgcactggatggcttgacgccaatggacaggtcatcggagactatgctcttgttcaagactga

SEQ ID NO: 6689 - protein, 216 aa, Muscodor strobelii
  misc_feature: SGI Peptide ID NO. 561976
  misc_feature (9)..(215): NCBI GI: 171690034 Blast Desc: protein product [Podospora anserina] gi|170944972|emb|CAP71083.1| protein product [Podospora anserina]
MAVNNSIPVVQFCCGQGDCEAAGIPWGSKRRQTIGNRAVGGVTGGQYLSYANGTIIEPLEVGNYSTSSNKKRNPNCSSGWLSDSFVPNGDSYLATFDTQIVSSILKNDDEEAVTLHKTCDQTVETTTGFDVSIGDPFGIISVGASFEFSKSESTGVQYDITVPPYEHGYAGFTPVYKCIKGTIKTCDGTEQPEQESCTGWLDANGQVIGDYALVQD

SEQ ID NO: 6690 - DNA, 1419 bp, Muscodor strobelii
  misc_feature: SGI cDNA ID NO. 561977
  misc_feature: Elevated expression when VOC is produced
  misc_feature: Encodes the peptide sequence at SEQ ID NO 6691
atggtttcttctcgagcatcactttttaactttctgacctggggattcacggtactcgcgttcccagcagaaatggccactccacaacaagtcaacctactgcgacgccaagaggatgaaatccctcccaatgctctatatgtcgttgaatggtggcctatgggctgtgggaatggcaatgatgaatggctcaccggctacaaggagagtcttgcttcctgtgtcaaaaccggtggcctctttgaacaagcacctgcagatgatacatctgtaaagtttatcttcccagacgacggcacaacctacaaatggaggctctttagcagcaatgactgttccacggaaattgcagtagggtccggtggcggttgcttcaccgtaccgacatcagaacgaaatgtactcgaggcaacatcatggagcatcatgtttgttcatcttttaggcctcgtaactgctgccggtctagcttcagctgaagatacctttctttaccaagaatcattcggagcacctttcccaagtgacgccgacaattatacccaaactctagtcaagagcgctaatcaaaatcccaacgcaacgcggtctatccggttcaagccttttgcggtaccaacttcggacgaagacgacgcgtggacgtggcgtgttaacgtgacagattttgccgccccaaacgctcaggggactgtgcatgattgggatagccatacttataagccagcaacgttcgtcgatccgcacgtcgtgaatacagcgtacgagttgatttggcccggtggtatgaacgttagcgcagcgctgaatagttcgagcgatccgttctgccttagcaacgctttgattattggcatgcctgccaacgtcaccaacgcatacaccgaggacaacgcgaacagtaccgactgcacacctgctctaggaaacgaatgtgttcaagcaatactgaatgtcaaagcaaatgcactcaacaaggacgagtgttttacaggcggcgacggcgatgattggttcggcctccctgaatgcgctagtacgcttggttatgcatacagtcagacacccgagcattcaacgggcaccagcagtgtgaatctcaacgcagccaatagctcgttgttgaaaagcacaggattctggggagccatgagtgatgcattcaacggtagtgaccataccacttacgacagagctgttaatcagattcagatcatgatgatcacccgccatcagaagtcagatacaccactatcccagcttctctgtatgcgagtcaacacgacgcagcttgattcgacaaacggtggcgatagtgatggtggcacaagcgcagcagtttccattcaacgttgcacaaatcttgttacagtaactgccatagtttggttatctttggcaactgggtactattggtag

SEQ ID NO: 6691 - protein, 472 aa, Muscodor strobelii
  misc_feature: SGI Peptide ID NO. 561977
  misc_feature (22)..(132): NCBI GI: 171690032 Blast Desc: protein product [Podospora anserina] gi|170944971|emb|CAP71082.1| protein product [Podospora anserina]
  misc_feature (184)..(430): NCBI GI: 171690030 Blast Desc: protein product [Podospora anserina] gi|170944970|emb|CAP71081.1| protein product [Podospora anserina]
  misc_feature (244)..(449): NCBI GI: 116194898 Blast Desc: [Chaetomium globosum CBS 148.51] gi|88179960|gb|EAQ87428.1| [Chaetomium globosum CBS 148.51]
  misc_feature (192)..(348): NCBI GI: 189190998 Blast Desc: [Pyrenophora tritici-repentis Pt-1C-BFP] gi|187973444|gb|EDU40943.1| [Pyrenophora tritici-repentis Pt-1C-BFP]
  misc_feature: Useful for introducing or modulating the production of volatile compounds
MVSSRASLFNFLTWGFTVLAFPAEMATPQQVNLLRRQEDEIPPNALYVVEWWPMGCGNGNDEWLTGYKESLASCVKTGGLFEQAPADDTSVKFIFPDDGTTYKWRLFSSNDCSTEIAVGSGGGCFTVPTSERNVLEATSWSIMFVHLLGLVTAAGLASAEDTFLYQESFGAPFPSDADNYTQTLVKSANQNPNATRSIRFKPFAVPTSDEDDAWTWRVNVTDFAAPNAQGTVHDWDSHTYKPATFVDPHVVNTAYELIWPGGMNVSAALNSSSDPFCLSNALIIGMPANVTNAYTEDNANSTDCTPALGNECVQAILNVKANALNKDECFTGGDGDDWFGLPECASTLGYAYSQTPEHSTGTSSVNLNAANSSLLKSTGFWGAMSDAFNGSDHTTYDRAVNQIQIMMITRHQKSDTPLSQLLCMRVNTTQLDSTNGGDSDGGTSAAVSIQRCTNLVTVTAIVWLSLATGYYW

SEQ ID NO: 6692 - DNA, 1271 bp, Muscodor strobelii
  misc_feature: SGI EST ID NO. CUFF.16693.0
  misc_feature: Variant of the nucleotide sequence at SEQ ID NO 6690
gcgaaaattcgctacctcgatgttgtatctatcgacatggtgacaagataactctcttccctctcagtaatatctcgttacataaaaagacgttaacctacgggcgcatcgacgccttcgactatcgtcagctaataccgtactcaacatccttgagaaacatacttataagaatcataacaatatctcggctagggagcatcatgtttgttcatcttttaggcctcgtaactgctgccggtctagcttcagctgaagatacctttctttaccaagaatcattcggagcacctttcccaagtgacgccgacaattatacccaaactctagtcaagagcgctaatcaaaatcccaacgcaacgcggtctatccggttcaagccttttgcggtaccaacttcggacgaagacgacgcgtggacgtggcgtgttaacgtgacagattttgccgccccaaacgctcaggggactgtgcatgattgggatagccatacttataagccagcaacgttcgtcgatccgcacgtcgtgaatacagcgtacgagttgatttggcccggtggtatgaacgttagcgcagcgctgaatagttcgagcgatccgttctgccttagcaacgctttgattattggcatgcctgccaacgtcaccaacgcatacaccgaggacaacgcgaacagtaccgactgcacacctgctctaggaaacgaatgtgttcaagcaatactgaatgtcaaagcaaatgcactcaacaaggacgagtgttttacaggcggcgacggcgatgattggttcggcctccctgaatgcgctagtacgcttggttatgcatacagtcagacacccgagcattcaacgggcaccagcagtgtgaatctcaacgcagccaatagctcgttgttgaaaagcacaggattctggggagccatgagtgatgcattcaacggtagtgaccataccacttacgacagagctgttaatcagattcagatcatgatgatcacccgccatcagaagtcagatacaccactatcccagcttctctgtatgcgagtcaacacgacgcagcttgattcgacaaacggtggcgatagtgatggtggcacaagcgcagcagtttccattcaacgttgcacaaatcttgttacagtaactgccatagtttggttatctttggcaactgggtactattggtagcctcgttctgttttatcctcatatacctaggtaaatagaagcaatgccattaggagcagagccatctcgagcaca

SEQ ID NO: 6693 - DNA, 1086 bp, Muscodor strobelii
  misc_feature: SGI cDNA ID NO. 561978
  misc_feature: Encodes the peptide sequence at SEQ ID NO 6694
atggcgcccgacaggaagaagcgcgcagcagaaacgtttgggggcatactggcgaagactactcagaacccagccctcacaacgacatttacgccgccaactgaatgcgcaactccattcatcacgattccggatgctgggtgcgatgataccacatgtaatgccttatacatgccctcattggaaatagacagcgcgacaggatcatcacagttcctatgtcttccgagttttgtacccattgatgattttgactcgaacgcaatctttacatactcacctgggctcttctgcccatctggtatgaccacagcgactagtatatctaacgctgcgatctgctgtcccagcggcttgcaatacacggacctgggtaatgatacaagtcacaaatgcacagccacaataacgagcgggaaggtctatgggggcgcatggggagagcagcccgatgttggatttatctcatcaacaaacatcctctcgcatattatgatttttgcggaagctactcccgtcgttcttgtaagagacgagaaatccaccactatgtcgagtctatcatcgagagcagacagcgccagttctagtattagtgaaacgagtcctacaactagtcacttgccagcttcgagtaatggggacaatggtaataatgacgcgaccaccacatcaagtcattcttcgggtcccgataaggcagggatcgtaggaggcgttgttggtgctgttgctttaatccttctcattgctcttttatacatatggctgcggcggtatcgcagaggtcgacagaaagagcttggagccctcccagctttgccagcttctgattcatcacggaaaggaacagatagcgcacatgaatattcagcggaggcaacgcgagacgttttgggtccgagatccgagcttgaagaccctacgaccgacaggcgagctgagctcgatggccgagggatcaatgaacagggccctggaatctatgttgtgaagccggaactcgagggcacagcaagcaagaatcggttacagggtatctttgtgaaaggaaaagcggagttagaaggtaaagggtctagatga

SEQ ID NO: 6694 - protein, 361 aa, Muscodor strobelii
  misc_feature: SGI Peptide ID NO. 561978
  misc_feature (90)..(267): NCBI GI: 240106314 Blast Desc: CPC735_058770 [Coccidioides posadasii C735 delta SOWgp]
  misc_feature (179)..(334): NCBI GI: 116200291 Blast Desc: [Chaetomium globosum CBS 148.51] gi|88179580|gb|EAQ87048.1| [Chaetomium globosum CBS 148.51]
MAPDRKKRAAETFGGILAKTTQNPALTTTFTPPTECATPFITIPDAGCDDTTCNALYMPSLEIDSATGSSQFLCLPSFVPIDDFDSNAIFTYSPGLFCPSGMTTATSISNAAICCPSGLQYTDLGNDTSHKCTATITSGKVYGGAWGEQPDVGFISSTNILSHIMIFAEATPVVLVRDEKSTTMSSLSSRADSASSSISETSPTTSHLPASSNGDNGNNDATTTSSHSSGPDKAGIVGGVVGAVALILLIALLYIWLRRYRRGRQKELGALPALPASDSSRKGTDSAHEYSAEATRDVLGPRSELEDPTTDRRAELDGRGINEQGPGIYVVKPELEGTASKNRLQGIFVKGKAELEGKGSR

SEQ ID NO: 6695 - DNA, 1446 bp, Muscodor strobelii
  misc_feature: SGI EST ID NO. CUFF.16700.0
  misc_feature: Variant of the nucleotide sequence at SEQ ID NO 6693
ggattgcatagttacagcaagtcaggtcccattcggggggttgcggtgcatcctgctgaaatgatcatggttgttgcggccgcgcttattggtcttcatgctcgatttgtaacgtaccctcaaacgagccaggagtctttgattggcttcgcccccttttgcgtaaatatgtagatagagctccagaagcctcccgtctgattatagcttcttgtctgaacattgtaaatggggtcgatgggtgtgaaataatcggaatccacacaatcaacttccaatctgccaccatttgttccagtctcgtcagctagcttaatgttcagaattgcatcgcattgagaatcctttgcaaaatttacgggaacacaatatggcgcccgacaggaagaagcgcgcagcagaaacgtttgggggcatactggcgaagactactcagaacccagccctcacaacgacatttacgccgccaactgaatgcgcaactccattcatcacgattccggatgctgggtgcgatgataccacatgtaatgccttatacatgccctcattggaaatagacagcgcgacaggatcatcacagttcctatgtcttccgagttttgtacccattgatgattttgactcgaacgcaatctttacatactcacctgggctcttctgcccatctggtatgaccacagcgactagtatatctaacgctgcgatctgctgtcccagcggcttgcaatacacggacctgggtaatgatacaagtcacaaatgcacagccacaataacgagcgggaaggtctatgggggcgcatggggagagcagcccgatgttggatttatctcatcaacaaacatcctctcgcatattatgatttttgcggaagctactcccgtcgttcttgtaagagacgagaaatccaccactatgtcgagtctatcatcgagagcagacagcgccagttctagtattagtgaaacgagtcctacaactagtcacttgccagcttcgagtaatggggacaatggtaataatgacgcgaccaccacatcaagtcattcttcgggtcccgataaggcagggatcgtaggaggcgttgttggtgctgttgctttaatccttctcattgctcttttatacatatggctgcggcggtatcgcagaggtcgacagaaagagcttggagccctcccagctttgccagcttctgattcatcacggaaaggaacagatagcgcacatgaatattcagcggaggcaacgcgagacgttttgggtccgagatccgagcttgaagaccctacgaccgacaggcgagctgagctcgatggccgagggatcaatgaacagggccctggaatctatgttgtgaagccggaactcgagggcacagcaagcaagaatcggttacagggtatctttgtgaaaggaaaagcggagttagaaggtaaagg

SEQ ID NO: 6696 - DNA, 1218 bp, Muscodor strobelii
  misc_feature: SGI cDNA ID NO. 561979
  misc_feature: Elevated expression when VOC is produced
  misc_feature: Encodes the peptide sequence at SEQ ID NO 6697
atggccgtgtctctgacaaagggggctcttctgctcgtagcagcagccttgcctctcgcaaccgcaaaagacatttttgcccgcgccacttgctccactacacccgagagctgttcctcttctgcgagctcttcttccgtaagctcttgttgcgtaaacaaacccggcggtcaattcctccagacacagttctgggacactgatcccgtaaccgggccagctaactcatggacgattcacggcctgtggcccgataactgtgatggaacatatgacgagaactgcgattcctcgcgcgcctacacggacattaccactatcttgaataacaatgggaaaagttctttggtctcgtacatgaatacgtactggcagagcaacagcgagagccaggaagacttctgggaacacgagtggtctacccacggtacttgtgttagcaccctcgaccctgattgctacacgagctacaccaaaggggaagaagctgccgacttcttccagatcgtggtcgatttattcaaaaccctggacacgtactcagccttgtccgctgcgggaattacgccctctagctccaagacgtatacttcttcagccatcctcgctgcgcttaagaaggtcaccggtgtaaacccggtgatactgtgcagcagcagcgagctataccaggtgtactatggattcttcgccaatggaccgctacagaatgcggatttcgtagcatctacgattgttggacagagttcaaattgccctagtagcggtattaagtatcttcctaagagtggtgccgccactacgacgactaagaccactacgacggcaactaagactacgactactgctacctcgacagcaacgggcactgtgtctggatcaggatattggaacgcatactacggcggtagcgaaaatggatgtttgattagcgctggcacatggtacacaaccggaacctgtgctacttttacggctacgacttcaggctccggcttcaccctcaaatcatccaaaggaacgtgcggaatctcaagcggcacatttacctgcggctccggtgtcacagcaactgtcttcactactgtcggcggaaagcttgcatacaatggtcaatcaacattttacgttagcgcagtaccaagcgggagcacccaggccacgatctacacggcctcaaagtcgtactcggtaacgttccagtggcaggcggtatag

SEQ ID NO: 6697 - protein, 405 aa, Muscodor strobelii
  misc_feature: SGI Peptide ID NO. 561979
  misc_feature (47)..(249): Pfam Id: PF00445 Pfam Desc: Ribonuclease T2 family
  misc_feature (55)..(227): Pfam Id: PF00445 Pfam Desc: Ribonuclease T2 family
  misc_feature (66)..(405): NCBI GI: 154298902 Blast Desc: BC1G_11698 [Botryotinia fuckeliana B05.10] gi|150857603|gb|EDN32795.1| BC1G_11698 [Botryotinia fuckeliana B05.10]
  misc_feature (49)..(405): NCBI GI: 119189867 Blast Desc: CIMG_04981 [Coccidioides immitis RS]
  misc_feature (3)..(405): NCBI GI: 258565717 Blast Desc: ribonuclease Trv [Uncinocarpus reesii 1704] gi|237907304|gb|EEP81705.1| ribonuclease Trv [Uncinocarpus reesii 1704]
  misc_feature (30)..(400): NCBI GI: 189200809 Blast Desc: ribonuclease M [Pyrenophora tritici-repentis Pt-1C-BFP] gi|187983840|gb|EDU49328.1| ribonuclease M [Pyrenophora tritici-repentis Pt-1C-BFP]
  misc_feature (5)..(405): NCBI GI: 238839723 Blast Desc: ribonuclease T2-like protein [Microsporum canis CBS 113480]
  misc_feature (9)..(405): NCBI GI: 240111069 Blast Desc: Ribonuclease Trv , [Coccidioides posadasii C735 delta SOWgp]
  misc_feature (17)..(404): NCBI GI: 156064073 Blast Desc: SS1G_00044 [Sclerotinia sclerotiorum 1980] gi|154690906|gb|EDN90644.1| SS1G_00044 [Sclerotinia sclerotiorum 1980]
  misc_feature (50)..(405): NCBI GI: 169617858 Blast Desc: SNOG_12109 [Phaeosphaeria nodorum SN15] gi|160703501|gb|EAT80521.2| SNOG_12109 [Phaeosphaeria nodorum SN15]
  misc_feature (4)..(390): NCBI GI: 212527664 Blast Desc: ribonuclease T2 family, [Penicillium marneffei ATCC 18224] gi|210073387|gb|EEA27474.1| ribonuclease T2 family, [Penicillium marneffei ATCC 18224]
  misc_feature (48)..(400): NCBI GI: 121705722 Blast Desc: ribonuclease T2 family, [Aspergillus clavatus NRRL 1] gi|119399270|gb|EAW09698.1| ribonuclease T2 family, [Aspergillus clavatus NRRL 1]
  misc_feature (53)..(400): SWISSPROT Homolog: EC 3.1.27.1 Ribonuclease T(2)
  misc_feature: Useful for introducing or modulating the production of volatile compounds
MAVSLTKGALLLVAAALPLATAKDIFARATCSTTPESCSSSASSSSVSSCCVNKPGGQFLQTQFWDTDPVTGPANSWTIHGLWPDNCDGTYDENCDSSRAYTDITTILNNNGKSSLVSYMNTYWQSNSESQEDFWEHEWSTHGTCVSTLDPDCYTSYTKGEEAADFFQIVVDLFKTLDTYSALSAAGITPSSSKTYTSSAILAALKKVTGVNPVILCSSSELYQVYYGFFANGPLQNADFVASTIVGQSSNCPSSGIKYLPKSGAATTTTKTTTTATKTTTTATSTATGTVSGSGYWNAYYGGSENGCLISAGTWYTTGTCATFTATTSGSGFTLKSSKGTCGISSGTFTCGSGVTATVFTTVGGKLAYNGQSTFYVSAVPSGSTQATIYTASKSYSVTFQWQAV

SEQ ID NO: 6698 - DNA, 1857 bp, Muscodor strobelii
  misc_feature: SGI EST ID NO. CUFF.16728.0
  misc_feature: Variant of the nucleotide sequence at SEQ ID NO 6696
cagggaggagatactgatcacagtgtctttagctagccgagaccgacaacatgctgtaaatcgcctttggatgttttttttcatcacattgtcattcaatttataccccagaacacatttatggaagatcagagcttagaagcaaagcgacaagaaagttggcgaataagccctagaagaaacaacatccaccaatcatctttcaagcaatcggcgcccaacttccagatccagaaggtaaaattgccgagccccagtcttaccgctgcctatagctgggttgggcaggtcgtcgccctgtgcgactgctggtcctatcgtgaagcacgttcaggtgtgtgtggacgtctgtagctgaacaacacataggaatgagagtgaatacaggatgggaaggctggttacatagggcagtagacaaaagcttaaattgactataagtaccggcttggcgtgctgatcagttccctgttcctcagattgaccatcttcagtccatttggtagagtatactcggtctacactctatattcatcgtttgccatggccgtgtctctgacaaagggggctcttctgctcgtagcagcagccttgcctctcgcaaccgcaaaagacatttttgcccgcgccacttgctccactacacccgagagctgttcctcttctgcgagctcttcttccgtaagctcttgttgcgtaaacaaacccggcggtcaattcctccagacacagttctgggacactgatcccgtaaccgggccagctaactcatggacgattcacggcctgtggcccgataactgtgatggaacatatgacgagaactgcgattcctcgcgcgcctacacggacattaccactatcttgaataacaatgggaaaagttctttggtctcgtacatgaatacgtactggcagagcaacagcgagagccaggaagacttctgggaacacgagtggtctacccacggtacttgtgttagcaccctcgaccctgattgctacacgagctacaccaaaggggaagaagctgccgacttcttccagatcgtggtcgatttattcaaaaccctggacacgtactcagccttgtccgctgcgggaattacgccctctagctccaagacgtatacttcttcagccatcctcgctgcgcttaagaaggtcaccggtgtaaacccggtgatactgtgcagcagcagcgagctataccaggtgtactatggattcttcgccaatggaccgctacagaatgcggatttcgtagcatctacgattgttggacagagttcaaattgccctagtagcggtattaagtatcttcctaagagtggtgccgccactacgacgactaagaccactacgacggcaactaagactacgactactgctacctcgacagcaacgggcactgtgtctggatcaggatattggaacgcatactacggcggtagcgaaaatggatgtttgattagcgctggcacatggtacacaaccggaacctgtgctacttttacggctacgacttcaggctccggcttcaccctcaaatcatccaaaggaacgtgcggaatctcaagcggcacatttacctgcggctccggtgtcacagcaactgtcttcactactgtcggcggaaagcttgcatacaatggtcaatcaacattttacgttagcgcagtaccaagcgggagcacccaggccacgatctacacggcctcaaagtcgtactcggtaacgttccagtggcaggcggtatagccctctcaattttcaaaggagagaaatatcttgtaaggtgcggaagatagaataaaaagagttaaaatacagacgcttacaatcttactgaccgtg

SEQ ID NO: 6699 - DNA, 2424 bp, Muscodor strobelii
  misc_feature: SGI cDNA ID NO. 561980
  misc_feature: Reduced expression when VOC is produced
  misc_feature: Encodes the peptide sequence at SEQ ID NO 6700
atgccttcagccacggcccgacgaatgtacgaggatcagattccctcttttatgtccataatagacccggagacggagagcatagaagacacgcacatgcacaccgacccggaacccaagttcatggaaatgggacaaccacggcccgtcgggcatcttgcccacaaaatggtcaactcaacacccgaccagtctcttcagccccatcccgctgatcccacacatcgccatcacgacagcagctcctcgcagaacttcgagtccgccgactcctcgcctacgacgacactcacaacggacacctcctcgttatccgatccttctccgtcctcatctccagattcccccgtgaacctgataccattgaacacgttcccctcgagcactttcggcgaattgccgtcatctctaaatagcctacagattgaccgtgctcagccatcaaacccgatgcccagcttcgagcggccaatgacttccccaggtcccagaaagcccagaaacatgaagggtctgattatccagccgccaatggctccctgtctcaactcctcactggtatccgaaccttcttcgccttgcttcatcaagcccacaatcgccggacccaagaagaagccgagcttgctcagtctcaagaccgactcgcaaggactcaacatgcgcccgattacactggaggtgccgaactcgccagcctttgcgcccatgctgcagcgcagggctctgaaacactcaacctcttcgccccatatgctttcaaccatcaaatccgcaacatttggacctgcaggtggcatgacattccctacagtattcgagcgcggcacttcgggattgtccgaagtactgcgaccaacaaagcttggaaacgcgggagacgactacgcgtctaccatcatggaagaagactcgccaatcagaccgcagatggccagccgagcggccatggattttgagccattccacgacgaatctgaggcgaacgaggatcagaagtcaccaggatatccagatgggccgattgcaatttacagcgacaacgtgtatctatatctggaaccaacagccgaggaggcttccaagtttgatgttgttattaatgtcgctcgagaggttcacaacccatttaccgctcctaagcccgctactagcgggactcctgaatcgtctcgcgcttgtgacacaatcctggaatcaccaattccagacactgccatgacgagcgatagtttcgcgactgcatttgagtatcctccgcgacaaaacgcagacgtcgagacgccaaccacgccgaaagccccttcatggagcgaacccgagtaccatacccacatgccttgggaccacaatactgacattgcgacggatcttatgaatctctgcgagaccatcgaacggcgcaccaaggaaggcaagaaggtattgatccattgccagcagggagctagccgatcggcaagtttgattatcgcatatggcatgtatcaggaaccaggccttaccgtgaacgacgcgtaccatgcagctcaggccaagagccgatggatcagccccaacatgcgtcttatgtactgcctgcaagacttccagaaagaagtgtccaagaagaagctccctcctcgctctgctgctggtccgagaactggacgaagcccaatgaaccaccggccgacgctgtctgtggatgctattgattcgaaaccgaaggaacccttgactgcaccattacccgacgagagtccagatgggtctaaaggatccggctctgatcgcagccctttccatagtcgtggaaagtcgacacccaatatggaagccatttcgcctggcccttcatctgctccttcgagtttctcgtggtcagagaaggaggaaaagaaaggatccgacaagccggctcatttcagctttggggattctctggcacctccagccaccttgtcgcctcagccagaaacgaagcgtgattcgcaattcccgcctcggtcatcgtccttcttcaaaccaccaccatctccgggatttcctccgcagagtttctcgagtggaccacagagcttcgggttttcggattttggattcggttccgcccagcataattcaatggatctgcaattcgatccccctgcccatccagaaatcacaatagcgccggccctaccggttgatgacaccttgatgtcgccgcgagttgagacgatgaccaacaacccactccatgattcgttttcagaaatgtctggaatgaagttcgtcgaagtaccgcctacacctactgaaggcctattttctccacgggaaacaatgttccccagaaatcccatgtttcctttcggtcgtccgtctcaagtagcggacccgaggagcccgcctacgaagggcgaaacaccaataacacgatccattgatgatttcttataa

SEQ ID NO: 6700 - protein, 807 aa, Muscodor strobelii
  misc_feature: SGI Peptide ID NO. 561980
  misc_feature (340)..(533): Pfam Id: PF00782 Pfam Desc: Dual specificity phosphatase, catalytic domain
  misc_feature (445)..(533): Pfam Id: PF00782 Pfam Desc: Dual specificity phosphatase, catalytic domain
  misc_feature (340)..(377): Pfam Id: PF00782 Pfam Desc: Dual specificity phosphatase, catalytic domain
  misc_feature (1)..(807): NCBI GI: 85109313 Blast Desc: NCU06252 [Neurospora crassa OR74A] gi|28924496|gb|EAA33620.1| conserved [Neurospora crassa OR74A]
  misc_feature (1)..(807): NCBI GI: 46125199 Blast Desc: FG06977.1 [Gibberella zeae PH-1]
  misc_feature (1)..(807): NCBI GI: 256732724 Blast Desc: NECHADRAFT_68521 [Nectria haematococca mpVI 77-13-4]
  misc_feature (169)..(807): NCBI GI: 261360300 Blast Desc: tyrosine-protein phosphatase pmp1 [Verticillium albo-atrum VaMs.102]
  misc_feature (1)..(718): NCBI GI: 171686668 Blast Desc: protein product [Podospora anserina] gi|170943295|emb|CAP68948.1| protein product [Podospora anserina]
  misc_feature (1)..(701): NCBI GI: 116192191 Blast Desc: CHGG_05813 [Chaetomium globosum CBS 148.51] gi|88181726|gb|EAQ89194.1| CHGG_05813 [Chaetomium globosum CBS 148.51]
  misc_feature (1)..(807): NCBI GI: 156051086 Blast Desc: SS1G_06950 [Sclerotinia sclerotiorum 1980] gi|154704728|gb|EDO04467.1| SS1G_06950 [Sclerotinia sclerotiorum 1980]
  misc_feature (1)..(567): NCBI GI: 154295239 Blast Desc: BC1G_13433 [Botryotinia fuckeliana B05.10] gi|150844160|gb|EDN19353.1| BC1G_13433 [Botryotinia fuckeliana B05.10]
  misc_feature (1)..(807): NCBI GI: 169775159 Blast Desc: [Aspergillus oryzae RIB40] gi|83769910|dbj|BAE60045.1| protein product [Aspergillus oryzae]
  misc_feature (59)..(807): NCBI GI: 238496219 Blast Desc: protein-tyrosine phosphatase, [Aspergillus flavus NRRL3357] gi|220694225|gb|EED50569.1| protein-tyrosine phosphatase, [Aspergillus flavus NRRL3357]
  misc_feature: Useful for introducing or modulating the production of volatile compounds
MPSATARRMYEDQIPSFMSIIDPETESIEDTHMHTDPEPKFMEMGQPRPVGHLAHKMVNSTPDQSLQPHPADPTHRHHDSSSSQNFESADSSPTTTLTTDTSSLSDPSPSSSPDSPVNLIPLNTFPSSTFGELPSSLNSLQIDRAQPSNPMPSFERPMTSPGPRKPRNMKGLIIQPPMAPCLNSSLVSEPSSPCFIKPTIAGPKKKPSLLSLKTDSQGLNMRPITLEVPNSPAFAPMLQRRALKHSTSSPHMLSTIKSATFGPAGGMTFPTVFERGTSGLSEVLRPTKLGNAGDDYASTIMEEDSPIRPQMASRAAMDFEPFHDESEANEDQKSPGYPDGPIAIYSDNVYLYLEPTAEEASKFDVVINVAREVHNPFTAPKPATSGTPESSRACDTILESPIPDTAMTSDSFATAFEYPPRQNADVETPTTPKAPSWSEPEYHTHMPWDHNTDIATDLMNLCETIERRTKEGKKVLIHCQQGASRSASLIIAYGMYQEPGLTVNDAYHAAQAKSRWISPNMRLMYCLQDFQKEVSKKKLPPRSAAGPRTGRSPMNHRPTLSVDAIDSKPKEPLTAPLPDESPDGSKGSGSDRSPFHSRGKSTPNMEAISPGPSSAPSSFSWSEKEEKKGSDKPAHFSFGDSLAPPATLSPQPETKRDSQFPPRSSSFFKPPPSPGFPPQSFSSGPQSFGFSDFGFGSAQHNSMDLQFDPPAHPEITIAPALPVDDTLMSPRVETMTNNPLHDSFSEMSGMKFVEVPPTPTEGLFSPRETMFPRNPMFPFGRPSQVADPRSPPTKGETPITRSIDDFL

SEQ ID NO: 6701 - DNA, 4090 bp, Muscodor strobelii
  misc_feature: SGI EST ID NO. CUFF.16730.0
  misc_feature: Variant of the nucleotide sequence at SEQ ID NO 6699
cctcgacttccaacttctttccttcccttgtatgtatgtgcacgcagcaaagcgaacgtgagaaggggactgcgcgagaatacagagaagcagacagacagcccgacagcccgagacggccaatgaactctcgttcctgccgctgcctgcctgctcgtaccgcggccgctcctctgtaattcccatccacacttccactttcctctacagactgcagtattcccacctttatttctcccacccactattctatattcatccctcctctctcacctgcccaaccctcctctgccgggacaccacctctcgctcgcacagaaggcaaggcgttgcagcagcagcagcagcagtctcggtgccaccctggcctgtcagtcgcactggacattcctttctttgctgcccactgcccacccttgttgtcccactgtgtgctcaatggccctcgatctctagtcacccgaaacaccctcgcctttctaattttacctcgactggcctcacattccgatacgccattccacgacttacccttcccactatttgtccctcttactcttcttgacctccgttgctcttgaaccccgtcacctctccccatcggccaaggcgaaagaccttcgacgttctttgttgggatattctggaataccacgggcagccctaggcggacgaaagtgccgagagaaggagtgtggtgtgcaggaataggattcagcagcgctgtccagcataagggtcttctctctttaccgctcattcatgaccacaaacattcccttgatatacagacatcacatcacgtcacccccttgaaaccacctgcgtcctggcttcacatcatcatacgttagaagcgacgacgacacatctcttggcctcgcgactcgagctggggacagcacagacaccgtcgccgaacatgccttcagccacggcccgacgaatgtacgaggatcagattccctcttttatgtccataatagacccggagacggagagcatagaagacacgcacatgcacaccgacccggaacccaagttcatggaaatgggacaaccacggcccgtcgggcatcttgcccacaaaatggtcaactcaacacccgaccagtctcttcagccccatcccgctgatcccacacatcgccatcacgacagcagctcctcgcagaacttcgagtccgccgactcctcgcctacgacgacactcacaacggacacctcctcgttatccgatccttctccgtcctcatctccagattcccccgtgaacctgataccattgaacacgttcccctcgagcactttcggcgaattgccgtcatctctaaatagcctacagattgaccgtgctcagccatcaaacccgatgcccagcttcgagcggccaatgacttccccaggtcccagaaagcccagaaacatgaagggtctgattatccagccgccaatggctccctgtctcaactcctcactggtatccgaaccttcttcgccttgcttcatcaagcccacaatcgccggacccaagaagaagccgagcttgctcagtctcaagaccgactcgcaaggactcaacatgcgcccgattacactggaggtgccgaactcgccagcctttgcgcccatgctgcagcgcagggctctgaaacactcaacctcttcgccccatatgctttcaaccatcaaatccgcaacatttggacctgcaggtggcatgacattccctacagtattcgagcgcggcacttcgggattgtccgaagtactgcgaccaacaaagcttggaaacgcgggagacgactacgcgtctaccatcatggaagaagactcgccaatcagaccgcagatggccagccgagcggccatggattttgagccattccacgacgaatctgaggcgaacgaggatcagaagtcaccaggatatccagatgggccgattgcaatttacagcgacaacgtgtatctatatctggaaccaacagccgaggaggcttccaagtttgatgttgttattaatgtcgctcgagaggttcacaacccatttaccgctcctaagcccgctactagcgggactcctgaatcgtctcgcgcttgtgacacaatcctggaatcaccaattccagacactgccatgacgagcgatagtttcgcgactgcatttgagtatcctccgcgacaaaacgcagacgtcgagacgccaaccacgccgaaagccccttcatggagcgaacccgagtaccatacccacatgccttgggaccacaatactgacattgcgacggatcttatgaatctctgcgagaccatcgaacggcgcaccaaggaaggcaagaaggtattgatccattgccagcagggagctagccgatcggcaagtttgattatcgcatatggcatgtatcaggaaccaggccttaccgtgaacgacgcgtaccatgcagctcaggccaagagccgatggatcagccccaacatgcgtcttatgtactgcctgcaagacttccagaaagaagtgtccaagaagaagctccctcctcgctctgctgctggtccgagaactggacgaagcccaatgaaccaccggccgacgctgtctgtggatgctattgattcgaaaccgaaggaacccttgactgcaccattacccgacgagagtccagatgggtctaaaggatccggctctgatcgcagccctttccatagtcgtggaaagtcgacacccaatatggaagccatttcgcctggcccttcatctgctccttcgagtttctcgtggtcagagaaggaggaaaagaaaggatccgacaagccggctcatttcagctttggggattctctggcacctccagccaccttgtcgcctcagccagaaacgaagcgtgattcgcaattcccgcctcggtcatcgtccttcttcaaaccaccaccatctccgggatttcctccgcagagtttctcgagtggaccacagagcttcgggttttcggattttggattcggttccgcccagcataattcaatggatctgcaattcgatccccctgcccatccagaaatcacaatagcgccggccctaccggttgatgacaccttgatgtcgccgcgagttgagacgatgaccaacaacccactccatgattcgttttcagaaatgtctggaatgaagttcgtcgaagtaccgcctacacctactgaaggcctattttctccacgggaaacaatgttccccagaaatcccatgtttcctttcggtcgtccgtctcaagtagcggacccgaggagcccgcctacgaagggcgaaacaccaataacacgatccattgatgatttcttataatcatgagcgctcaatatctcatcacagccagagatgctcatttttcaacacaacgacctcgcacaaagcatctaccgaccacttacttcacatatatcatccaagtagcgagcaatctcgccttgttccatttgtttgaaagaaacaccaaccgtcgttttgatttttctcagctttagccattttcttgtttcttgacagcatagccgagcaccggagcggcgaataccggataccctggcggcgcatttgtgtgacaacgggaaaaaaagacatcggtgggaaggtcatcgttttgacttcgccctccttaattgtgtgctcatgcggaccttgaagaaccctaccaatgtataatcggaatttactacgtgtaatggaggacagacataccctacgccaagcaacaaaacttggcgatgatggacggagggaaagccaggggcgttgcataaatgaggcagtgacgatagcggggatgcggccgggtggccagcaagtgagagagagatgccgaagctgggcatttggcgttttcaggcgttctttctcctgggttgaaaaggaacgcagaggatttggatatttatgagacacacctgcgcatagccgtgtgctatctctggggaataacttagggggtcatctacggccggagcccgaatcttgtacatatacataacatcatgaatgacaatactatgtggctagcgctcatcgcgttggtctatgaaaaaactgaaa

SEQ ID NO: 6702 - DNA, 612 bp, Muscodor strobelii
  misc_feature: SGI cDNA ID NO. 561981
  misc_feature: Encodes the peptide sequence at SEQ ID NO 6703
atggaagccatttcgcctggcccttcatctgctccttcgagtttctcgtggtcagagaaggaggaaaagaaaggatccgacaagccggctcatttcagctttggggattctctggcacctccagccaccttgtcgcctcagccagaaacgaagcgtgattcgcaattcccgcctcggtcatcgtccttcttcaaaccaccaccatctccgggatttcctccgcagagtttctcgagtggaccacagagcttcgggttttcggattttggattcggttccgcccagcataattcaatggatctgcaattcgatccccctgcccatccagaaatcacaatagcgccggccctaccggttgatgacaccttgatgtcgccgcgagttgagacgatgaccaacaacccactccatgattcgttttcagaaatgtctggaatgaagttcgtcgaagtaccgcctacacctactgaaggcctattttctccacgggaaacaatgttccccagaaatcccatgtttcctttcggtcgtccgtctcaagtagcggacccgaggagcccgcctacgaagggcgaaacaccaataacacgatccattgatgatttcttataa

SEQ ID NO: 6703 - protein, 203 aa, Muscodor strobelii
  misc_feature: SGI Peptide ID NO. 561981
  misc_feature (10)..(203): NCBI GI: 261360300 Blast Desc: tyrosine-protein phosphatase pmp1 [Verticillium albo-atrum VaMs.102]
  misc_feature (4)..(203): NCBI GI: 46125199 Blast Desc: FG06977.1 [Gibberella zeae PH-1]
  misc_feature (56)..(203): NCBI GI: 116192191 Blast Desc: CHGG_05813 [Chaetomium globosum CBS 148.51] gi|88181726|gb|EAQ89194.1| CHGG_05813 [Chaetomium globosum CBS 148.51]
  misc_feature (1)..(203): NCBI GI: 256732724 Blast Desc: NECHADRAFT_68521 [Nectria haematococca mpVI 77-13-4]
  misc_feature (57)..(203): NCBI GI: 85109313 Blast Desc: NCU06252 [Neurospora crassa OR74A] gi|28924496|gb|EAA33620.1| conserved [Neurospora crassa OR74A]
  misc_feature (121)..(203): NCBI GI: 171686668 Blast Desc: protein product [Podospora anserina] gi|170943295|emb|CAP68948.1| protein product [Podospora anserina]
  misc_feature (123)..(203): NCBI GI: 156051086 Blast Desc: SS1G_06950 [Sclerotinia sclerotiorum 1980] gi|154704728|gb|EDO04467.1| SS1G_06950 [Sclerotinia sclerotiorum 1980]
  misc_feature (123)..(203): NCBI GI: 154295239 Blast Desc: BC1G_13433 [Botryotinia fuckeliana B05.10] gi|150844160|gb|EDN19353.1| BC1G_13433 [Botryotinia fuckeliana B05.10]
MEAISPGPSSAPSSFSWSEKEEKKGSDKPAHFSFGDSLAPPATLSPQPETKRDSQFPPRSSSFFKPPPSPGFPPQSFSSGPQSFGFSDFGFGSAQHNSMDLQFDPPAHPEITIAPALPVDDTLMSPRVETMTNNPLHDSFSEMSGMKFVEVPPTPTEGLFSPRETMFPRNPMFPFGRPSQVADPRSPPTKGETPITRSIDDFL

SEQ ID NO: 6704 - DNA, 4090 bp, Muscodor strobelii; identical to SEQ ID NO: 6701
  misc_feature: SGI EST ID NO. CUFF.16730.0
  misc_feature: Variant of the nucleotide sequence at SEQ ID NO 6702

SEQ ID NO: 6705 - DNA, 1269 bp, Muscodor strobelii
  misc_feature: SGI cDNA ID NO. 561982
  misc_feature: Encodes the peptide sequence at SEQ ID NO 6706
atggctcgcacgaagcaagtcaaacccgtcgaacggcagccttcgtcagaatacgtgtctggtcagcctgggccaacgatgaaacggaaggacgacgtcgccgctccgtccaacggggccgcaagtaagccagcggtaccgaccgtggctgcgatcgacttggataaaccggaagctggagtgacgcagctcgtgatcgctgtcgctggtatttacggatcatttttaacatgggcatacctccaagaaaagctcacaacaacacctcacggcccggcaggcgcaacagaagtcttcaaataccccgtattcctcaacacgatccagtcgctcttcgccgcgacgacaggcgcgatatatctctggttcagcacaccgaggggttcctcaatcccgcccatcatcccctcgtccaagatcttactccctctcctcctcgtagcgctcacgagttctctcgcctcgccattcggctacgcgtcgctcgcgcatatagactacatcacgttcctcctggcgaaatcttgcaaattgctaccagttatgttcttacacatcactgtcttccggaagagatacccgctgtacaaatacatggtcgtcgcggccgtgacggcaggcgtcgcggtcttcaccctccactcggggaagaagagcaagaaacacggtggtggcggcagtggcctagatgacaaggagagaaacagcgcttggggtctgctactactcggtattaatctgcttttcgacggcttgacgaatagtacgcaggattatatctttggggctttccagccttatactggaccccagatgatgtgtgctaataacttgatgagcactgctgttacggctgcgtatctcgtgctgagcccctggcttgtgcatactggtgctggagagtggttaggcatggatatcgctgggtctgcgggcgagcttgaggaggcgatggagttcatggggaggtatccaggtgtttgggcggatgtcctgggtttcgctgcttgtggtgctgtgggacaggttttcatcttctacaccctcgcaacattctcctcagtcctcctagtaaccgtgacagtaacccgcaagatgttcaccatgatcctatcagtcgtcgccttcggccaccgcctcacgcagatgcaggtcctcggcgtcggtctggtattcggcggcatcggagcagaagcagccatcgcgcgcagagagaagatcgctaaagaagaggctaagagaaaagccaaggctgctaagacgctgtag

SEQ ID NO: 6706 - protein, 422 aa, Muscodor strobelii
  misc_feature: SGI Peptide ID NO. 561982
  misc_feature (64)..(406): Pfam Id: PF08449 Pfam Desc: UAA transporter family
  misc_feature (64)..(281): Pfam Id: PF08449 Pfam Desc: UAA transporter family
  misc_feature (312)..(406): Pfam Id: PF08449 Pfam Desc: UAA transporter family
  misc_feature (1)..(404): NCBI GI: 256733175 Blast Desc: NECHADRAFT_5153 [Nectria haematococca mpVI 77-13-4]
  misc_feature (1)..(420): NCBI GI: 156051106 Blast Desc: SS1G_06960 [Sclerotinia sclerotiorum 1980] gi|154704738|gb|EDO04477.1| SS1G_06960 [Sclerotinia sclerotiorum 1980]
  misc_feature (1)..(404): NCBI GI: 116192193 Blast Desc: CHGG_05814 [Chaetomium globosum CBS 148.51] gi|88181727|gb|EAQ89195.1| CHGG_05814 [Chaetomium globosum CBS 148.51]
  misc_feature (1)..(404): NCBI GI: 145602063 Blast Desc: MGG_05219 [Magnaporthe grisea 70-15] gi|145010509|gb|EDJ95165.1| MGG_05219 [Magnaporthe grisea 70-15]
  misc_feature (1)..(419): NCBI GI: 164425214 Blast Desc: NCU10721 [Neurospora crassa OR74A] gi|157070836|gb|EDO65118.1| [Neurospora crassa OR74A]
  misc_feature (1)..(401): NCBI GI: 154295225 Blast Desc: BC1G_13426 [Botryotinia fuckeliana B05.10] gi|150844153|gb|EDN19346.1| BC1G_13426 [Botryotinia fuckeliana B05.10]
  misc_feature (27)..(405): NCBI GI: 169622890 Blast Desc: SNOG_14670 [Phaeosphaeria nodorum SN15] gi|111056742|gb|EAT77862.1| SNOG_14670 [Phaeosphaeria nodorum SN15]
  misc_feature (1)..(404): NCBI GI: 238503940 Blast Desc: UDP-Glc/Gal endoplasmic reticulum nucleotide sugar transporter [Aspergillus flavus NRRL3357] gi|220690673|gb|EED47022.1| UDP-Glc/Gal endoplasmic reticulum
  misc_feature (1)..(413): NCBI GI: 119496703 Blast Desc: UDP-Glc/Gal endoplasmic reticulum nucleotide sugar transporter [Neosartorya fischeri NRRL 181] gi|119413287|gb|EAW23228.1| UDP-Glc/Gal endoplasmic reticulum
  misc_feature (1)..(413): NCBI GI: 121702711 Blast Desc: UDP-Glc/Gal endoplasmic reticulum nucleotide sugar transporter [Aspergillus clavatus NRRL 1] gi|119397763|gb|EAW08194.1| UDP-Glc/Gal endoplasmic reticulum 1]
MARTKQVKPVERQPSSEYVSGQPGPTMKRKDDVAAPSNGAASKPAVPTVAAIDLDKPEAGVTQLVIAVAGIYGSFLTWAYLQEKLTTTPHGPAGATEVFKYPVFLNTIQSLFAATTGAIYLWFSTPRGSSIPPIIPSSKILLPLLLVALTSSLASPFGYASLAHIDYITFLLAKSCKLLPVMFLHITVFRKRYPLYKYMVVAAVTAGVAVFTLHSGKKSKKHGGGGSGLDDKERNSAWGLLLLGINLLFDGLTNSTQDYIFGAFQPYTGPQMMCANNLMSTAVTAAYLVLSPWLVHTGAGEWLGMDIAGSAGELEEAMEFMGRYPGVWADVLGFAACGAVGQVFIFYTLATFSSVLLVTVTVTRKMFTMILSVVAFGHRLTQMQVLGVGLVFGGIGAEAAIARREKIAKEEAKRKAKAAKTL

SEQ ID NO: 6707 - DNA, 4958 bp, Muscodor strobelii
  misc_feature: SGI EST ID NO. CUFF.17071.0
  misc_feature: Variant of the nucleotide sequence at SEQ ID NO 6705
gcgagataagatctgtttgtggtcccattccacatgacgttcgtgcccgctctctctcaactctcgagatacccattgcacccgctacagccattgcgcccagtgcttgccccattgtgcattgtgcgctgccacgccctctcgtgaccatctgcgcctgcctccgcctctgtcctacattgccgcccttcctcaccgatctccttacctcatcttacatgaacagtgcatccctccagtcgcgcttcgcaccaccgtcttcagggtcctaaccttccgcctcagtcgcaactcaacccggactgcagagtaacgatccgcctcgcatgcgctgtttgcaaaacacgcagcccatctccccgcctccctcacatcatccttcttcgtaaaccccgcgcccactcacccgtcccgacgtccgtcgcgcaatctatcacaactcgtcccatctgctccatccgcctcgactcacttccaacatgtcggctacgcaagagatcccgcccaacggcaacgactctatggattacaagtacgacgacaacgagcctcgcctcggccccgatggcgagcccgcccctaagacggatgaggaatatgctgttgctcagttgaccctccgcgccatcgtgtcgtccaaggaggccggcgtcatcatcggcaagggtggcaagaatgtcgccgagctacgagaagagactggcgtcaaggccggagtcagcaaggtagtgcaaggcgtccatgaccgcgtattgacagttacgggcggatgcgagtccatcgccaaagcctacgccattgtcgcacgatcactgctcgaaggcgccccggccatgggcatgggcggcgtcattcagcagactggaactcaccagatcaagttgcttatttcgcacaaccagatgggaacgatcatcggccgccaagggctaaagatcaagcatattcaggactcatctggcgtgcgaatggttgcccagaaagagatgctgccgcaatcgaccgagcgtatcgttgagctgcaggggtcgcccgagggcatccagcgcgcaatctgggagatctgcaagtgtctggttgatgactggcagcgtggtactggcacggttctatacaaccctgttgtccgcacccagccaggtggtgcggggtcgctgggaggtgttggtgctaccggcgggggtggctacggctcgtccaacagaggcgactttggcgctcctcgcgtaatgcgcactggaaatggtgccgactttagcaacggcgcaccgcgccaatacacccgtcgctcagactccgatgccgctctgcgcgggccgcccacgcacgacgagaacggagaggagattcagacccagaacatcagcatccccgcagacatggttggctgtatcattggacgagctggtagcaagatcagcgaaatccgcaagacctcaggagcccgcatctccattgccaaggcaccccacgacgagacaggcgagagaatgttcaccatcatgggaaccgccaaggccaacgagacggctcttttcttgctgtacgagaacctggaggcggagaagatgcgacgaagccaggcgcagtcgcctgagtagttggtatttaggttcattcggatttgacggcgttgatgccgacactgcgatttcacgtttgtgcagggcatttctaattgttgggcccaacttggcgacataccctgcgttcggggaactttccagacctgatggccgcaaggctcttgatcccgggcgtggtatctaagaaacgacgtaacgacaacactttcccctcggccgctaccacccaaaaaaacgcaaatcaacttactctttctctccgcttttcctaatcttccccgcggctcattcctactataaccgagatgccttcattggtaccccaaacaacaatcattaaatgcaattgacccacagtcattgttacacccggacaaggtccaccgcgccacaccgcagcgttagctgtccacggactgatttcgacatggcattttcctcattcgaaacagattagtggcagccgaaacatcttcatcagctcgttcctttggtcgaaagagaggtggaaaggctatgagatgctttttgcaacgttctcacagcttcaacgcacgcgatccattattctctatggggctggactgacggtgacccaacttcgcgaagtgtcgaggctgtgtgtgcctggatcatccatggcagttgcgctcattgaagccttgcttacgacgaagtggttctcgactctttcgtgtcttgcccatggttcacccttgtaccaattacctcgcaccatcctcttcccgacgtttcctatctccaaactccatattcctcaaacggccaggctgccgacttgcctctgtctttggcctcgaacatgctcatctcgactgagcggcccgctgttctgccgggtcagcgatcgtctgcgtgtctcgaggctatttccctagacgcgcgataggcttggccaatcataatagtaaaccttctcgattagcaacggggcagtatgtgaccagtacgtgacccctgatccatggcgctttccacgtcccgaaagccgtgtagctggagcgatatgtaaggtagtgattgagaggaaattttgaggaatttcatgatatgcgaatgtccccatattgggtgaagtgtgattcgttgcaccgtgacttgtgtctcctattttccagtcacatacgtccagtttaaatcggcaaaagagggaatcgtgaatgggttttgacggctatgtgtattgacttcaccaacgtgtgcttgcaggtacgtcaggtaggtcgggcatgtagcgcctgccgtcgttcagtgaggtacgaggtcgtacgtcgttcggagactgccggatagctaatcagatgggactgaaaatagcagccaagacgtaagtgggcaagcgtcaaccggtctctagaccgggggctaaggcgacgtgatgaatttgtccagactccatttgcccatgccaaatgcaggtctggcgcaggggtatccttcaccgcccagctcttagcttcctaatagggctgactattctattcatccgatgattctgccaacgaccctgaaatgccaactgtcatcagcatagctagagtctgctcattctctcaagagtcgttctccgccactttctcctctcgtggattctatagaagacaatcaggttctttttcagtatcattttccgtgtgatcacctttgtttttttgtttttgaaaaattgtctctcattcatcagtataaagttatcaacttatcgagataagatagtttagataacattgcattcgtgtcttgggggtgatattcatattcataccttttccccactcatcacattacactcttttgtttccgacttcgtcgcggcgccgcattttgtcgtccagctgtcgtttggaacttacctactgcgatggctcgcacgaagcaagtcaaacccgtcgaacggcagccttcgtcagaatacgtgtctggtcagcctgggccaacgatgaaacggaaggacgacgtcgccgctccgtccaacggggccgcaagtaagccagcggtaccgaccgtggctgcgatcgacttggataaaccggaagctggagtgacgcagctcgtgatcgctgtcgctggtatttacggatcatttttaacatgggcatacctccaagaaaagctcacaacaacacctcacggcccggcaggcgcaacagaagtcttcaaataccccgtattcctcaacacgatccagtcgctcttcgccgcgacgacaggcgcgatatatctctggttcagcacaccgaggggttcctcaatcccgcccatcatcccctcgtccaagatcttactccctctcctcctcgtagcgctcacgagttctctcgcctcgccattcggctacgcgtcgctcgcgcatatagactacatcacgttcctcctggcgaaatcttgcaaattgctaccagttatgttcttacacatcactgtcttccggaagagatacccgctgtacaaatacatggtcgtcgcggccgtgacggcaggcgtcgcggtcttcaccctccactcggggaagaagagcaagaaacacggtggtggcggcagtggcctagatgacaaggagagaaacagcgcttggggtctgctactactcggtattaatctgcttttcgacggcttgacgaatagtacgcaggattatatctttggggctttccagccttatactggaccccagatgatgtgtgctaataacttgatgagcactgctgttacggctgcgtatctcgtgctgagcccctggcttgtgcatactggtgctggagagtggttaggcatggatatcgctgggtctgcgggcgagcttgaggaggcgatggagttcatggggaggtatccaggtgtttgggcggatgtcctgggtttcgctgcttgtggtgctgtgggacaggttttcatctgtgagttcttttgtttccctattcttcttatcataaagcaaaaacaaaatgactaacaacaacctagtctacaccctcgcaacattctcctcagtcctcctagtaaccgtgacagtaacccgcaagatgttcaccatgatcctatcagtcgtcgccttcggccaccgcctcacgcagatgcaggtcctcggcgtcggtctggtattcggcggcatcggagcagaagcagccatcgcgcgcagagagaagatcgctaaagaagaggctaagagaaaagccaaggctgctaagacgctgtagaggactcgatcgggatgttagaatgacggaagtacgggggatcccaagatacgtaacttacctatttagagactagatggttgaaagaattcattagagaaacgaatgaaagaaacttcgtcttgacataaggtagtgagccgatgtgattatg

SEQ ID NO: 6708 - DNA, 1122 bp, Muscodor strobelii
  misc_feature: SGI cDNA ID NO. 561983
  misc_feature: Encodes the peptide sequence at SEQ ID NO 6709
atgtcggctacgcaagagatcccgcccaacggcaacgactctatggattacaagtacgacgacaacgagcctcgcctcggccccgatggcgagcccgcccctaagacggatgaggaatatgctgttgctcagttgaccctccgcgccatcgtgtcgtccaaggaggccggcgtcatcatcggcaagggtggcaagaatgtcgccgagctacgagaagagactggcgtcaaggccggagtcagcaaggtagtgcaaggcgtccatgaccgcgtattgacagttacgggcggatgcgagtccatcgccaaagcctacgccattgtcgcacgatcactgctcgaaggcgccccggccatgggcatgggcggcgtcattcagcagactggaactcaccagatcaagttgcttatttcgcacaaccagatgggaacgatcatcggccgccaagggctaaagatcaagcatattcaggactcatctggcgtgcgaatggttgcccagaaagagatgctgccgcaatcgaccgagcgtatcgttgagctgcaggggtcgcccgagggcatccagcgcgcaatctgggagatctgcaagtgtctggttgatgactggcagcgtggtactggcacggttctatacaaccctgttgtccgcacccagccaggtggtgcggggtcgctgggaggtgttggtgctaccggcgggggtggctacggctcgtccaacagaggcgactttggcgctcctcgcgtaatgcgcactggaaatggtgccgactttagcaacggcgcaccgcgccaatacacccgtcgctcagactccgatgccgctctgcgcgggccgcccacgcacgacgagaacggagaggagattcagacccagaacatcagcatccccgcagacatggttggctgtatcattggacgagctggtagcaagatcagcgaaatccgcaagacctcaggagcccgcatctccattgccaaggcaccccacgacgagacaggcgagagaatgttcaccatcatgggaaccgccaaggccaacgagacggctcttttcttgctgtacgagaacctggaggcggagaagatgcgacgaagccaggcgcagtcgcctgagtag

SEQ ID NO: 6709 - protein, 373 aa, Muscodor strobelii
  misc_feature: SGI Peptide ID NO. 561983
  misc_feature (292)..(355): Pfam Id: PF00013 Pfam Desc: KH domain
  misc_feature (132)..(195): Pfam Id: PF00013 Pfam Desc: KH domain
  misc_feature (46)..(108): Pfam Id: PF00013 Pfam Desc: KH domain
  misc_feature (1)..(373): NCBI GI: 145602061 Blast Desc: conserved [Magnaporthe grisea 70-15] gi|145010508|gb|EDJ95164.1| conserved [Magnaporthe grisea 70-15]
  misc_feature (1)..(373): NCBI GI: 256733176 Blast Desc: [Nectria haematococca mpVI 77-13-4]
  misc_feature (1)..(373): NCBI GI: 46125203 Blast Desc: FG06979.1 [Gibberella zeae PH-1]
  misc_feature (1)..(373): NCBI GI: 116192195 Blast Desc: conserved [Chaetomium globosum CBS 148.51] gi|88181728|gb|EAQ89196.1| conserved [Chaetomium globosum CBS 148.51]
  misc_feature (9)..(373): NCBI GI: 156051102 Blast Desc: SS1G_06958 [Sclerotinia sclerotiorum 1980] gi|154704736|gb|EDO04475.1| SS1G_06958 [Sclerotinia sclerotiorum 1980]
  misc_feature (9)..(373): NCBI GI: 154295229 Blast Desc: conserved [Botryotinia fuckeliana B05.10] gi|150844155|gb|EDN19348.1| conserved [Botryotinia fuckeliana B05.10]
  misc_feature (1)..(370): NCBI GI: 171686672 Blast Desc: protein product [Podospora anserina] gi|170943297|emb|CAP68950.1| protein product [Podospora anserina]
  misc_feature (1)..(368): NCBI GI: 85109816 Blast Desc: NCU06251 [Neurospora crassa OR74A] gi|28924753|gb|EAA33866.1| conserved [Neurospora crassa OR74A]
  misc_feature (16)..(368): NCBI GI: 261197389 Blast Desc: KH domain RNA-binding protein [Ajellomyces dermatitidis SLH14081] gi|239595727|gb|EEQ78308.1| KH domain RNA-binding protein [Ajellomyces dermatitidis SLH14081] KH domain
  misc_feature (30)..(368): NCBI GI: 154275678 Blast Desc: [Ajellomyces capsulatus NAm1] gi|150415130|gb|EDN10492.1| [Ajellomyces capsulatus NAm1] gi|225556762|gb|EEH05050.1| KH domain RNA-binding protein G186AR]
MSATQEIPPNGNDSMDYKYDDNEPRLGPDGEPAPKTDEEYAVAQLTLRAIVSSKEAGVIIGKGGKNVAELREETGVKAGVSKVVQGVHDRVLTVTGGCESIAKAYAIVARSLLEGAPAMGMGGVIQQTGTHQIKLLISHNQMGTIIGRQGLKIKHIQDSSGVRMVAQKEMLPQSTERIVELQGSPEGIQRAIWEICKCLVDDWQRGTGTVLYNPVVRTQPGGAGSLGGVGATGGGGYGSSNRGDFGAPRVMRTGNGADFSNGAPRQYTRRSDSDAALRGPPTHDENGEEIQTQNISIPADMVGCIIGRAGSKISEIRKTSGARISIAKAPHDETGERMFTIMGTAKANETALFLLYENLEAEKMRRSQAQSPE

SEQ ID NO: 6710 - DNA, 4958 bp, Muscodor strobelii; identical to SEQ ID NO: 6707
  misc_feature: SGI EST ID NO. CUFF.17071.0
  misc_feature: Variant of the nucleotide sequence at SEQ ID NO 6708

SEQ ID NO: 6711 - DNA, 687 bp, Muscodor strobelii
  misc_feature: SGI cDNA ID NO. 561984
  misc_feature: Encodes the peptide sequence at SEQ ID NO 6712
atggctggccaaggccggcccacgcaagcctactatgccaaggccataccaggtcatgctctctcgacggaggattcagaagcactagctacgcggcagcagcagtacctgcaacccggcgcccctcggcacaccgcgcagcttcagtcctctagaatcaaggcctgtagcagtcagggcctggtcaccggtcaattactgaaccccgccattgatgctcccatgctccccctcctgcccccccgtcgccaggccagagctctgctgcgtttttctgctctccctgctcgtctgccccaatgcacccaccccatgcaccaatccgcgtcgccagatgtgcctctgcatgctttggctcgctccacccccgtcgctggatcgcatgccacaaccgtgcagtcgtcacaaatctttggcgagataagatctgtttgtggtcccattccacatgacgttcgtgcccgctctctctcaactctcgagatacccattgcacccgctacagccattgcgcccagtgcttgccccattgtgcattgtgcgctgccacgccctctcgtgaccatctgcgcctgcctccgcctctgtcctacattgccgcccttcctcaccgatctccttacctcatcttacatgaacagtgcatccctccagtcgcgcttcgcaccaccgtcttcagggtcctaa

SEQ ID NO: 6712 - protein, 228 aa, Muscodor strobelii
  misc_feature: SGI Peptide ID NO. 561984
MAGQGRPTQAYYAKAIPGHALSTEDSEALATRQQQYLQPGAPRHTAQLQSSRIKACSSQGLVTGQLLNPAIDAPMLPLLPPRRQARALLRFSALPARLPQCTHPMHQSASPDVPLHALARSTPVAGSHATTVQSSQIFGEIRSVCGPIPHDVRARSLSTLEIPIAPATAIAPSACPIVHCALPRPLVTICACLRLCPTLPPFLTDLLTSSYMNSASLQSRFAPPSSGS

SEQ ID NO: 6713 - DNA, 5232 bp, Muscodor strobelii
  misc_feature: SGI EST ID NO. CUFF.17071.4
  misc_feature: Variant of the nucleotide sequence at SEQ ID NO 6711
ctagcattgcagaagtacacacggcacctcccccatgtccaacgtgctgccattggcaaatcaacgtcaacatcgcacctggggtcaatcattcaacgatcgccattgaatcgcatctgcgtgctcccctctcctacctctcgtagtaccctgtgagctttgctctccacgagcaacccccaaaccttacacatacatccgtctccccatcacccaaatcacccatcaccgtttctttcgacgccttctaccctctttcacccacgcacatcttctcgtcgccatcccaactctcctccatccgcccgcctcccgctcccttgacatctatctacccactacccactttaccggcttccctccccctctcactgccaccgcaggttaagtttctctcgaagctcttcctacctggtatcatagatcctcccgcaacttaaatctctgggaagcattcttcggctctatccgatcctcgctatattccaacccatcatcccctcgtctcgaccagacttggaccctttgtctgtctgctcagtcgtcgccagtccgcatctatctaaaactttccctccagtcgcgcttcgcaccaccgtcttcagggtcctaaccttccgcctcagtcgcaactcaacccggactgcagagtaacgatccgcctcgcatgcgctgtttgcaaaacacgcagcccatctccccgcctccctcacatcatccttcttcgtaaaccccgcgcccactcacccgtcccgacgtccgtcgcgcaatctatcacaactcgtcccatctgctccatccgcctcgactcacttccaacatgtcggctacgcaagagatcccgcccaacggcaacgactctatggattacaagtacgacgacaacgagcctcgcctcggccccgatggcgagcccgcccctaagacggatgaggaatatgctgttgctcagttgaccctccgcgccatcgtgtcgtccaaggaggccggcgtcatcatcggcaagggtggcaagaatgtcgccgagctacgagaagagactggcgtcaaggccggagtcagcaaggtagtgcaaggcgtccatgaccgcgtattgacagttacgggcggatgcgagtccatcgccaaagcctacgccattgtcgcacgatcactgctcgaaggcgccccggccatgggcatgggcggcgtcattcagcagactggaactcaccagatcaagttgcttatttcgcacaaccagatgggaacgatcatcggccgccaagggctaaagatcaagcatattcaggactcatctggcgtgcgaatggttgcccagaaagagatgctgccgcaatcgaccgagcgtatcgttgagctgcaggggtcgcccgagggcatccagcgcgcaatctgggagatctgcaagtgtctggttgatgactggcagcgtggtactggcacggttctatacaaccctgttgtccgcacccagccaggtggtgcggggtcgctgggaggtgttggtgctaccggcgggggtggctacggctcgtccaacagaggcgactttggcgctcctcgcgtaatgcgcactggaaatggtgccgactttagcaacggcgcaccgcgccaatacacccgtcgctcagactccgatgccgctctgcgcgggccgcccacgcacgacgagaacggagaggagattcagacccagaacatcagcatccccgcagacatggttggctgtatcattggacgagctggtagcaagatcagcgaaatccgcaagacctcaggagcccgcatctccattgccaaggcaccccacgacgagacaggcgagagaatgttcaccatcatgggaaccgccaaggccaacgagacggctcttttcttgctgtacgagaacctggaggcggagaagatgcgacgaagccaggcgcagtcgcctgagtagttggtatttaggttcattcggatttgacggcgttgatgccgacactgcgatttcacgtttgtgcagggcatttctaattgttgggcccaacttggcgacataccctgcgttcggggaactttccagacctgatggccgcaaggctcttgatcccgggcgtggtatctaagaaacgacgtaacgacaacactttcccctcggccgctaccacccaaaaaaacgcaaatcaacttactctttctctccgcttttcctaatcttccccgcggctcattcctactataaccgagatgccttcattggtaccccaaacaacaatcattaaatgcaattgacccacagtcattgttacacccggacaaggtccaccgcgccacaccgcagcgttagctgtccacggactgatttcgacatggcattttcctcattcgaaacagattagtggcagccgaaacatcttcatcagctcgttcctttggtcgaaagagaggtggaaaggctatgagatgctttttgcaacgttctcacagcttcaacgcacgcgatccattattctctatggggctggactgacggtgacccaacttcgcgaagtgtcgaggctgtgtgtgcctggatcatccatggcagttgcgctcattgaagccttgcttacgacgaagtggttctcgactctttcgtgtcttgcccatggttcacccttgtaccaattacctcgcaccatcctcttcccgacgtttcctatctccaaactccatattcctcaaacggccaggctgccgacttgcctctgtctttggcctcgaacatgctcatctcgactgagcggcccgctgttctgccgggtcagcgatcgtctgcgtgtctcgaggctatttccctagacgcgcgataggcttggccaatcataatagtaaaccttctcgattagcaacggggcagtatgtgaccagtacgtgacccctgatccatggcgctttccacgtcccgaaagccgtgtagctggagcgatatgtaaggtagtgattgagaggaaattttgaggaatttcatgatatgcgaatgtccccatattgggtgaagtgtgattcgttgcaccgtgacttgtgtctcctattttccagtcacatacgtccagtttaaatcggcaaaagagggaatcgtgaatgggttttgacggctatgtgtattgacttcaccaacgtgtgcttgcaggtacgtcaggtaggtcgggcatgtagcgcctgccgtcgttcagtgaggtacgaggtcgtacgtcgttcggagactgccggatagctaatcagatgggactgaaaatagcagccaagacgtaagtgggcaagcgtcaaccggtctctagaccgggggctaaggcgacgtgatgaatttgtccagactccatttgcccatgccaaatgcaggtctggcgcaggggtatccttcaccgcccagctcttagcttcctaatagggctgactattctattcatccgatgattctgccaacgaccctgaaatgccaactgtcatcagcatagctagagtctgctcattctctcaagagtcgttctccgccactttctcctctcgtggattctatagaagacaatcaggttctttttcagtatcattttccgtgtgatcacctttgtttttttgtttttgaaaaattgtctctcattcatcagtataaagttatcaacttatcgagataagatagtttagataacattgcattcgtgtcttgggggtgatattcatattcataccttttccccactcatcacattacactcttttgtttccgacttcgtcgcggcgccgcattttgtcgtccagctgtcgtttggaacttacctactgcgatggctcgcacgaagcaagtcaaacccgtcgaacggcagccttcgtcagaatacgtgtctggtcagcctgggccaacgatgaaacggaaggacgacgtcgccgctccgtccaacggggccgcaagtaagccagcggtaccgaccgtggctgcgatcgacttggataaaccggaagctggagtgacgcagctcgtgatcgctgtcgctggtatttacggatcatttttaacatgggcatacctccaagaaaagctcacaacaacacctcacggcccggcaggcgcaacagaagtcttcaaataccccgtattcctcaacacgatccagtcgctcttcgccgcgacgacaggcgcgatatatctctggttcagcacaccgaggggttcctcaatcccgcccatcatcccctcgtccaagatcttactccctctcctcctcgtagcgctcacgagttctctcgcctcgccattcggctacgcgtcgctcgcgcatatagactacatcacgttcctcctggcgaaatcttgcaaattgctaccagttatgttcttacacatcactgtcttccggaagagatacccgctgtacaaatacatggtcgtcgcggccgtgacggcaggcgtcgcggtcttcaccctccactcggggaagaagagcaagaaacacggtggtggcggcagtggcctagatgacaaggagagaaacagcgcttggggtctgctactactcggtattaatctgcttttcgacggcttgacgaatagtacgcaggattatatctttggggctttccagccttatactggaccccagatgatgtgtgctaataacttgatgagcactgctgttacggctgcgtatctcgtgctgagcccctggcttgtgcatactggtgctggagagtggttaggcatggatatcgctgggtctgcgggcgagcttgaggaggcgatggagttcatggggaggtatccaggtgtttgggcggatgtcctgggtttcgctgcttgtggtgctgtgggacaggttttcatcttctacaccctcgcaacattctcctcagtcctcctagtaaccgtgacagtaacccgcaagatgttcaccatgatcctatcagtcgtcgccttcggccaccgcctcacgcagatgcaggtcctcggcgtcggtctggtattcggcggcatcggagcagaagcagccatcgcgcgcagagagaagatcgctaaagaagaggctaagagaaaagccaaggctgctaagacgctgtagaggactcgatcgggatgttagaatgacggaagtacgggggatcccaagatacgtaacttacctatttagagactagatggttgaaagaattcattagagaaacgaatgaaagaaacttcgtcttgacataaggtagtgagccgatgtgattatg

SEQ ID NO: 6714 - DNA, 1827 bp, Muscodor strobelii
  misc_feature: SGI cDNA ID NO. 561985
  misc_feature: Encodes the peptide sequence at SEQ ID NO 6715
atgtctgccgacctgtttgccgcatttgaagactcgccacaaccatcttcgcagcaagaacaatatcggcaaacgcagcctcccgccccccagccctcgagtaacgccttctctttcggaccacctcgaacgcaaagcatttcagcgcagccaagcatacaatggggacagaatttaccagccttcaatgccacgccgttgcctctcgcagcccagtctgcacagaaagccgacgaagacgaagatggcgatgacgatggatggggggactttgagatcgcctcgaatgagccggtctcgcacgcgcctccactccctccatcgacaaggtcagctgtgcaacaaacatctgcgtaccaagacacaagaccgaacaggatcgtgcgggcctccacgttagaactgatatcgaacaacttgatcggtgtggaagacagtgtatctcccgctcagtataatcaaatgccgacatcgcaaccagcgtcgcggccgatatctacgatacagtctcataaggctgccgtaagagccccaaatccggatccaaatgtccttttcgatgccgatgactttgatggtgaggaacatgttgatgattttgaggacgaggatgattttggagattttgaaaccgtagcatcgcctcccgatccacctattaattctattccaaaaacactacacttgccatcacacactcctagtattcaaaaggcttcagacttgcttttggagttagacttgaacgataaaccgtctcagctatctaaagccgtcgaaccgcgtccggcagcttccttctgggatgagcctccagtacagaaacaacaaaacccaactgcacaacctaccatccagtctacgttacaaaccacaggcaaggatctcggccatgccaccagggatccgtgggacaatgttaatgaagactggtctaatggtgaatcgatcggaaaagacgaggactggggttcgttcgatgatttgccagcaaatgccgttagccctgtcgtcaaagtgacaccaaaaccaacaaacacttcgaaagaactgaaatccagaccccccgcaaaagacactacaccaaaacttccagttgcggaagatgactcgtcttgggactgggatcctgtcgacgtgccaaaacaaaccgtggatcatgttattgacgattctgcattaccgccgatcaatatcccgccaccgtcaattattatgtccgctttccccgagttattcgatcaagcgaacgaacacttatataaaccactgagtgggcagactgcggctgtcaaatcccgtatcttagcagaaccaaaggtccatgagtttctcaaaggttatctcggtgtggccaccgtagcagctcgtgtcttagcgggtcgcaaggtcagatggcatcgggacaagtttctgtctcaaagtatgtccatttctgccgctggaagcaagggcatgaagctcgctggggtggacaagacgcaaactgcgcgagaagatcgcgaagcagcagatgtcgtgagcaactggaaaactcaagttggacgccttcgatctacggtggccgctgtgaactcatctgctaaagagcacgacgagcagttgcgagttcctgagatacaggacaccatccagatctcgactgcgaaggacgtgccgactgctgccaaagcttgcgttatttgtggacttagaaggaacgaaagaataggaaaagttgattatggcgtcgaagatagttttggcgagtggtgggttgaacactggggtcatgttgattgcaaacgcttttggctaaagcatgagagcactcttcgccaaagatga

SEQ ID NO: 6715 - protein, 608 aa, Muscodor strobelii
  misc_feature: SGI Peptide ID NO. 561985
  misc_feature (87)..(608): NCBI GI: 39940046 Blast Desc: MGG_05217 [Magnaporthe grisea 70-15] gi|145010512|gb|EDJ95168.1| MGG_05217 [Magnaporthe grisea 70-15]
  misc_feature (304)..(608): NCBI GI: 256733177 Blast Desc: NECHADRAFT_104156 [Nectria haematococca mpVI 77-13-4]
  misc_feature (372)..(608): NCBI GI: 46125207 Blast Desc: FG06981.1 [Gibberella zeae PH-1]
  misc_feature (1)..(608): NCBI GI: 171685704 Blast Desc: protein product [Podospora anserina] gi|170942813|emb|CAP68466.1| protein product [Podospora anserina]
  misc_feature (1)..(608): NCBI GI: 156051096 Blast Desc: SS1G_06955 [Sclerotinia sclerotiorum 1980] gi|154704733|gb|EDO04472.1| SS1G_06955 [Sclerotinia sclerotiorum 1980]
  misc_feature (320)..(608): NCBI GI: 154295233 Blast Desc: BC1G_13430 [Botryotinia fuckeliana B05.10] gi|150844157|gb|EDN19350.1| BC1G_13430 [Botryotinia fuckeliana B05.10]
  misc_feature (346)..(588): NCBI GI: 189188586 Blast Desc: serine/threonine-protein kinase ppk6 [Pyrenophora tritici-repentis Pt-1C-BFP] gi|187972238|gb|EDU39737.1| serine/threonine-protein kinase ppk6 [Pyrenophora Pt-1C-BFP]
  misc_feature (321)..(608): NCBI GI: 159128831 Blast Desc: conserved [Aspergillus fumigatus A1163]
  misc_feature (321)..(608): NCBI GI: 70989137 Blast Desc: conserved [Aspergillus fumigatus Af293] gi|66847049|gb|EAL87380.1| conserved [Aspergillus fumigatus Af293]
  misc_feature (321)..(608): NCBI GI: 119498183 Blast Desc: NFIA_035200 [Neosartorya fischeri NRRL 181] gi|119414013|gb|EAW23952.1| conserved [Neosartorya fischeri NRRL 181]
MSADLFAAFEDSPQPSSQQEQYRQTQPPAPQPSSNAFSFGPPRTQSISAQPSIQWGQNLPAFNATPLPLAAQSAQKADEDEDGDDDGWGDFEIASNEPVSHAPPLPPSTRSAVQQTSAYQDTRPNRIVRASTLELISNNLIGVEDSVSPAQYNQMPTSQPASRPISTIQSHKAAVRAPNPDPNVLFDADDFDGEEHVDDFEDEDDFGDFETVASPPDPPINSIPKTLHLPSHTPSIQKASDLLLELDLNDKPSQLSKAVEPRPAASFWDEPPVQKQQNPTAQPTIQSTLQTTGKDLGHATRDPWDNVNEDWSNGESIGKDEDWGSFDDLPANAVSPVVKVTPKPTNTSKELKSRPPAKDTTPKLPVAEDDSSWDWDPVDVPKQTVDHVIDDSALPPINIPPPSIIMSAFPELFDQANEHLYKPLSGQTAAVKSRILAEPKVHEFLKGYLGVATVAARVLAGRKVRWHRDKFLSQSMSISAAGSKGMKLAGVDKTQTAREDREAADVVSNWKTQVGRLRSTVAAVNSSAKEHDEQLRVPEIQDTIQISTAKDVPTAAKACVICGLRRNERIGKVDYGVEDSFGEWWVEHWGHVDCKRFWLKHESTLRQR

SEQ ID NO: 6716 - DNA, 2996 bp, Muscodor strobelii
  misc_feature: SGI EST ID NO. CUFF.16736.0
  misc_feature: Variant of the nucleotide sequence at SEQ ID NO 6714
cagaggaagaagagcgtggagaacaggagtaaatagttctagagaacagggtcatatattcaagcttgaattttgaggccaaaattgaaaacgctgtcgacatcctacgtagggagatacaaatatgataaacatgtcggcttggttcgtcgtcgcccctgtctttcaatgctgcaggccccagccggggtccggctaggtagctgctaggtagcagccacatcagctacgacaccacactagccacccgtgactgcaaccgcattttaaaaccggaagactggcggcgatggacacctcggggggcatcactgaacatcatgtctgccgacctgtttgccgcatttgaagactcgccacaaccatcttcgcagcaagaacaatatcggcaaacgcagcctcccgccccccagccctcgagtaacgccttctctttcggaccacctcgaacgcaaagcatttcagcgcagccaagcatacaatggggacagaatttaccagccttcaatgccacgccgttgcctctcgcagcccagtctgcacagaaagccgacgaagacgaagatggcgatgacgatggatggggggactttgagatcgcctcgaatgagccggtctcgcacgcgcctccactccctccatcgacaaggtcagctgtgcaacaaacatctgcgtaccaagacacaagaccgaacaggatcgtgcgggcctccacgttagaactgatatcgaacaacttgatcggtgtggaagacagtgtatctcccgctcagtataatcaaatgccgacatcgcaaccagcgtcgcggccgatatctacgatacagtctcataaggctgccgtaagagccccaaatccggatccaaatgtccttttcgatgccgatgactttgatggtgaggaacatgttgatgattttgaggacgaggatgattttggagattttgaaaccgtagcatcgcctcccgatccacctattaattctattccaaaaacactacacttgccatcacacactcctagtattcaaaaggcttcagacttgcttttggagttagacttgaacgataaaccgtctcagctatctaaagccgtcgaaccgcgtccggcagcttccttctgggatgagcctccagtacagaaacaacaaaacccaactgcacaacctaccatccagtctacgttacaaaccacaggcaaggatctcggccatgccaccagggatccgtgggacaatgttaatgaagactggtctaatggtgaatcgatcggaaaagacgaggactggggttcgttcgatgatttgccagcaaatgccgttagccctgtcgtcaaagtgacaccaaaaccaacaaacacttcgaaagaactgaaatccagaccccccgcaaaagacactacaccaaaacttccagttgcggaagatgactcgtcttgggactgggatcctgtcgacgtgccaaaacaaaccgtggatcatgttattgacgattctgcattaccgccgatcaatatcccgccaccgtcaattattatgtccgctttccccgagttattcgatcaagcgaacgaacacttatataaaccactgagtgggcagactgcggctgtcaaatcccgtatcttagcagaaccaaaggtccatgagtttctcaaaggttatctcggtgtggccaccgtagcagctcgtgtcttagcgggtcgcaaggtcagatggcatcgggacaagtttctgtctcaaagtatgtccatttctgccgctggaagcaagggcatgaagctcgctggggtggacaagacgcaaactgcgcgagaagatcgcgaagcagcagatgtcgtgagcaactggaaaactcaagttggacgccttcgatctacggtggccgctgtgaactcatctgctaaagagcacgacgagcagttgcgagttcctgagatacaggacaccatccagatctcgactgcgaaggacgtgccgactgctgccaaagcttgcgttatttgtggacttagaaggaacgaaagaataggaaaagttgattatggcgtcgaagatagttttggcgagtggtgggttgaacactggggtcatgttgattgcaaacgcttttggctaaagcatgagagcactcttcgccaaagatgagtgcttatcaacgatctttgatcgcactttataactctgatcagcgtatgcaacgtgtttgtcaattgctccatgcaaaacgttgcgagttccactcaactctgatacgggagccagagtttggagaaacaatcgagtaggcttcaatccaagccgccctgcatatccatatcttcatggacgatgttcactgacgattcttgatgatcggagaatacatgactagccaaacttccattgctttatgcatcttcactgtcatggtcgacgcacagtggtttgtgacattcatctgtctcaccaaagaagcagtccttcatatccgtaagagcgcttccgcagataccgaaccaatcctgcgatcgctgttgaatcgtattattgaaatataacgccaatgtcggctccaattaatgtaacaggttctcgtctggccaatagcctctacacccaagcatttgaaccttggctccatttcttattgggccaacattcgtgcagctctgtggggagaattgaccttgcgtggatggagagctgaggcattggctcggacttttaggtcgtgatccggagcctcgatcatttcctgcagggttgtggatagaaacggtacattatcgtcgcatgtagctgttgagtcgtgggcggttcggcccgcttgctttttacctttgtagcatccattggtgctcaccaggcactgttttgtgagtattatagaattcatcttcacattgaaatcgtgagttggcgctgaggtccaacaatgctcgctgcgtgtaattgttcatttcttgcagaatgacgctggttgcatgcatgtcgatctacttagtagcatatatc

SEQ ID NO: 6717 - DNA, 1296 bp, Muscodor strobelii
  misc_feature: SGI cDNA ID NO. 561986
  misc_feature: Encodes the peptide sequence at SEQ ID NO 6718
atgtcatggatagaagactcagggtcctcaggatcctcagggtctgacacgtcgtatattgaaagcgccgttctacagaaacaatggcaagaggaagccgtgaaatacttcggtacttggcctcgatactcatttgaaaagcgccttggcgcgggagcgttcggtgtagcctgtctttttcaggataaggaggcaaatcctgacgactataagagatttgtagttaaagcgacgagtgacacagtcaccgatgaagagtacacatacttacagtcgttgcgctgggcagcacacgtggtcacacttattacagagccccagagacttctgacgtcgcaaaaggaagaaaaggccaggccagagggttctcaagataccaactcgcatcagagaaaatatatcataacggaatacttggaacatggaacacttcgacaactcttggagagattagggagcactggacttgccagaggttgtgtagcgatggcatttccacccgagggccctacaggtgcgagtgcgtcagccgaaaggagagacgacgtattagaaactatacctcccgatgcgactaatcccaacgatctcacacatggagacatgcataaaggcaacgtcatgtttggagatctagatagtcatatagaacatgaccgcgtccctattttgaaactcatcgatttcggtgaagctgtcgaagtcggtaatgaccgagtattcttcgacatagcgttcctcgatgcttacgatacagtactcggtttcactccatcgactagtccagcaggtttccaacaaattcgagctattgacaaaaacatttgtgatattggctccataatgtgtgggcttatatttgggctcgacttctttctagatgcagacggcaggcagcaaatcgtcgatctgattaataacaaaaacagtgtcaatgatcaagaccgagaccttgacatagatctcctgatgcttgcagctcgatgtgtagctgtcaacccagatcaccgacctcgtcttccagttttgctttctacagttcaacaaaatctagcaattaaaacccgagaagcatacccaaacattgttgaagagacggatgaaagtatcgcggctttcattcaaacaagcattctcgatgctgatgttttaaatgctccatccggtccggcagggacccccgaaagcactcccgagaacactccagagaacacacccgaggacacacccgaggacacacccgaggacacacctgttggtagtcccgctggcagtcccacgttccaaggtttataa

SEQ ID NO: 6718 - protein, 431 aa, Muscodor strobelii
  misc_feature: SGI Peptide ID NO. 561986
  misc_feature (390)..(427): NCBI GI: 149238832 Blast Desc: conserved [Lodderomyces elongisporus NRRL YB-4239] gi|146450785|gb|EDK45041.1| conserved [Lodderomyces elongisporus NRRL YB-4239]
MSWIEDSGSSGSSGSDTSYIESAVLQKQWQEEAVKYFGTWPRYSFEKRLGAGAFGVACLFQDKEANPDDYKRFVVKATSDTVTDEEYTYLQSLRWAAHVVTLITEPQRLLTSQKEEKARPEGSQDTNSHQRKYIITEYLEHGTLRQLLERLGSTGLARGCVAMAFPPEGPTGASASAERRDDVLETIPPDATNPNDLTHGDMHKGNVMFGDLDSHIEHDRVPILKLIDFGEAVEVGNDRVFFDIAFLDAYDTVLGFTPSTSPAGFQQIRAIDKNICDIGSIMCGLIFGLDFFLDADGRQQIVDLINNKNSVNDQDRDLDIDLLMLAARCVAVNPDHRPRLPVLLSTVQQNLAIKTREAYPNIVEETDESIAAFIQTSILDADVLNAPSGPAGTPESTPENTPENTPEDTPEDTPEDTPVGSPAGSPTFQGL

SEQ ID NO: 6719 - DNA, 723 bp, Muscodor strobelii
  misc_feature: SGI cDNA ID NO. 561987
  misc_feature: Elevated expression when VOC is produced
  misc_feature: Encodes the peptide sequence at SEQ ID NO 6720
atggcggactcgaagatcgtgctctttgatatcccaaccaatgacaacccaccaaaagcgtggtccttgaattcttggaagactcgtctgattctgaactataagaagcttgattatacaacagaatggctcatctaccccgacatcaaaccgagattccagcctcacttccccgcagaccaggaagacttcacgatccccaccgtgaaaatgccagatggaacatacataatgaactccaaattcatcgccgaagctctcgaaaaagcgtacccagagcctagcatccatctgaactcaccccaacaacaacccatgctcgaccacctaagcaacgcgcacaacgcccttcaatccgtctaccaaccaggtgtctacaacaacgtcctaagtgaagggagcaaggagtatttcttccgcactcgctcaaaagctgccgggatcccacttgatgagttcgagaaacaggggaaggatgggaagccttgggataatgccgcgccgcattttcagaagattacagatatgttggaagagaatgaggggccgtttttcatgggtgagacgttgagttatacggatttgatttatggcgggtatttaattttcatgcgtaggattggggagcatgtttttcagagaattttggaggttagtggggatgcggatgtgcatttgaggttttttgaggctattaagccttttgctgagagagatgattga

SEQ ID NO: 6720 - protein, 240 aa, Muscodor strobelii
  misc_feature: SGI Peptide ID NO. 561987
  misc_feature (1)..(240): NCBI GI: 15721881 Blast Desc: glutathione S-transferase [Gibberella fujikuroi]
  misc_feature (1)..(240): NCBI GI: 46107758 Blast Desc: FG00762.1 [Gibberella zeae PH-1]
  misc_feature (1)..(240): NCBI GI: 256734782 Blast Desc: NECHADRAFT_102396 [Nectria haematococca mpVI 77-13-4]
  misc_feature (5)..(240): NCBI GI: 171694786 Blast Desc: protein product [Podospora anserina] gi|170947635|emb|CAP59797.1| protein product [Podospora anserina]
  misc_feature (1)..(240): NCBI GI: 242796786 Blast Desc: conserved [Talaromyces stipitatus ATCC 10500] gi|218719461|gb|EED18881.1| conserved [Talaromyces stipitatus ATCC 10500]
  misc_feature (3)..(240): NCBI GI: 85119122 Blast Desc: NCU02888 [Neurospora crassa OR74A] gi|28927381|gb|EAA36334.1| NCU02888 [Neurospora crassa OR74A]
  misc_feature (1)..(240): NCBI GI: 261360561 Blast Desc: conserved [Verticillium albo-atrum VaMs.102]
  misc_feature (44)..(240): NCBI GI: 46114606 Blast Desc: FG03145.1 [Gibberella zeae PH-1]
  misc_feature (2)..(240): NCBI GI: 156049007 Blast Desc: SS1G_08210 [Sclerotinia sclerotiorum 1980] gi|154692609|gb|EDN92347.1| SS1G_08210 [Sclerotinia sclerotiorum 1980]
  misc_feature (30)..(240): NCBI GI: 169607367 Blast Desc: SNOG_06740 [Phaeosphaeria nodorum SN15] gi|160701395|gb|EAT85391.2| SNOG_06740 [Phaeosphaeria nodorum SN15]
  misc_feature: Useful for introducing or modulating the production of volatile compounds
MADSKIVLFDIPTNDNPPKAWSLNSWKTRLILNYKKLDYTTEWLIYPDIKPRFQPHFPADQEDFTIPTVKMPDGTYIMNSKFIAEALEKAYPEPSIHLNSPQQQPMLDHLSNAHNALQSVYQPGVYNNVLSEGSKEYFFRTRSKAAGIPLDEFEKQGKDGKPWDNAAPHFQKITDMLEENEGPFFMGETLSYTDLIYGGYLIFMRRIGEHVFQRILEVSGDADVHLRFFEAIKPFAERDD

SEQ ID NO: 6721 - DNA, 1632 bp, Muscodor strobelii
  misc_feature: SGI EST ID NO. CUFF.16751.0
  misc_feature: Variant of the nucleotide sequence at SEQ ID NO 6719
gctggaccgtttgcctacagttgaactagtgccagataaacaaaaagatggcacaaaagatggtatcgaacgactcaagcgtcatctcttttgtgctacttacgaaccacatgcagtatcttgctaagatgcattatgttctacttgttacttagatattgcatgctcatccggctactatattccattgcatcttgaattcagtctattatgacaacgaggcaacgctgttgatatgggatagattaggtaccaatggtgggtactggaacaggtggggtttgtcgcgtattcttggcatgacctagtcggctcatcggtggacagccaatcagaaatatccagattgactgctttggcaaccccacctaacaccagagacctcatttattaatagaacatcaccatcaccgaatgcggggatgagatagggcaaattcctattgaggtagttgcctcactttccttgcgacttatggaactattttaggttaagcttttgcgggtcaattattgtctactacgccctttatttggagatatcaagagttcatgtcgacggcgctaatgaggagtttgtcagcaccagtatataatcagacgtggtgagacggcacctcgacgatcggactcgacccctcatcttaaacgattgatatatcatctatttttcacatgaacgcggaactctgcaattgaggtcgaactctttttcgaaattggattaccatattgaagtgtttcaccatggcggactcgaagatcgtgctctttgatatcccaaccaatgacaacccaccaaaagcgtggtccttgaattcttggaagactcgtctgattctgaactataagaagcttgattatacaacagaatggctcatctaccccgacatcaaaccgagattccagcctcacttccccgcagaccaggaagacttcacgatccccaccgtgaaaatgccagatggaacatacataatgaactccaaattcatcgccgaagctctcgaaaaagcgtacccagagcctagcatccatctgaactcaccccaacaacaacccatgctcgaccacctaagcaacgcgcacaacgcccttcaatccgtctaccaaccaggtgtctacaacaacgtcctaagtgaagggagcaaggagtatttcttccgcactcgctcaaaagctgccgggatcccacttgatgagttcgagaaacaggggaaggatgggaagccttgggataatgccgcgccgcattttcagaagattacagatatgttggaagagaatgaggggccgtttttcatgggtgagacgttgagttatacggatttgatttatggcgggtatttaattttcatgcgtaggattggggagcatgtttttcagagaattttggaggttagtggggatgcggatgtgcatttgaggttttttgaggctattaagccttttgctgagagagatgattgaggggcgatgcgactgttggatggactggagggaggatctgccttttgatagtctagagacgcactagggaataatacgagctggagaaacgcagtttgccgtgaattctactcagcttttgatgttcttgtgaaataggggacgcagtaatgtgagtctctg

SEQ ID NO: 6722 - DNA, 1734 bp, Muscodor strobelii
  misc_feature: SGI cDNA ID NO. 561988
  misc_feature: Encodes the peptide sequence at SEQ ID NO 6723
atgcgtcttatccgatgtgacactctgcaactggaggagtttacaggcactgatatcccaccgtatgctattttgtctcatacatggggtaaacatgaagtcacgtacagtgctttcacagcggggaaggtgctaggagatgatctcgactggagaaaaatcgagcaaacctgcaaattggcaactgaagagggcttacactacgtctggattgatacttgctgtatcgacaaatcgagcagcgcggagttgactgaggcaatcaattcgatgtacggttggtaccaaggctcagggaaatgtttcgcttatcttgtagattttcactgtcccaaaaatatctctgattctgacgacaacatcaacttgttccataaaagtcgatggttctctagaggatggacgctgcaggagatgattgcctctccgaggctcgatttctatgacaaagcatggaacttttacaactctaaagagacacttgctgcacatatttcaggcgcaaccggagttgacgaaatggctctgtgcgcatctgggcacggtctccgaaatcgactcaatgttattcctatctgtaggaaaatggcatgggcggccagaagacacacaagacgtgttgaggaccaggcatattctttgctaggtatttttaatgtgcatatgcctttgatatatggagaaggggccaacgcatttcaaagactccagaaaaaaatcatcaaaggctcggacgacttgaccatccttgcatggaaagtaccgcatggaaacgaagcaccggaatacttaaacatactggcggattctcctagtatgttcgcagagtccaatgatattgagttgggtcagaatctcgattacaacccagacctcacgatcaggaagaaaggccttcaagtctccggtagcatacgtatgactaaggatcatccttttactgtcatgaatctctactgttatcgacgaaatgacccactagcggtcctcggaatacgtttaaaggccatcgggaatcatgtatatgctcgtattcgaggccattatctcgatcatagtattgatatgcaggatcaaaatccagaggaatctctcatttatcttagcatggatccaactcgagcagaaccgctcatggctcaaggctatgacatcggtattggagctttcacctactccaagggtataaaagtcgacttcgtttatcatcacccggaaacgcgttgggacggatctcaattttgtgcaaaagatgcaatatcgtttctgggtgtctgtgtctaccaagcttctcatggggatcatgcccggaagttcgttgccgtttgtggattcgactctgaagtcgttccgtgggcagttgtagacgtggaagactcggaactatggtatgcagcagatagtcgcaactatgaaagtgcgaggaaattagctgcattgcaaaagagcaacaagatgaccctgcatcttgaaccccaatctgaggccgacataaaactgtatttgactatctcgatgtatcgcgaggcaatctcgggagttaaggcggttcgaatacaagttgaccgcaccgaacgagagaagagaaaatgggagaatagctcgagtacagatgagtctagtacaagtacggatgaagatgaatcagagacagatgaggataacataagtgatgaagaggatgaaccacataatacagacaaagacgaatcacatagagatggggatgaatga

SEQ ID NO: 6723 - protein, 577 aa, Muscodor strobelii
  misc_feature: SGI Peptide ID NO. 561988
  misc_feature (22)..(138): Pfam Id: PF06985 Pfam Desc: Heterokaryon incompatibility protein (HET)
  misc_feature (22)..(105): Pfam Id: PF06985 Pfam Desc: Heterokaryon incompatibility protein (HET)
  misc_feature (123)..(138): Pfam Id: PF06985 Pfam Desc: Heterokaryon incompatibility protein (HET)
  misc_feature (1)..(410): NCBI GI: 171677580 Blast Desc: protein product [Podospora anserina] gi|170936858|emb|CAP61516.1| protein product [Podospora anserina]
  misc_feature (1)..(320): NCBI GI: 46126619 Blast Desc: FG07687.1 [Gibberella zeae PH-1]
  misc_feature (1)..(320): NCBI GI: 164425178 Blast Desc: NCU06304 [Neurospora crassa OR74A] gi|157070820|gb|EAA33330.2| conserved [Neurospora crassa OR74A]
  misc_feature (1)..(350): NCBI GI: 145228631 Blast Desc: An01g01850 [Aspergillus niger] gi|134054715|emb|CAK43556.1| protein product [Aspergillus niger]
  misc_feature (1)..(320): NCBI GI: 171688186 Blast Desc: protein product [Podospora anserina] gi|170944055|emb|CAP70165.1| protein product [Podospora anserina]
  misc_feature (1)..(301): NCBI GI: 256722255 Blast Desc: NECHADRAFT_52327 [Nectria haematococca mpVI 77-13-4]
  misc_feature (1)..(285): NCBI GI: 171680418 Blast Desc: protein product [Podospora anserina] gi|170939836|emb|CAP65061.1| protein product [Podospora anserina]
  misc_feature (1)..(301): NCBI GI: 256721662 Blast Desc: NECHADRAFT_18017 [Nectria haematococca mpVI 77-13-4]
  misc_feature (1)..(325): NCBI GI: 256720984 Blast Desc: NECHADRAFT_82249 [Nectria haematococca mpVI 77-13-4]
  misc_feature (11)..(363): NCBI GI: 145235123 Blast Desc: An03g03270 [Aspergillus niger] gi|134057890|emb|CAK38231.1| protein product [Aspergillus niger]
MRLIRCDTLQLEEFTGTDIPPYAILSHTWGKHEVTYSAFTAGKVLGDDLDWRKIEQTCKLATEEGLHYVWIDTCCIDKSSSAELTEAINSMYGWYQGSGKCFAYLVDFHCPKNISDSDDNINLFHKSRWFSRGWTLQEMIASPRLDFYDKAWNFYNSKETLAAHISGATGVDEMALCASGHGLRNRLNVIPICRKMAWAARRHTRRVEDQAYSLLGIFNVHMPLIYGEGANAFQRLQKKIIKGSDDLTILAWKVPHGNEAPEYLNILADSPSMFAESNDIELGQNLDYNPDLTIRKKGLQVSGSIRMTKDHPFTVMNLYCYRRNDPLAVLGIRLKAIGNHVYARIRGHYLDHSIDMQDQNPEESLIYLSMDPTRAEPLMAQGYDIGIGAFTYSKGIKVDFVYHHPETRWDGSQFCAKDAISFLGVCVYQASHGDHARKFVAVCGFDSEVVPWAVVDVEDSELWYAADSRNYESARKLAALQKSNKMTLHLEPQSEADIKLYLTISMYREAISGVKAVRIQVDRTEREKRKWENSSSTDESSTSTDEDESETDEDNISDEEDEPHNTDKDESHRDGDE

SEQ ID NO: 6724 - DNA, 541 bp, Muscodor strobelii
  misc_feature: SGI EST ID NO. CUFF.16760.0
  misc_feature: Variant of the nucleotide sequence at SEQ ID NO 6722
ttactgtcatgaatctctactgttatcgacgaaatgacccactagcggtcctcggaatacgtttaaaggccatcgggaatcatgtatatgctcgtattcgaggccattatctcgatcatagtattgatatgcaggatcaaaatccagaggaatctctcatttatcttagcatggatccaactcgagcagaaccgctcatggctcaaggctatgacatcggtattggagctttcacctactccaagggtataaaagtcgacttcgtttatcatcacccggaaacgcgttgggacggatctcaattttgtgcaaaagatgcaatatcgtttctgggtgtctgtgtctaccaagcttctcatggggatcatgcccggaagttcgttgccgtttgtggattcgactctgaagtcgttccgtgggcagttgtagacgtggaagactcggaactatggtatgcagcagatagtcgcaactatgaaagtgcgaggaaattagctgcattgcaaaagagcaacaagatgaccctgcatcttgaacccca

SEQ ID NO: 6725 - DNA, 1674 bp, Muscodor strobelii
  misc_feature: SGI cDNA ID NO. 561990
  misc_feature: Encodes the peptide sequence at SEQ ID NO 6726
atgtcgaagtccgcagaggatcagctgtcgccgcacaacagggtcacaacgcgggataccgatgtttccgacaatgcggaccgtcacgctaaccttggccatgtccgtctacgccatgctacaacaaaggagattatactcatcccgacaccctctgctgatcctatggaccctttgaattggccacgagcattcaagctatacacagcggtcgcggtgtgtgttgccatgattatgtgcaacttcctcagtgctggtcccaccttggctatcgtacagacggcgcaagacttcttcccgaactggcagcaggagggtcttacaagcgccatctccaagacggcatacttcttcaatgtcacggctttgtttcagggcctaggcaccctcttgtggatgccattgatcaacaaatatgggcgtcgacaggtctacctcattgccttctccatctacacaatcaccgctctctggtgcgcctttgcgtaccagtacggcaattttctcgtcgcccgtatcgtcatgggctttgcggccggcgccggcgaatgtctggctcccatcaccattgcagatctcttctttctccacgagcgaggagcgatcacagccatgtataacgcttcgctcaacctcggcgtttctgtcggtgccatcgtcgatgggttcatcgccaggtattatccgtggagatatatctactacatcgctagtgcgcttcttggcttcgtcactctcgtggtgtttctgaccttcccggagaccgcgtacatacgtaccaagggtctcagtgatgaacaggccttcaacgaggcggacagtcagaagaagagcgacgaagaggtctctcactacgaaaaatcatcggccacgcgacgtcctcctcctgctgcgattaaggacatcctcttctgcaatctaaagctattcaacagcaaaaaatacacggacgaatcactgtggactatggcattccgtcctgtgctgctgctggccttacccaatgtcttgtgggccaccctggttttcgctgcgacgattgggttcatcacggccatcacgtcaaatgtctctcccgctttcgccgcaacttatggcttcgaagcatggcaatccggcttagcattcattgcggcggttgtgggagctcttttcggaatagtcatgggtggccacttttccgattgggttgccgactacttcacccgccgtaacaatggcattcgagagccagagttccgtcttccggctatctttccgagtatgatcgccgggccgctttcacttgtactttacggcgtcggcatccagcacaagttgcactggatcgtacccacaatcggcattgggctaatcaatttctcaataacccaagcgaccaatgtatcgcttgtctacactattgatagctatcgccctattgctggtgagatagtcgtgtgtcagctcgccttcaaatcggcctttggtttcctactagggttctatacaaatccttgggttgccgaagctggttatcaaaacgcttacggtgtcatggctgccattattggcggagtactcgtcctttggatccctctcttcttctggggcaagaagatcagaaccacaactttgaactggcgagtgatgaagtacgcccgttgggatttcgaccgagaagtcggcgagtga

SEQ ID NO: 6726 - protein, 557 aa, Muscodor strobelii
  misc_feature: SGI Peptide ID NO. 561990
  misc_feature (71)..(495): Pfam Id: PF07690 Pfam Desc: Major Facilitator Superfamily
  misc_feature (71)..(456): Pfam Id: PF07690 Pfam Desc: Major Facilitator Superfamily
  misc_feature (128)..(262): Pfam Id: PF00083 Pfam Desc: Sugar (and other) transporter
  misc_feature (1)..(557): NCBI GI: 67525881 Blast Desc: AN3398.2 [Aspergillus nidulans FGSC A4] gi|40744186|gb|EAA63366.1| AN3398.2 [Aspergillus nidulans FGSC A4] gi|259485614|tpe|CBF82786.1| TPA: MFS transporter, nidulans
  misc_feature (14)..(557): NCBI GI: 70996758 Blast Desc: MFS transporter [Aspergillus fumigatus Af293] gi|66850769|gb|EAL91096.1| MFS transporter, [Aspergillus fumigatus Af293] gi|159131870|gb|EDP56983.1| MFS transporter,
  misc_feature (23)..(557): NCBI GI: 171696020 Blast Desc: protein product [Podospora anserina] gi|170948252|emb|CAP60416.1| protein product [Podospora anserina]
  misc_feature (14)..(557): NCBI GI: 119494103 Blast Desc: MFS transporter, [Neosartorya fischeri NRRL 181] gi|119412133|gb|EAW22074.1| MFS transporter, [Neosartorya fischeri NRRL 181]
  misc_feature (15)..(557): NCBI GI: 256721029 Blast Desc: NECHADRAFT_44502 [Nectria haematococca mpVI 77-13-4]
  misc_feature (58)..(557): NCBI GI: 238482145 Blast Desc: MFS transporter, [Aspergillus flavus NRRL3357] gi|220700361|gb|EED56699.1| MFS transporter, [Aspergillus flavus NRRL3357]
  misc_feature (15)..(530): NCBI GI: 115436728 Blast Desc: conserved [Aspergillus terreus NIH2624] gi|114188444|gb|EAU30144.1| conserved [Aspergillus terreus NIH2624]
  misc_feature (79)..(557): NCBI GI: 256732674 Blast Desc: NECHADRAFT_79109 [Nectria haematococca mpVI 77-13-4]
  misc_feature (1)..(554): NCBI GI: 46127215 Blast Desc: FG07985.1 [Gibberella zeae PH-1]
  misc_feature (11)..(464): NCBI GI: 145234581 Blast Desc: An03g00320 [Aspergillus niger] gi|134057610|emb|CAK38010.1| protein product [Aspergillus niger]
MSKSAEDQLSPHNRVTTRDTDVSDNADRHANLGHVRLRHATTKEIILIPTPSADPMDPLNWPRAFKLYTAVAVCVAMIMCNFLSAGPTLAIVQTAQDFFPNWQQEGLTSAISKTAYFFNVTALFQGLGTLLWMPLINKYGRRQVYLIAFSIYTITALWCAFAYQYGNFLVARIVMGFAAGAGECLAPITIADLFFLHERGAITAMYNASLNLGVSVGAIVDGFIARYYPWRYIYYIASALLGFVTLVVFLTFPETAYIRTKGLSDEQAFNEADSQKKSDEEVSHYEKSSATRRPPPAAIKDILFCNLKLFNSKKYTDESLWTMAFRPVLLLALPNVLWATLVFAATIGFITAITSNVSPAFAATYGFEAWQSGLAFIAAVVGALFGIVMGGHFSDWVADYFTRRNNGIREPEFRLPAIFPSMIAGPLSLVLYGVGIQHKLHWIVPTIGIGLINFSITQATNVSLVYTIDSYRPIAGEIVVCQLAFKSAFGFLLGFYTNPWVAEAGYQNAYGVMAAIIGGVLVLWIPLFFWGKKIRTTTLNWRVMKYARWDFDREVGE

SEQ ID NO: 6727 - DNA, 1302 bp, Muscodor strobelii
  misc_feature: SGI cDNA ID NO. 561991
  misc_feature: Encodes the peptide sequence at SEQ ID NO 6728
atgtataaactccacctgtccttacttccagctgctgctgctgcgtcgcttgctgttccagacccatctgatgttattccgccgagccaatgggccgccaataatgctttgatcgcggactacaatgtaccgtttgtctctgtacagccaaccgatttggttgcggctcacacatacactggaacgtcagacaatgttgctcatatcacatggtccactcagaataacgataccgatgtcgtcctgatatcagacaatgccagtttcggtgcttcttactcgacattcatcaaagagggatacagttccaacctactctgggcgagcttctggggctttaatgcagccatcaatgttgccaaccaatctactgccgtactggatcatataaacgtcacggtccacaatggtgcagccaatgtatactcgtacgggactgggtctgtcgtcaatatctccaacagttggctctacagcagcggacccgtaagccatggactgtacgcttctggaaacggaacaatctacggtaaggacattgttcacttctccggagggatgcgctcgacggccttctacgcgctgggagagatccatgccgacaatgtcgtctcccgctgtgagaacgcgccgatgctgttcgcggatggcccccaacttgctgtactccgcaacgtccgtgccgaagcaggcttacttgccggctccgtcatgttctccagccaggatagactggcaggcgccgtcctggagctcgaaaactctgagatcacgacaacccgtgccgacatgccggcgctatggttcggcaacgtcatcgcctccgccaagttgactaacaccaagctcaataccttatctggggtcctcgtcgtcgcgaacatgtcgcaagtgatccaagacttcaattactttgccggttacgaggcgaacccgagcatgcgaccagccgaggtgactgtctctgtcgacgaaagccaccttacgggcgatctcgtggcctacaacgggagctccatctccttcgctctcaaatgcttcagcagctgggtggggacgacgaaggtcggatacgggtcggcctcgttcggtgtctccctgacggccaacagcaattggacgcttacggcagacacaactgtgcagaacttcaccaacgaggatgcctcttttaagaatgttcacagcaacggcttccacatctactacaaccccagcgcagcgaccaagcactggctgaacaaacgcactatcaagctccaaggaggtggttcggccaccccactccgctccgacttttga

SEQ ID NO: 6728 - protein, 433 aa, Muscodor strobelii
  misc_feature: SGI Peptide ID NO. 561991
  misc_feature (6)..(428): NCBI GI: 115436732 Blast Desc: conserved [Aspergillus terreus NIH2624] gi|114188445|gb|EAU30145.1| conserved [Aspergillus terreus NIH2624]
  misc_feature (17)..(428): NCBI GI: 67525879 Blast Desc: AN3397.2 [Aspergillus nidulans FGSC A4] gi|40744185|gb|EAA63365.1| AN3397.2 [Aspergillus nidulans FGSC A4] gi|259485615|tpe|CBF82787.1| TPA: conserved [Aspergillus FGSC
  misc_feature (16)..(425): NCBI GI: 145234579 Blast Desc: An03g00310 [Aspergillus niger] gi|134057609|emb|CAK38009.1| protein product [Aspergillus niger]
  misc_feature (4)..(428): NCBI GI: 145241067 Blast Desc: An08g10760 [Aspergillus niger] gi|134077709|emb|CAK45749.1| protein product [Aspergillus niger]
  misc_feature (75)..(431): NCBI GI: 20091368 Blast Desc: MA2541 [Methanosarcina acetivorans C2A] gi|19916502|gb|AAM05923.1| conserved [Methanosarcina acetivorans C2A]
  misc_feature (52)..(428): NCBI GI: 225571025 Blast Desc: CLOHYLEM_07123 [Clostridium hylemonae DSM 15053] gi|225160106|gb|EEG72725.1| CLOHYLEM_07123 [Clostridium hylemonae DSM 15053]
  misc_feature (117)..(403): NCBI GI: 145609986 Blast Desc: MGG_12588 [Magnaporthe grisea 70-15] gi|149210181|ref|XP_001522465.1| MGCH7_ch7g571 [Magnaporthe grisea 70-15] gi|86196526|gb|EAQ71164.1| MGCH7_ch7g571 grisea
  misc_feature (77)..(428): NCBI GI: 284047759 Blast Desc: Acfer_0377 [Acidaminococcus fermentans DSM 20731] gi|283951980|gb|ADB46783.1| conserved [Acidaminococcus fermentans DSM 20731]
  misc_feature (26)..(401): NCBI GI: 238019974 Blast Desc: VEIDISOL_01850 [Veillonella dispar ATCC 17748] gi|237863498|gb|EEP64788.1| VEIDISOL_01850 [Veillonella dispar ATCC 17748]
  misc_feature (26)..(401): NCBI GI: 282849235 Blast Desc: conserved [Veillonella parvula ATCC 17745] gi|282580939|gb|EFB86337.1| conserved [Veillonella parvula ATCC 17745]
MYKLHLSLLPAAAAASLAVPDPSDVIPPSQWAANNALIADYNVPFVSVQPTDLVAAHTYTGTSDNVAHITWSTQNNDTDVVLISDNASFGASYSTFIKEGYSSNLLWASFWGFNAAINVANQSTAVLDHINVTVHNGAANVYSYGTGSVVNISNSWLYSSGPVSHGLYASGNGTIYGKDIVHFSGGMRSTAFYALGEIHADNVVSRCENAPMLFADGPQLAVLRNVRAEAGLLAGSVMFSSQDRLAGAVLELENSEITTTRADMPALWFGNVIASAKLTNTKLNTLSGVLVVANMSQVIQDFNYFAGYEANPSMRPAEVTVSVDESHLTGDLVAYNGSSISFALKCFSSWVGTTKVGYGSASFGVSLTANSNWTLTADTTVQNFTNEDASFKNVHSNGFHIYYNPSAATKHWLNKRTIKLQGGGSATPLRSDF

SEQ ID NO: 6729 - DNA, 2949 bp, Muscodor strobelii
  misc_feature: SGI EST ID NO. CUFF.16809.0
  misc_feature: Variant of the nucleotide sequence at SEQ ID NO 6727
cgccgagccaatgggccgccaataatgctttgatcgcggactacaatgtaccgtttgtctctgtacagccaaccgattgtaagccactatcacctagactcgaggtgacctagtccttgcttaagtgccacactcattaactctgctccagtggttgcggctcacacatacactggaacgtcagacaatgttgctcatatcacatggtccactcagaataacgataccgatgtcgtcctgatatcagacaatgccagtttcggtgcttcttactcgacattcatcaaagagggatacagttccaacctactctgggcgagcttctggggctttaatgcagccatcaatgttgccaaccaatctactgccgtactggatcatataaacgtcacggtccacaatggtgcagccaatgtatactcgtacgggactgggtctgtcgtcaatatctccaacagttggctctacagcagcggacccgtaagccatggactgtacgcttctggaaacggaacaatctacggtaaggacattgttcacttctccggagggatgcgctcgacggccttctacgcgctgggagagatccatgccgacaatgtcgtctcccgctgtgagaacgcgccgatgctgttcgcggatggcccccaacttgctgtactccgcaacgtccgtgccgaagcaggcttacttgccggctccgtcatgttctccagccaggatagactggcaggcgccgtcctggagctcgaaaactctgagatcacgacaacccgtgccgacatgccggcgctatggttcggcaacgtcatcgcctccgccaagttgactaacaccaagctcaataccttatctggggtcctcgtcgtcgcgaacatgtcgcaagtgatccaagacttcaattactttgccggttacgaggcgaacccgagcatgcgaccagccgaggtgactgtctctgtcgacgaaagccaccttacgggcgatctcgtggcctacaacgggagctccatctccttcgctctcaaatgcttcagcagctgggtggggacgacgaaggtcggatacgggtcggcctcgttcggtgtctccctgacggccaacagcaattggacgcttacggcagacacaactgtgcagaacttcaccaacgaggatgcctcttttaagaatgttcacagcaacggcttccacatctactacaaccccagcgcagcgaccaagcactggctgaacaaacgcactatcaagctccaaggaggtggttcggccaccccactccgctccgacttttgaagctgttggcgggtcgattttgcctgagggataaaaaggatgccagctgggtgagatgacgaaaaaccatagaatgcctatttcttagtacaagcattacttagtttctcatgcgataatttatactctatcatcaatcacctcaagctcatatgtgtaaaattacaacaagagataatactacctatgaacgcattgccgttgtgtaatgacattgttctattactttgacacaaaaacaaaaacagcttagtattctccgcccacctcataccgaaacaggtcatcgcggattcgttccccggtagagcgccatattgagttgacagtctacgcagactcgtgagcaaaccaagttctatctttcccacacaggcaaaaacgagggcggtgcaaattcaggggcacataccgagttgactctgacgcctataaacatgagtccaatgaagaccctctcccccgtactcgtgaacaccattctctcggtgcgaaagtctacatctcgattgatgggccggtgaggcggaacacgacgatggtcgctcggccatccggttggatttgatgagctggcggtgctactttgtctctgagcgtcgtgtgaagttgttttatccgcagaaccctctccctccccttcaggcttcgtccgccgaacttcatagtccagcagcacgctacggtgttggtggcgctgtcgcgaccgagtctcgatcgtggaagtggaagccgacgttgatgtagtcgacatcgagacagctgataataaatctgttgggtcgtggaagagctcacagcaaggcccggcaacgacagcgactgggagtagaggtgagtatcctatcccttgtccgcgctgaagctgctcgaagtgggtgggctcagtactcgatgctcacgtactacgtacggagttcaagttagatgcatgcaccgggatgagcaaccaagggccacgcaagccaagcactacctaaggcgagacactacgtacagacttgatggtgcagccagtccggcacatccacctacctaggtagataaatgcagtgatgctgcaagatgcggggagagagggcggcaagtcccaccaggatgggatgtgggcagacggggagcggggtttaaattagggaaaaggggcgagagcgggaggagacaatggcagggatcagggctatcagacggcctggtgcagatacacctaggtatctgccggttctggactatgaaaggtagcaagcgagcatgcagaccctatcatcccgtaaagttagtgcaacggagtacatgtaagatatccagcagcctgtatgtagtaggtattgtgcatgtcaaaaacgaagaggagcttggatacccatccaagttcaccgtccaccgggcatagatagaccattaacgtcgcccacatgcctcagttggcatttcagaggttgaaggagactgtagcggatggcagaactctaaacgtcttctatcgtagagaccagctccggaaacttgccgatgccctccagtctgcccaaaccgaactcatagacgccgctgtccacgacgatggctacagaaaagccgacgccttggctgaaatctatatggcgaatgctacaataaaagcatgctacgattctatagaccctgagcaat

SEQ ID NO: 6730 - DNA, 423 bp, Muscodor strobelii
  misc_feature: SGI cDNA ID NO. 561992
  misc_feature: Elevated expression when VOC is produced
  misc_feature: Encodes the peptide sequence at SEQ ID NO 6731
atgtcgactacatcaacgtcggcttccacttccacgatcgagactcggtcgcgacagcgccaccaacaccgtagcgtgctgctggactatgaagttcggcggacgaagcctgaaggggagggagagggttctgcggataaaacaacttcacacgacgctcagagacaaagtagcaccgccagctcatcaaatccaaccggatggccgagcgaccatcgtcgtgttccgcctcaccggcccatcaatcgagatgtagactttcgcaccgagagaatggtgttcacgagtacgggggagagggtcttcattggactcatgtttataggcgtcagagtcaactcgactgtcaactcaatatggcgctctaccggggaacgaatccgcgatgacctgtttcggtatgaggtgggcggagaatactaa

SEQ ID NO: 6731 - protein, 140 aa, Muscodor strobelii
  misc_feature: SGI Peptide ID NO. 561992
  misc_feature (29)..(140): NCBI GI: 255933678 Blast Desc: Pc12g14120 [Penicillium chrysogenum Wisconsin 54-1255] gi|211582837|emb|CAP81039.1| Pc12g14120 [Penicillium chrysogenum Wisconsin 54-1255]
  misc_feature (58)..(140): NCBI GI: 67541148 Blast Desc: AN6744.2 [Aspergillus nidulans FGSC A4] gi|40739372|gb|EAA58562.1| AN6744.2 [Aspergillus nidulans FGSC A4] gi|259480336|tpe|CBF71373.1| TPA: [Aspergillus nidulans FGSC
  misc_feature (1)..(140): NCBI GI: 242769622 Blast Desc: conserved [Talaromyces stipitatus ATCC 10500] gi|218725001|gb|EED24418.1| conserved [Talaromyces stipitatus ATCC 10500]
  misc_feature (26)..(139): NCBI GI: 39949497 Blast Desc: MGG_08782 [Magnaporthe grisea 70-15] gi|145009334|gb|EDJ94045.1| MGG_08782 [Magnaporthe grisea 70-15]
  misc_feature (25)..(140): NCBI GI: 145237162 Blast Desc: An07g01410 [Aspergillus niger] gi|134075694|emb|CAK96586.1| [Aspergillus niger]
  misc_feature (24)..(140): NCBI GI: 189202988 Blast Desc: conserved [Pyrenophora tritici-repentis Pt-1C-BFP] gi|187984929|gb|EDU50417.1| conserved [Pyrenophora tritici-repentis Pt-1C-BFP]
  misc_feature (55)..(140): NCBI GI: 212539368 Blast Desc: conserved [Penicillium marneffei ATCC 18224] gi|210067138|gb|EEA21230.1| conserved [Penicillium marneffei ATCC 18224]
  misc_feature (24)..(140): NCBI GI: 169596384 Blast Desc: SNOG_00951 [Phaeosphaeria nodorum SN15] gi|160701296|gb|EAT92446.2| SNOG_00951 [Phaeosphaeria nodorum SN15]
  misc_feature (25)..(140): NCBI GI: 119488387 Blast Desc: NFIA_113290 [Neosartorya fischeri NRRL 181] gi|119410854|gb|EAW20799.1| conserved [Neosartorya fischeri NRRL 181]
  misc_feature (9)..(139): NCBI GI: 261354079 Blast Desc: conserved [Verticillium albo-atrum VaMs.102]
  misc_feature: Useful for introducing or modulating the production of volatile compounds
MSTTSTSASTSTIETRSRQRHQHRSVLLDYEVRRTKPEGEGEGSADKTTSHDAQRQSSTASSSNPTGWPSDHRRVPPHRPINRDVDFRTERMVFTSTGERVFIGLMFIGVRVNSTVNSIWRSTGERIRDDLFRYEVGGEY

SEQ ID NO: 6732 - DNA, 2469 bp, Muscodor strobelii
  misc_feature: SGI EST ID NO. CUFF.16810.1
  misc_feature: Variant of the nucleotide sequence at SEQ ID NO 6730
attgctcagggtctatagaatcgtagcatgcttttattgtagcattcgccatatagatttcagccaaggcgtcggcttttctgtagccatcgtcgtggacagcggcgtctatgagttcggtttgggcagactggagggcatcggcaagtttccggagctggtctctacgatagaagacgtttagagttctgccatccgctacagtctccttcaacctctgaaatgccaactgaggcatgtgggcgacgttaatggtctatctatgcccggtggacggtgaacttggatgggtatccaagctcctcttcgtttttgacatgcacaatacctactacatacaggctgctggatatcttacatgtactccgttgcactaactttacgggatgatagggtctgcatgctcgcttgctacctttcatagtccagaaccggcagatacctaggtgtatctgcaccaggccgtctgatagccctgatccctgccattgtctcctcccgctctcgccccttttccctaatttaaaccccgctccccgtctgcccacatcccatcctggtgggacttgccgccctctctccccgcatcttgcagcatcactgcatttatctacctaggtaggtggatgtgccggactggctgcaccatcaagtctgtacgtagtgtctcgccttaggtagtgcttggcttgcgtggcccttggttgctcatcccggtgcatgcatctaacttgaactccgtacgtagtacgtgagcatcgagtactgagcccacccacttcgagcagcttcagcgcggacaagggataggatactcacctctactcccagtcgctgtcgttgccgggccttgctgtgagctcttccacgacccaacagatttattatcagctgtctcgatgtcgactacatcaacgtcggcttccacttccacgatcgagactcggtcgcgacagcgccaccaacaccgtagcgtgctgctggactatgaagttcggcggacgaagcctgaaggggagggagagggttctgcggataaaacaacttcacacgacgctcagagacaaagtagcaccgccagctcatcaaatccaaccggatggccgagcgaccatcgtcgtgttccgcctcaccggcccatcaatcgagatgtagactttcgcaccgagagaatggtgttcacgagtacgggggagagggtcttcattggactcatgtttataggcgtcagagtcaactcgactgtcaactcaatatggcgctctaccggggaacgaatccgcgatgacctgtttcggtatgaggtgggcggagaatactaagctgtttttgtttttgtgtcaaagtaatagaacaatgtcattacacaacggcaatgcgttcataggtagtattatctcttgttgtaattttacacatatgagcttgaggtgattgatgatagagtataaattatcgcatgagaaactaagtaatgcttgtactaagaaataggcattctatggtttttcgtcatctcacccagctggcatcctttttatccctcaggcaaaatcgacccgccaacagcttcaaaagtcggagcggagtggggtggccgaaccacctccttggagcttgatagtgcgtttgttcagccagtgcttggtcgctgcgctggggttgtagtagatgtggaagccgttgctgtgaacattcttaaaagaggcatcctcgttggtgaagttctgcacagttgtgtctgccgtaagcgtccaattgctgttggccgtcagggagacaccgaacgaggccgacccgtatccgaccttcgtcgtccccacccagctgctgaagcatttgagagcgaaggagatggagctcccgttgtaggccacgagatcgcccgtaaggtggctttcgtcgacagagacagtcacctcggctggtcgcatgctcgggttcgcctcgtaaccggcaaagtaattgaagtcttggatcacttgcgacatgttcgcgacgacgaggaccccagataaggtattgagcttggtgttagtcaacttggcggaggcgatgacgttgccgaaccatagcgccggcatgtcggcacgggttgtcgtgatctcagagttttcgagctccaggacggcgcctgccagtctatcctggctggagaacatgacggagccggcaagtaagcctgcttcggcacggacgttgcggagtacagcaagttgggggccatccgcgaacagcatcggcgcgttctcacagcgggagacgacattgtcggcatggatctctcccagcgcgtagaaggccgtcgagcgcatccctccggagaagtgaacaatgtccttaccgtagattgttccgtttccagaagcgtacagtccatggcttacgggtccgctgctgtagagccaactgttggagatattgacgacagacccagtcccgtacgagtatacattggctgcaccattg

SEQ ID NO: 6733 - DNA, 1446 bp, Muscodor strobelii
  misc_feature: SGI cDNA ID NO. 561993
  misc_feature: Encodes the peptide sequence at SEQ ID NO 6734
atgcctcagttggcatttcagaggttgaaggagactgtagcggatggcagaactctaaacgtcttctatcgtagagaccagctccggaaacttgccgatgccctccagtctgcccaaaccgaactcatagacgccgctgtccacgacgatggctacagaaaagccgacgccttggctgaaatctatatggcgaatgctacaataaaagcatgctacgattctatagaccctgagcaatcgctgcgagacgaatacggcatcgccaatggaaatgacgccccgaacgcgagggcgcctatcggcattgtctacgtcgagtctacatctcacaccccggtgtactctatcattgcagctgtagcctcagcgatagctggaggcaatacgattgctgttgtcctggaaccgacactccagcgtcagtacgggctcatgagctcgatccttaaagctttggaccctggccttgtcgaggtgttgagcagcaagtcagactcctcgaagcctctgagcacgactattcgcgttttgcaaactgctgctggtgattcgcctggtgcttccagtaccatagcgtcgccgacaacttccaaggtcgtcggcatcgtggaccgcactgctgatgtcgaaaaggccgcgagggagctagtcagagctcgcgcccgtttccgcggccggtctccttatgccccagacgtcgttcttgtgaatgaattcgtcagagacgagttaattcgcgccgttacgcgccattccattgatttttgggcaactcaggagaacgtcggacttacgacgacgcatacggactactctaacgtcagtgaggttaaaggagccagagtgatcgcaggcggatcgagcggagcagtcgtggaactcacaacacgaagctcgattcgtcagctctccaaggtccagtctggcacactatacgtgcactcggtgagaagcctcgacgacgccattgacttggcgaacagcatccatgatgagacgaaacttctatctacatacacttttgggtctccgaagacttgcaaatacgtcaaccaattcttgcgcgcacagatgacttttgccaaccacgttcccacgcaactactgcttggacctgccttgcctgagcacatctcaccgcaagggatccttcgatatccggtcgacgctttcacagtaccaaagcccgacttcgcgcaggagggcgcggtgagccaggctctttctcggttgctagccagccagagtgaagcgcaggcgctagagacagcggcaattttgatggcagcagaacggttgggagagcagagaccggtcagacacattattggattcttcgagcagggcattttgacggggttaggtatcacaatgtctacaatagtactggggacgggaattggagtgtacgctttggttggcgtggcaagacgccgctggttgtga

SEQ ID NO: 6734 - protein, 481 aa, Muscodor strobelii
  misc_feature: SGI Peptide ID NO. 561993
  misc_feature (6)..(481): NCBI GI: 256729593 Blast Desc: NECHADRAFT_95375 [Nectria haematococca mpVI 77-13-4]
  misc_feature (6)..(480): NCBI GI: 46121175 Blast Desc: FG04966.1 [Gibberella zeae PH-1]
  misc_feature (2)..(481): NCBI GI: 189202986 Blast Desc: conserved [Pyrenophora tritici-repentis Pt-1C-BFP] gi|187984928|gb|EDU50416.1| conserved [Pyrenophora tritici-repentis Pt-1C-BFP]
  misc_feature (5)..(480): NCBI GI: 242769626 Blast Desc: PutA family dehydrogenase, [Talaromyces stipitatus ATCC 10500] gi|218725002|gb|EED24419.1| PutA family dehydrogenase, [Talaromyces stipitatus ATCC 10500]
  misc_feature (6)..(478): NCBI GI: 67541150 Blast Desc: AN6745.2 [Aspergillus nidulans FGSC A4] gi|40739373|gb|EAA58563.1| AN6745.2 [Aspergillus nidulans FGSC A4] gi|259480337|tpe|CBF71374.1| TPA: conserved [Aspergillus FGSC
  misc_feature (2)..(481): NCBI GI: 169596382 Blast Desc: SNOG_00950 [Phaeosphaeria nodorum SN15] gi|111071325|gb|EAT92445.1| SNOG_00950 [Phaeosphaeria nodorum SN15]
  misc_feature (1)..(477): NCBI GI: 261354080 Blast Desc: conserved [Verticillium albo-atrum VaMs.102]
  misc_feature (15)..(472): NCBI GI: 238500423 Blast Desc: aldehyde dehydrogenase PutA [Aspergillus flavus NRRL3357] gi|220693199|gb|EED49545.1| aldehyde dehydrogenase PutA [Aspergillus flavus NRRL3357]
  misc_feature (5)..(480): NCBI GI: 255933676 Blast Desc: Pc12g14110 [Penicillium chrysogenum Wisconsin 54-1255] gi|211582836|emb|CAP81038.1| Pc12g14110 [Penicillium chrysogenum Wisconsin 54-1255]
  misc_feature (1)..(326): NCBI GI: 116178868 Blast Desc: CHGG_00062 [Chaetomium globosum CBS 148.51] gi|88184359|gb|EAQ91827.1| CHGG_00062 [Chaetomium globosum CBS 148.51]
MPQLAFQRLKETVADGRTLNVFYRRDQLRKLADALQSAQTELIDAAVHDDGYRKADALAEIYMANATIKACYDSIDPEQSLRDEYGIANGNDAPNARAPIGIVYVESTSHTPVYSIIAAVASAIAGGNTIAVVLEPTLQRQYGLMSSILKALDPGLVEVLSSKSDSSKPLSTTIRVLQTAAGDSPGASSTIASPTTSKVVGIVDRTADVEKAARELVRARARFRGRSPYAPDVVLVNEFVRDELIRAVTRHSIDFWATQENVGLTTTHTDYSNVSEVKGARVIAGGSSGAVVELTTRSSIRQLSKVQSGTLYVHSVRSLDDAIDLANSIHDETKLLSTYTFGSPKTCKYVNQFLRAQMTFANHVPTQLLLGPALPEHISPQGILRYPVDAFTVPKPDFAQEGAVSQALSRLLASQSEAQALETAAILMAAERLGEQRPVRHIIGFFEQGILTGLGITMSTIVLGTGIGVYALVGVARRRWL

SEQ ID NO: 6735 - DNA, 747 bp, Muscodor strobelii
  misc_feature: SGI EST ID NO. CUFF.16800.0
  misc_feature: Variant of the nucleotide sequence at SEQ ID NO 6733
cagagacgagttaattcgcgccgttacgcgccattccattgatttttgggcaactcaggagaacgtcggacttacgacgacgcatacggactactctaacgtcagtgaggttaaaggagccagagtgatcgcaggcggatcgagcggagcagtcgtggaactcacaacacgaagctcgattcgtcagctctccaaggtccagtctggcacactatacgtgcactcggtgagaagcctcgacgacgccattgacttggcgaacagcatccatgatgagacgaaacttctatctacatacacttttgggtctccgaagacttgcaaatacgtcaaccaattcttgcgcgcacagatgacttttgccaaccacgttcccacgcaactactgcttggacctgccttgcctgagcacatctcaccgcaagggatccttcgatatccggtcgacgctttcacagtaccaaagcccgacttcgcgcaggagggcgcggtgagccaggctctttctcggttgctagccagccagagtgaagcgcaggcgctagagacagcggcaattttgatggcagcagaacggttgggagagcagagaccggtcagacacattattggattcttcgagcagggcattttgacggggttaggtatcacaatgtctacaatagtactggggacgggaattggagtgtacgctttggttggcgtggcaagacgccgctggttgtgaaagagatgcagagattgtaa

SEQ ID NO: 6736 - DNA, 870 bp, Muscodor strobelii
  misc_feature: SGI cDNA ID NO. 561994
  misc_feature: Encodes the peptide sequence at SEQ ID NO 6737
atggcgccccttactccggtgcactttttctctcatgggtcgacgatgatgttgggtgaggagtccgagtctgcgagctactgggaacggtgcggtaatgaagctatcgccaatggtatcaaaggcgtcgtcattatgggcgcacattggtcgtcatccaacgacgcagtcgaggtggcgacgaacccagcacccaccaaatcacccgtggcctatgtacatcccagcaaatacgtcgactacgcgttaaatcccgacgccgcgctcggggagcgatgcgttgaaatgctgaaggcgtcgggcttcaacgctcatggaaacgcgaccttcgactggatccacgacacgtatctcatcctcatccgcatgttcccggccggctgtccgccgacgaccatcgtgtcggcgaacccacggtacgacccgcactaccacatgcgtctgggcgtcgcgttgcgaccactacgcgccgaggggtacctcatcatcgggtccggcggcgccgtgcataacttgtatcgcaacgtctggcatcctctgatcgaccatgccgacaacttcgctcagcctactcccccggaagactgggcccttgagtttcgccagagcgttgaagatgttgtctgtgcgggcggtggccctaaactgcgacggggcattacacgtctcacgaagcacccgctgtttcgcgatgctcacgctactgatgatcactttatggccgcctgcttcgttgccggcgctgctggagacacggaagatgagggcgctgcgggtatcatgggtgccgaggattgggaactcaccaacatgtgtaacagtcaattcaccattggggactgggggaggagggtggaggcatcggcttga

SEQ ID NO: 6737 - protein, 289 aa, Muscodor strobelii
  misc_feature: SGI Peptide ID NO. 561994
  misc_feature (6)..(277): Pfam Id: PF02900 Pfam Desc: Catalytic LigB subunit of aromatic ring-opening dioxygenase
  misc_feature (5)..(283): NCBI GI: 242769634 Blast Desc: aromatic ring-opening dioxygenase family protein [Talaromyces stipitatus ATCC 10500] gi|218725004|gb|EED24421.1| aromatic ring-opening dioxygenase family protein [Talaromyces
  misc_feature (2)..(289): NCBI GI: 46121189 Blast Desc: FG04973.1 [Gibberella zeae PH-1]
  misc_feature (4)..(281): NCBI GI: 115399832 Blast Desc: ATEG_06327 [Aspergillus terreus NIH2624] gi|114191171|gb|EAU32871.1| ATEG_06327 [Aspergillus terreus NIH2624]
  misc_feature (1)..(285): NCBI GI: 256729589 Blast Desc: [Nectria haematococca mpVI 77-13-4]
  misc_feature (4)..(283): NCBI GI: 145249502 Blast Desc: An14g04660 [Aspergillus niger] gi|134081772|emb|CAK42028.1| protein product [Aspergillus niger]
  misc_feature (4)..(285): NCBI GI: 70982676 Blast Desc: aromatic ring-opening dioxygenase family protein [Aspergillus fumigatus Af293] gi|66844490|gb|EAL84828.1| aromatic ring-opening dioxygenase family protein [Aspergillus fumigatus
  misc_feature (4)..(285): NCBI GI: 119488391 Blast Desc: aromatic ring-opening dioxygenase , catalytic LigB subunit, [Neosartorya fischeri NRRL 181] gi|119410856|gb|EAW20801.1| aromatic ring-opening dioxygenase ,
  misc_feature (4)..(285): NCBI GI: 159122892 Blast Desc: aromatic ring-opening dioxygenase family protein [Aspergillus fumigatus A1163]
  misc_feature (4)..(281): NCBI GI: 67541152 Blast Desc: AN6746.2 [Aspergillus nidulans FGSC A4] gi|40739374|gb|EAA58564.1| AN6746.2 [Aspergillus nidulans FGSC A4] gi|259480338|tpe|CBF71376.1| TPA: aromatic ring-opening FGSC
  misc_feature (2)..(283): NCBI GI: 51706014 Blast Desc: dioxygenase [Aspergillus flavus]
MAPLTPVHFFSHGSTMMLGEESESASYWERCGNEAIANGIKGVVIMGAHWSSSNDAVEVATNPAPTKSPVAYVHPSKYVDYALNPDAALGERCVEMLKASGFNAHGNATFDWIHDTYLILIRMFPAGCPPTTIVSANPRYDPHYHMRLGVALRPLRAEGYLIIGSGGAVHNLYRNVWHPLIDHADNFAQPTPPEDWALEFRQSVEDVVCAGGGPKLRRGITRLTKHPLFRDAHATDDHFMAACFVAGAAGDTEDEGAAGIMGAEDWELTNMCNSQFTIGDWGRRVEASA

SEQ ID NO: 6738 - DNA, 1315 bp, Muscodor strobelii
  misc_feature: SGI EST ID NO. CUFF.16803.0
  misc_feature: Variant of the nucleotide sequence at SEQ ID NO 6736
gaacagagcactataacggacttcattgagctctaatacacttgaactctgaacacctctggcactattacgaacagatacacctagatagtttggtctgcagacatcacaaatcatggcgccccttactccggtgcactttttctctcatgggtcgacgatgatgttgggtgaggagtccgagtctgcgagctactgggaacggtgcggtaatgaagctatcgccaatggtatcaaaggcgtcgtcattatgggcgcacattggtcgtcatccaacgacgcagtcgaggtggcgacgaacccagcacccaccaaatcacccgtggcctatgtacatcccagcaaatacgtcgactacgcgttaaatcccgacgccgcgctcggggagcgatgcgttgaaatgctgaaggcgtcgggcttcaacgctcatggaaacgcgaccttcgactggatccacgacacgtatctcatcctcatccgcatgttcccggccggctgtccgccgacgaccatcgtgtcggcgaacccacggtacgacccgcactaccacatgcgtctgggcgtcgcgttgcgaccactacgcgccgaggggtacctcatcatcgggtccggcggcgccgtgcataacttgtatcgcaacgtctggcatcctctgatcgaccatgccgacaacttcgctcagcctactcccccggaagactgggcccttgagtttcgccagagcgttgaagatgttgtctgtgcgggcggtggccctaaactgcgacggggcattacacgtctcacgaagcacccgctgtttcgcgatgctcacgctactgatgatcactttatggccgcctgcttcgttgccggcgctgctggagacacggaagatgagggcgctgcgggtatcatgggtgccgaggattgggaactcaccaacatgtgtaacagtcaattcaccattggggactgggggaggagggtggaggcatcggcttgaaattaacgttacggattcgagagggctatcgcagtgcaattcgcatcaagtctgagtatgctattgcagataaataagtttcttacattttgttgtgtctgtatgtacgatctctgccctagatgggtgacatctctcactacgttctcgcttgaggcagtatatcaagccatgtgcgcccagaaagtataaatatatctctccacaaggcgttcgctccatcctgaacattcttgcagactgagcccgcaaacatctacttgatccagtccactttgtctcctaggtatttctgagctcgaacatcgccggatctggcgtggccttcga

SEQ ID NO: 6739 - DNA, 1389 bp, Muscodor strobelii
  misc_feature: SGI cDNA ID NO. 561995
  misc_feature: Encodes the peptide sequence at SEQ ID NO 6740
atgggccgtacatacctcaaagagcgaacagtgcaagccgccaccagtcaagcctcgcaaccgagcagcgtgcccgcaaccgtgtccggtgtcatcgacgacatcaggaagaaaggcgatgccgccgtgcgtcgctactcggagaagttcgacaagtggactccgcaaagcttcagattgagtcaagaggagatcgacgcagcgatcgcgcaggtccccaagcagaccatcgacgacatcaaggaggtccaacagaatgtccggcattttgcagagctccagagagactcgatcaaggatttcgaaaccgagacagcgccgggtgtctttcttggacagagaagcaatccgattcagacagttggaacgtcggttcatttcccgctatctctttctcttcagcgtcaactttccccactgattaatgtcgctgatgaaacgacatatagatacattcccggtggccggtacccactgcttgcttccgcgcatatgacggtcctcacggccaaggttgccggcgttcctaacgtcattgcctgcacgcctccgatcgcaggcaagaccccaaattccatagtggcggctctgcatctcgctggcgccgacgaaatccacatactaggaggagttcaagccgtggcagcgatggctgtcggcaccaagacagtcaaaaaggtggacttcatcgcggggcccggcaatgctttcgtcgccgaggcaaagcggcagctctatggcgagattggcatcgatctgttcgccgggccgacggaggtcttgattgtagcagacgagacggcagatccaattgtcgtcgctacggatctgttgtcgcaggcggagcacggccccgacagccctgctgttctcatcacgacgtcgagggaagttgggcagaagtgtgttgaactgtgctctgagctgctcaagacgctgagcacggccgctattgccagtgtttcgtggtctaatcttggcgaggtgatcctcgtggatgacgtggacgaggcatataaagtggcagacacatttgcgtcggagcacgtacagattcttacttcctccccccgtgacgctcttgagaagatgcagaattatggtgctatctttcttgggcctatgacttgtgtttcatacggcgacaagtgtatcggaacaaaccacgtgttgccgaccaagggggcagcacgctacaccggtggcctttgggtcggcaagttcctccggactgttacgtatcaagaggtccgaaacgccgagtccagtgggcatctagggcgtctatgtagtcgcgccgcgcgagccgaactgttcgaaggccacgccagatccggcgatgttcgagctcagaaatacctaggagacaaagtggactggatcaagtag

SEQ ID NO: 6740 - protein, 462 aa, Muscodor strobelii
  misc_feature: SGI Peptide ID NO. 561995
  misc_feature (3)..(451): Pfam Id: PF00815 Pfam Desc: Histidinol dehydrogenase
  misc_feature (151)..(451): Pfam Id: PF00815 Pfam Desc: Histidinol dehydrogenase
  misc_feature (26)..(122): Pfam Id: PF00815 Pfam Desc: Histidinol dehydrogenase
  misc_feature (1)..(462): NCBI GI: 256721044 Blast Desc: NECHADRAFT_94798 [Nectria haematococca mpVI 77-13-4]
  misc_feature (1)..(462): NCBI GI: 159131868 Blast Desc: histidinol dehydrogenase, [Aspergillus fumigatus A1163]
  misc_feature (1)..(462): NCBI GI: 119494107 Blast Desc: histidinol dehydrogenase [Neosartorya fischeri NRRL 181] gi|119412135|gb|EAW22076.1| histidinol dehydrogenase [Neosartorya fischeri NRRL 181]
  misc_feature (1)..(462): NCBI GI: 70996754 Blast Desc: histidinol dehydrogenase [Aspergillus fumigatus Af293] gi|66850767|gb|EAL91094.1| histidinol dehydrogenase, [Aspergillus fumigatus Af293]
  misc_feature (5)..(462): NCBI GI: 161318389 Blast Desc: histidinol dehydrogenase [Phaeosphaeria nodorum] gi|161318391|gb|ABX60499.1| histidinol dehydrogenase [Phaeosphaeria nodorum] gi|161318395|gb|ABX60501.1| histidinol
  misc_feature (5)..(462): NCBI GI: 161318393 Blast Desc: histidinol dehydrogenase [Phaeosphaeria nodorum]
  misc_feature (5)..(462): NCBI GI: 161318387 Blast Desc: histidinol dehydrogenase [Phaeosphaeria nodorum]
  misc_feature (1)..(462): NCBI GI: 169765574 Blast Desc: [Aspergillus oryzae RIB40] gi|238482139|ref|XP_002372308.1| histidinol dehydrogenase, [Aspergillus flavus NRRL3357] gi|83765113|dbj|BAE55256.1| protein
  misc_feature (1)..(462): NCBI GI: 189212063 Blast Desc: histidinol dehydrogenase 1 [Pyrenophora tritici-repentis Pt-1C-BFP] gi|187979557|gb|EDU46183.1| histidinol dehydrogenase 1 [Pyrenophora tritici-repentis
  misc_feature (5)..(461): NCBI GI: 145250010 Blast Desc: An14g07210 [Aspergillus niger] gi|134082029|emb|CAK46714.1| protein product [Aspergillus niger]
  misc_feature (28)..(453): SWISSPROT Homolog: EC 1.1.1.23 Histidinol dehydrogenase
MGRTYLKERTVQAATSQASQPSSVPATVSGVIDDIRKKGDAAVRRYSEKFDKWTPQSFRLSQEEIDAAIAQVPKQTIDDIKEVQQNVRHFAELQRDSIKDFETETAPGVFLGQRSNPIQTVGTSVHFPLSLSLQRQLSPLINVADETTYRYIPGGRYPLLASAHMTVLTAKVAGVPNVIACTPPIAGKTPNSIVAALHLAGADEIHILGGVQAVAAMAVGTKTVKKVDFIAGPGNAFVAEAKRQLYGEIGIDLFAGPTEVLIVADETADPIVVATDLLSQAEHGPDSPAVLITTSREVGQKCVELCSELLKTLSTAAIASVSWSNLGEVILVDDVDEAYKVADTFASEHVQILTSSPRDALEKMQNYGAIFLGPMTCVSYGDKCIGTNHVLPTKGAARYTGGLWVGKFLRTVTYQEVRNAESSGHLGRLCSRAARAELFEGHARSGDVRAQKYLGDKVDWIK

SEQ ID NO: 6741 - DNA, 1473 bp, Muscodor strobelii
  misc_feature: SGI cDNA ID NO. 561996
  misc_feature: Encodes the peptide sequence at SEQ ID NO 6742
atgggggacgctatagcgaatgttttgaccgatttgacgttgcgcaactctctaccgccgacatttcccattcattggcgaggtgactatggttttgagctcgcccgaacacggcgactcttcaaccgtcgcctgcccgaccggcagccaatagcggttatcgaggctcgccagcaacaacacctggtcgaagcgatcaaattggccaagcgcattggctgtcgcgtttctgtacgctcgggaggtcacagctgggcggcatggagcattcgaaatgatgccattcttcttgacctggggaactaccattggtttgagtacaacgatgacaccaacatcgtcatcgtgtccccgagtactacgggaagaatgctcaatgcatttctggagcccaaagatcgcatattccccggcggacactgcccagatgttggcctcggcggttttctcctccagggaggtatgggttggaattgtaaaaactggggttgggcatgcgagcgcgttgtcggactagacgttgtgactgcagatggtgaactagttcattgcaatgcggaacaaaaccaggatctcttttttgccgctcggggtgcaggcccaggctttcccgctatagtctcgcgctttcatctccagactatacctcggtttcatcacgtccgatcctctgcctatttttacaagacagaggactttcggaaagcgatgacttggattctatcagtgagcccctatccactcagtctcgggtcaaattatcgcacaactaactccaattcaactcagatcacagctgactacgacgacaataccgagattgtcgccgtctcatcctacccgccactctccgacgacatcaatattatggttctattgacgacgttccagaaaaatgagagcgacgcgcgagctgttcttcagaaagccgaggatagccatcctccgggaactgtgcatcaatggttcatgaaggagacttctctagaatgcgagtaccaagaccaggcatttgccaatcctttagggcaccgatggtgtgtcgacaatgcctatgtcaagaacgatgccgacgttatcgcagtcctcgaacctgcatttaccacgctcccaagcaagaagtcattttctctttggtactctatggcaccttgtagcagtcgcatgctaatggacatggcggtgagcatgcagaccgatcactattttgccatatactgcgtctgtgaggacgagaaagcggacgatcactgccgaggatgggtcaaggacacaatgaacaagatggagccgtataccgccggagcgtatttaggtgattctgatttccaaacgcgccagactaggtactgggcacaggaacaaggaaaaggcttgatgaagatcagagagcaacgagatccagagggtcgcatctgtggatatctagacgagggtgacaattctggtgtaaagggactcagcaacttgtaa

SEQ ID NO: 6742 - protein, 490 aa, Muscodor strobelii
  misc_feature: SGI Peptide ID NO. 561996
  misc_feature (50)..(185): Pfam Id: PF01565 Pfam Desc: FAD binding domain
  misc_feature (22)..(489): NCBI GI: 256721030 Blast Desc: NECHADRAFT_94796 [Nectria haematococca mpVI 77-13-4]
  misc_feature (32)..(489): NCBI GI: 169765580 Blast Desc: [Aspergillus oryzae RIB40] gi|83765116|dbj|BAE55259.1| protein product [Aspergillus oryzae]
  misc_feature (24)..(488): NCBI GI: 67525883 Blast Desc: AN3399.2 [Aspergillus nidulans FGSC A4] gi|40744187|gb|EAA63367.1| AN3399.2 [Aspergillus nidulans FGSC A4] gi|259485613|tpe|CBF82784.1| TPA: FAD binding oxidoreductase,
  misc_feature (12)..(490): NCBI GI: 115436754 Blast Desc: conserved [Aspergillus terreus NIH2624] gi|114188451|gb|EAU30151.1| conserved [Aspergillus terreus NIH2624]
  misc_feature (32)..(490): NCBI GI: 119494101 Blast Desc: FAD binding domain protein [Neosartorya fischeri NRRL 181] gi|119412132|gb|EAW22073.1| FAD binding domain protein [Neosartorya fischeri NRRL 181]
  misc_feature (11)..(489): NCBI GI: 145256376 Blast Desc: An19g00380 [Aspergillus niger CBS 513.88] gi|134084773|emb|CAK47361.1| protein product [Aspergillus niger]
  misc_feature (32)..(490): NCBI GI: 70996760 Blast Desc: FAD binding oxidoreductase [Aspergillus fumigatus Af293] gi|66850770|gb|EAL91097.1| FAD binding oxidoreductase, [Aspergillus fumigatus Af293] gi|159131871|gb|EDP56984.1| FAD
  misc_feature (14)..(476): NCBI GI: 212539239 Blast Desc: FAD binding oxidoreductase, [Penicillium marneffei ATCC 18224] gi|210069517|gb|EEA23608.1| FAD binding oxidoreductase, [Penicillium marneffei ATCC 18224]
  misc_feature (32)..(476): NCBI GI: 261188987 Blast Desc: FAD binding domain-containing protein [Ajellomyces dermatitidis SLH14081] gi|239591910|gb|EEQ74491.1| FAD binding domain-containing protein [Ajellomyces dermatitidis SLH14081]
  misc_feature (32)..(476): NCBI GI: 239609184 Blast Desc: FAD binding domain-containing protein [Ajellomyces dermatitidis ER-3]
MGDAIANVLTDLTLRNSLPPTFPIHWRGDYGFELARTRRLFNRRLPDRQPIAVIEARQQQHLVEAIKLAKRIGCRVSVRSGGHSWAAWSIRNDAILLDLGNYHWFEYNDDTNIVIVSPSTTGRMLNAFLEPKDRIFPGGHCPDVGLGGFLLQGGMGWNCKNWGWACERVVGLDVVTADGELVHCNAEQNQDLFFAARGAGPGFPAIVSRFHLQTIPRFHHVRSSAYFYKTEDFRKAMTWILSVSPYPLSLGSNYRTTNSNSTQITADYDDNTEIVAVSSYPPLSDDINIMVLLTTFQKNESDARAVLQKAEDSHPPGTVHQWFMKETSLECEYQDQAFANPLGHRWCVDNAYVKNDADVIAVLEPAFTTLPSKKSFSLWYSMAPCSSRMLMDMAVSMQTDHYFAIYCVCEDEKADDHCRGWVKDTMNKMEPYTAGAYLGDSDFQTRQTRYWAQEQGKGLMKIREQRDPEGRICGYLDEGDNSGVKGLSNL

SEQ ID NO: 6743 - DNA, 2866 bp, Muscodor strobelii
  misc_feature: SGI EST ID NO. CUFF.16877.0
  misc_feature: Variant of the nucleotide sequence at SEQ ID NO 6741
ttcgaagaatgacgggggttccctcgtcatccgtacacgtagccttttgtttcagactctcgtgcagatggaccctgtgcgtcaacaaccagggctgaaattgaagaaagaatcagctagcttcgcggatgttttaattgcagcttcacgctcttacatgctgccaacgcttgtttcccgggcgcaagtcgacgtgtatctgctgattccccgcaacgtcgtattcagttatctttcaagaggaatgttagtatttggaggcactcgacaagcattactcagtcgactgaagaacgactcacgtagttcatgtgattggcgccatgggtttcggcaaatattcccatgcgtcgcagtattccattgcaattcggggccaggtgtacggctgcgccggtttcactggcaaaacgggattgctccaacactatgacccggtgacctctcttccggaggtatatggctgccgtcaaaccaccaattccagctcctacgacgacgacgtcaagtccagaagcatgattgccagagctattcgtctgcgggtctaccgcaacctggaatcccattgcatgggcagccaagaggagtctgcagttcttgtctttgaatagaagactgaaaaccgagccttgcgcaacgacaaacttgagacacaagctaaattttcagtatgagatctatctttcgcacttcatactatcttaatcagcgcgtgtgcctgcctgacttagaatttcgactaccccatctcagcgaccagaatacgggcttattcgtcacctaaaccatcgcttacgcgttcccaagatgatctcccgcgggccgatacttatgctacggtcggaatgtgggcgacgtactctccgtcaccttgttcttggtccagcaatgaatgagacaacgcccggacactaagcttccctgcaatgtacagacttaaacacattaataatattttactcattgccgtattcgggcgctgttcaatcggcttgtgactgtcgacgcggggcacgacctcacagtggggaagttgctgagctgttcatggatcaaacacacctgcatctatgaaggacaaccccgcgatggatacacacgcgtcatcctcattggccactttctacatcttgttaattacttagtactcagtctatcgttgtttgtctcttctttccaggggcgccaagctttcacaaaatgggggacgctatagcgaatgttttgaccgatttgacgttgcgcaactctctaccgccgacatttcccattcattggcgaggtgactatggttttgagctcgcccgaacacggcgactcttcaaccgtcgcctgcccgaccggcagccaatagcggttatcgaggctcgccagcaacaacacctggtcgaagcgatcaaattggccaagcgcattggctgtcgcgtttctgtacgctcgggaggtcacagctgggcggcatggagcattcgaaatgatgccattcttcttgacctggggaactaccattggtttgagtacaacgatgacaccaacatcgtcatcgtgtccccgagtactacgggaagaatgctcaatgcatttctggagcccaaagatcgcatattccccggcggacactgcccagatgttggcctcggcggttttctcctccagggaggtatgggttggaattgtaaaaactggggttgggcatgcgagcgcgttgtcggactagacgttgtgactgcagatggtgaactagttcattgcaatgcggaacaaaaccaggatctcttttttgccgctcggggtgcaggcccaggctttcccgctatagtctcgcgctttcatctccagactatacctcggtttcatcacgtccgatcctctgcctatttttacaagacagaggactttcggaaagcgatgacttggattctatcaatcacagctgactacgacgacaataccgagattgtcgccgtctcatcctacccgccactctccgacgacatcaatattatggttctattgacgacgttccagaaaaatgagagcgacgcgcgagctgttcttcagaaagccgaggatagccatcctccgggaactgtgcatcaatggttcatgaaggagacttctctagaatgcgagtaccaagaccaggcatttgccaatcctttagggcaccgatggtgtgtcgacaatgcctatgtcaagaacgatgccgacgttatcgcagtcctcgaacctgcatttaccacgctcccaagcaagaagtcattttctctttggtactctatggcaccttgtagcagtcgcatgctaatggacatggcggtgagcatgcagaccgatcactattttgccatatactgcgtctgtgaggacgagaaagcggacgatcactgccgaggatgggtcaaggacacaatgaacaagatggagccgtataccgccggagcgtatttaggtgattctgatttccaaacgcgccagactaggtactgggcacaggaacaaggaaaaggcttgatgaagatcagagagcaacgagatccagagggtcgcatctgtggatatctagacgagggtgacaattctggtgtaaagggactcagcaacttgtaacttagactatacctacaactacacctgtgacatacatgcacatagatggtaagctttctgtgcagtcttgcactagtcaactctatgaaacacttaagcaagagccagttttagggagcttactcagtaacttgcaatctggggttctcccttggctggtcctctatctagagcaagacttcaacaaacaaagttgggattctgagtcgcgttctatcatacaacaggccctgatccccctcgaatgagcgat

SEQ ID NO: 6744 - DNA, 1410 bp, Muscodor strobelii
  misc_feature: SGI cDNA ID NO. 561997
  misc_feature: Elevated expression when VOC is produced
  misc_feature: Encodes the peptide sequence at SEQ ID NO 6745
atgggggacgctatagcgaatgttttgaccgatttgacgttgcgcaactctctaccgccgacatttcccattcattggcgaggtgactatggttttgagctcgcccgaacacggcgactcttcaaccgtcgcctgcccgaccggcagccaatagcggttatcgaggctcgccagcaacaacacctggtcgaagcgatcaaattggccaagcgcattggctgtcgcgtttctgtacgctcgggaggtcacagctgggcggcatggagcattcgaaatgatgccattcttcttgacctggggaactaccattggtttgagtacaacgatgacaccaacatcgtcatcgtgtccccgagtactacgggaagaatgctcaatgcatttctggagcccaaagatcgcatattccccggcggacactgcccagatgttggcctcggcggttttctcctccagggaggtatgggttggaattgtaaaaactggggttgggcatgcgagcgcgttgtcggactagacgttgtgactgcagatggtgaactagttcattgcaatgcggaacaaaaccaggatctcttttttgccgctcggggtgcaggcccaggctttcccgctatagtctcgcgctttcatctccagactatacctcggtttcatcacgtccgatcctctgcctatttttacaagacagaggactttcggaaagcgatgacttggattctatcaatcacagctgactacgacgacaataccgagattgtcgccgtctcatcctacccgccactctccgacgacatcaatattatggttctattgacgacgttccagaaaaatgagagcgacgcgcgagctgttcttcagaaagccgaggatagccatcctccgggaactgtgcatcaatggttcatgaaggagacttctctagaatgcgagtaccaagaccaggcatttgccaatcctttagggcaccgatggtgtgtcgacaatgcctatgtcaagaacgatgccgacgttatcgcagtcctcgaacctgcatttaccacgctcccaagcaagaagtcattttctctttggtactctatggcaccttgtagcagtcgcatgctaatggacatggcggtgagcatgcagaccgatcactattttgccatatactgcgtctgtgaggacgagaaagcggacgatcactgccgaggatgggtcaaggacacaatgaacaagatggagccgtataccgccggagcgtatttaggtgattctgatttccaaacgcgccagactaggtactgggcacaggaacaaggaaaaggcttgatgaagatcagagagcaacgagatccagagggtcgcatctgtggatatctagacgagggtgacaattctggtgtaaagggactcagcaacttgtaa

SEQ ID NO: 6745 - protein, 469 aa, Muscodor strobelii
  misc_feature: SGI Peptide ID NO. 561997
  misc_feature (50)..(185): Pfam Id: PF01565 Pfam Desc: FAD binding domain
  misc_feature (22)..(468): NCBI GI: 256721030 Blast Desc: NECHADRAFT_94796 [Nectria haematococca mpVI 77-13-4]
  misc_feature (32)..(468): NCBI GI: 169765580 Blast Desc: [Aspergillus oryzae RIB40] gi|83765116|dbj|BAE55259.1| protein product [Aspergillus oryzae]
  misc_feature (24)..(467): NCBI GI: 67525883 Blast Desc: AN3399.2 [Aspergillus nidulans FGSC A4] gi|40744187|gb|EAA63367.1| AN3399.2 [Aspergillus nidulans FGSC A4] gi|259485613|tpe|CBF82784.1| TPA: FAD binding oxidoreductase,
  misc_feature (12)..(469): NCBI GI: 115436754 Blast Desc: conserved [Aspergillus terreus NIH2624] gi|114188451|gb|EAU30151.1| conserved [Aspergillus terreus NIH2624]
  misc_feature (32)..(469): NCBI GI: 119494101 Blast Desc: FAD binding domain protein [Neosartorya fischeri NRRL 181] gi|119412132|gb|EAW22073.1| FAD binding domain protein [Neosartorya fischeri NRRL 181]
  misc_feature (11)..(468): NCBI GI: 145256376 Blast Desc: An19g00380 [Aspergillus niger CBS 513.88] gi|134084773|emb|CAK47361.1| protein product [Aspergillus niger]
  misc_feature (32)..(469): NCBI GI: 70996760 Blast Desc: FAD binding oxidoreductase [Aspergillus fumigatus Af293] gi|66850770|gb|EAL91097.1| FAD binding oxidoreductase, [Aspergillus fumigatus Af293] gi|159131871|gb|EDP56984.1| FAD
  misc_feature (14)..(455): NCBI GI: 212539239 Blast Desc: FAD binding oxidoreductase, [Penicillium marneffei ATCC 18224] gi|210069517|gb|EEA23608.1| FAD binding oxidoreductase, [Penicillium marneffei ATCC 18224]
  misc_feature (32)..(455): NCBI GI: 261188987 Blast Desc: FAD binding domain-containing protein [Ajellomyces dermatitidis SLH14081] gi|239591910|gb|EEQ74491.1| FAD binding domain-containing protein [Ajellomyces dermatitidis SLH14081]
  misc_feature (32)..(455): NCBI GI: 239609184 Blast Desc: FAD binding domain-containing protein [Ajellomyces dermatitidis ER-3]
  misc_feature: Useful for introducing or modulating the production of volatile compounds
MGDAIANVLTDLTLRNSLPPTFPIHWRGDYGFELARTRRLFNRRLPDRQPIAVIEARQQQHLVEAIKLAKRIGCRVSVRSGGHSWAAWSIRNDAILLDLGNYHWFEYNDDTNIVIVSPSTTGRMLNAFLEPKDRIFPGGHCPDVGLGGFLLQGGMGWNCKNWGWACERVVGLDVVTADGELVHCNAEQNQDLFFAARGAGPGFPAIVSRFHLQTIPRFHHVRSSAYFYKTEDFRKAMTWILSITADYDDNTEIVAVSSYPPLSDDINIMVLLTTFQKNESDARAVLQKAEDSHPPGTVHQWFMKETSLECEYQDQAFANPLGHRWCVDNAYVKNDADVIAVLEPAFTTLPSKKSFSLWYSMAPCSSRMLMDMAVSMQTDHYFAIYCVCEDEKADDHCRGWVKDTMNKMEPYTAGAYLGDSDFQTRQTRYWAQEQGKGLMKIREQRDPEGRICGYLDEGDNSGVKGLSNL

SEQ ID NO: 6746 - DNA, 2866 bp, Muscodor strobelii; identical to SEQ ID NO: 6743
  misc_feature: SGI EST ID NO. CUFF.16877.0
  misc_feature: Variant of the nucleotide sequence at SEQ ID NO 6744

SEQ ID NO: 6747 - DNA, 2121 bp, Muscodor strobelii
  misc_feature: SGI cDNA ID NO. 561998
  misc_feature: Encodes the peptide sequence at SEQ ID NO 6748
atgggattccaggttgcggtagacccgcagacgaatagctctggcaatcatgcttctggacttgacgtcgtcgtcgtaggagctggaattggtggtttgacggcagccatatacctccggaagagaggtcaccgggtcatagtgttggagcaatcccgttttgccagtgaaaccggcgcagccgtacacctggccccgaattgcaatggaatactgcgacgcatgggaatatttgccgaaacccatggcgccaatcacatgaactacataactgaatacgacgttgcggggaatcagcagatacacgtcgacttgcgcccgggaaacaagcgttggcagcatccctggttgttgacgcacagggtccatctgcacgagagtctgaaacaaaaggctacgtgtacggatgacgagggaacccccgtcattcttcgaacctccaatcgtgtggttgacgttgataccgtcaacgggacagccattctggagaacggagaacagataaaaggcgctgtcattgtcggcgctgacggcgtacactctcgatgccgcgagaagcttcctggatgtgagacaatcaagccgcgaggctctggcaaaagcgcgtttcgctttcttgtgtctcgccaggctgtcctcgacgaccctcagactgcccgctttgcacagcttgacggggaacttagtatatggtatggattggatcggagagtggtcatgtatccctgctctaacgacacgcaactgaattttgtctgcattcatccacgggaagaatcaagcaccaggcccgatgattgggaaagtggtgccagtcttgcgacgctcttggaggtcttcaagggcttcgacccgtcctttctggcacttgtgggcaaagccgacagcaagactctgaaagtctgggaacttctagacatggacattctacccacatggacagatggtcgcctggctctactcggcgacgcagcccaccccttcttaccccaccaggggcagggcgctgggtgtgccattgaggatgcagcggcgcttgctgtggtgctgccgagagacgcgcctgcgaatgaggttcccgagaggctcaagctttatgagacgatccgctgggagagggcgcataagattcaggagttctctcgggaggcaggcagagacctcccgccaggagaaaagagaatcaacatgaggaaaaaagaggaatataacttcggccatgacgaatgggacaattcgatgcagcgattccgtaaatgggaatggtcaaaaaagccaaatttgttctggcgcatgcctatttcttttgggccgatgcctgggccacgtcagaacttcttgggtgtgccacgcgaggcgcgtcagtccacattcacaacagcatcgatcaagttcaagacatcgaggaccctgctccaaagtttactgcccactgagagttacagtttcatcaagcctgacacattcgcatatgccagcttctctcagagcaccctaggcaagatggagtggctaggcggtagcgggtatagacaccttggcctctacattcacggcgtgcagtataccaagaaagacggcgaggtcatcaagggtacatatatgcctgttctgttcgaaagtctgaccgaccccatcgtcagcgggcgtgaggagctaggcatgcccaagctctactgtagtcttgacatccacaaaaggcaaacctcctaccgcattcagatgggctgggagggcgtcgtatttggcaatatgtctctcaataatctgacagaggacgacccggcatccgaacacggaaccattggtggtgaggcggatgacgggatcttggtttatagatatgtgcctaaggtgggagagcgcggacaagcggacgcggaatacggtgtcttcgtgccgcacgcgaacgagtccaaggtagtgccatcgaaggttctctcggttgcacgggcgagtaatgcgtccatgaccctcgacccgctggactgggaggccctgcctacattacatcacatcgtctcacggcttgccgaaattcctatctacgaggttgttagcgccaaggttgtctctggtgtgggcgtgcccgacgtttcgagcgcgcatagaattgaatag

SEQ ID NO: 6748 - protein, 706 aa, Muscodor strobelii
  misc_feature: SGI Peptide ID NO. 561998
  misc_feature (22)..(324): Pfam Id: PF01266 Pfam Desc: FAD dependent oxidoreductase
  misc_feature (20)..(381): Pfam Id: PF01494 Pfam Desc: FAD binding domain
  misc_feature (30)..(50): Pfam Id: PF01593 Pfam Desc: Flavin containing amine oxidoreductase
  misc_feature (22)..(58): Pfam Id: PF01266 Pfam Desc: FAD dependent oxidoreductase
  misc_feature (22)..(51): Pfam Id: PF00890 Pfam Desc: FAD binding domain
  misc_feature (22)..(53): Pfam Id: PF07992 Pfam Desc: Pyridine nucleotide-disulphide oxidoreductase
  misc_feature (21)..(52): Pfam Id: PF01946 Pfam Desc: Thi4 family
  misc_feature (34)..(706): NCBI GI: 259485622 Blast Desc: TPA: salicylate hydroxylase, (AFU_orthologue; AFUA_1G17670) [Aspergillus nidulans FGSC A4]
  misc_feature (34)..(706): NCBI GI: 119494105 Blast Desc: FAD binding domain protein [Neosartorya fischeri NRRL 181] gi|119412134|gb|EAW22075.1| FAD binding domain protein [Neosartorya fischeri NRRL 181]
  misc_feature (34)..(696): NCBI GI: 67525869 Blast Desc: AN3392.2 [Aspergillus nidulans FGSC A4] gi|40744180|gb|EAA63360.1| AN3392.2 [Aspergillus nidulans FGSC A4]
  misc_feature (14)..(706): NCBI GI: 159122887 Blast Desc: salicylate hydroxylase, [Aspergillus fumigatus A1163]
  misc_feature (11)..(706): NCBI GI: 255933662 Blast Desc: Pc12g14040 [Penicillium chrysogenum Wisconsin 54-1255] gi|211582829|emb|CAP81031.1| Pc12g14040 [Penicillium chrysogenum Wisconsin 54-1255]
  misc_feature (14)..(706): NCBI GI: 70982686 Blast Desc: salicylate hydroxylase [Aspergillus fumigatus Af293] gi|66844495|gb|EAL84833.1| salicylate hydroxylase, [Aspergillus fumigatus Af293]
  misc_feature (19)..(705): NCBI GI: 242769611 Blast Desc: salicylate hydroxylase, [Talaromyces stipitatus ATCC 10500] gi|218724998|gb|EED24415.1| salicylate hydroxylase, [Talaromyces stipitatus ATCC 10500]
  misc_feature (14)..(706): NCBI GI: 119488380 Blast Desc: FAD binding domain protein [Neosartorya fischeri NRRL 181] gi|119410851|gb|EAW20796.1| FAD binding domain protein [Neosartorya fischeri NRRL 181]
  misc_feature (10)..(702): NCBI GI: 169596386 Blast Desc: SNOG_00952 [Phaeosphaeria nodorum SN15] gi|111071327|gb|EAT92447.1| SNOG_00952 [Phaeosphaeria nodorum SN15]
  misc_feature (34)..(706): NCBI GI: 70996756 Blast Desc: salicylate hydroxylase [Aspergillus fumigatus Af293] gi|66850768|gb|EAL91095.1| salicylate hydroxylase, [Aspergillus fumigatus Af293] gi|159131869|gb|EDP56982.1| salicylate fumigatus
  misc_feature (22)..(384): SWISSPROT Homolog: EC 1.14.13.24 3-hydroxybenzoate 6-monooxygenase
MGFQVAVDPQTNSSGNHASGLDVVVVGAGIGGLTAAIYLRKRGHRVIVLEQSRFASETGAAVHLAPNCNGILRRMGIFAETHGANHMNYITEYDVAGNQQIHVDLRPGNKRWQHPWLLTHRVHLHESLKQKATCTDDEGTPVILRTSNRVVDVDTVNGTAILENGEQIKGAVIVGADGVHSRCREKLPGCETIKPRGSGKSAFRFLVSRQAVLDDPQTARFAQLDGELSIWYGLDRRVVMYPCSNDTQLNFVCIHPREESSTRPDDWESGASLATLLEVFKGFDPSFLALVGKADSKTLKVWELLDMDILPTWTDGRLALLGDAAHPFLPHQGQGAGCAIEDAAALAVVLPRDAPANEVPERLKLYETIRWERAHKIQEFSREAGRDLPPGEKRINMRKKEEYNFGHDEWDNSMQRFRKWEWSKKPNLFWRMPISFGPMPGPRQNFLGVPREARQSTFTTASIKFKTSRTLLQSLLPTESYSFIKPDTFAYASFSQSTLGKMEWLGGSGYRHLGLYIHGVQYTKKDGEVIKGTYMPVLFESLTDPIVSGREELGMPKLYCSLDIHKRQTSYRIQMGWEGVVFGNMSLNNLTEDDPASEHGTIGGEADDGILVYRYVPKVGERGQADAEYGVFVPHANESKVVPSKVLSVARASNASMTLDPLDWEALPTLHHIVSRLAEIPIYEVVSAKVVSGVGVPDVSSAHRIE

SEQ ID NO: 6749 - DNA, 1657 bp, Muscodor strobelii
  misc_feature: SGI EST ID NO. CUFF.16960.0
  misc_feature: Variant of the nucleotide sequence at SEQ ID NO 6747
agaacagataaaaggcgctgtcattgtcggcgctgacggcgtacactctcgatgccgcgagaagcttcctggatgtgagacaatcaagccgcgaggctctggcaaaagcgcgtttcgctttcttgtgtctcgccaggctgtcctcgacgaccctcagactgcccgctttgcacagcttgacggggaacttagtatatggtatggattggatcggagagtggtcatgtatccctgctctaacgacacgcaactgaattttgtctgcattcatccacgggaagaatcaagcaccaggcccgatgattgggaaagtggtgccagtcttgcgacgctcttggaggtcttcaagggcttcgacccgtcctttctggcacttgtgggcaaagccgacagcaagactctgaaagtctgggaacttctagacatggacattctacccacatggacagatggtcgcctggctctactcggcgacgcagcccaccccttcttaccccaccaggggcagggcgctgggtgtgccattgaggatgcagcggcgcttgctgtggtgctgccgagagacgcgcctgcgaatgaggttcccgagaggctcaagctttatgagacgatccgctgggagagggcgcataagattcaggagttctctcgggaggcaggcagagacctcccgccaggagaaaagagaatcaacatgaggaaaaaagaggaatataacttcggccatgacgaatgggacaattcgatgcagcgattccgtaaatgggaatggtcaaaaaagccaaatttgttctggcgcatgcctatttcttttgggccgatgcctgggccacgtcagaacttcttgggtgtgccacgcgaggcgcgtcagtccacattcacaacagcatcgatcaagttcaagacatcgaggaccctgctccaaagtttactgcccactgagagttacagtttcatcaagcctgacacattcgcatatgccagcttctctcagagcaccctaggcaagatggagtggctaggcggtagcgggtatagacaccttggcctctacattcacggcgtgcagtataccaagaaagacggcgaggtcatcaagggtacatatatgcctgttctgttcgaaagtctgaccgaccccatcgtcagcgggcgtgaggagctaggcatgcccaagctctactgtagtcttgacatccacaaaaggcaaacctcctaccgcattcagatgggctgggagggcgtcgtatttggcaatatgtctctcaataatctgacagaggacgacccggcatccgaacacggaaccattggtggtgaggcggatgacgggatcttggtttatagatatgtgcctaaggtgggagagcgcggacaagcggacgcggaatacggtgtcttcgtgccgcacgcgaacgagtccaaggtagtgccatcgaaggttctctcggttgcacgggcgagtaatgcgtccatgaccctcgacccgctggactgggaggccctgcctacattacatcacatcgtctcacggcttgccgaaattcctatctacgaggttgttagcgccaaggttgtctctggtgtgggcgtgcccgacgtttcgagcgcgcatagaattgaataggcgactgtatagtgtgattgctatcataac

SEQ ID NO: 6750 - DNA, 561 bp, Muscodor strobelii
  misc_feature: SGI cDNA ID NO. 561999
  misc_feature: Elevated expression when VOC is produced
  misc_feature: Encodes the peptide sequence at SEQ ID NO 6751
atgtccgcttcgacaaccgcagcaaaagacattcggcctatcagccgcttcatcacaacacacgatagtgatggtatcactacctttgatgaaaccatcacagaagaggcgccgtttcaaccacttcctgacggagccgagttcgctttatgctacgccactgacgagttcccagcagacatgaatagcgacaaggatctgggcacctactcgcggtaccaacagagcctccccggcatcaccatctcaacaggttcagtgctccgcgtagtcgacatgcgccccggcgcgctggcgccaatgcaccgcacggtcagcattgactacggcgtggtaatcgagggggaagtggaactcattctggactctggtgccaagcggctgatgaagcgaggtgatatctcggtgcaaagaggtacaaaccacacctggcggaatactagctcgacttcttgggcccgcatgctttacgtgctcttgccggcggtgccgataactgttgggggagctgcgcttggcgaagacacggcgtcgatccctggggtgagagcatcgacttga

SEQ ID NO: 6751 - protein, 186 aa, Muscodor strobelii
  misc_feature: SGI Peptide ID NO. 561999
  misc_feature (89)..(159): Pfam Id: PF07883 Pfam Desc: Cupin domain
  misc_feature (1)..(181): NCBI GI: 256721043 Blast Desc: NECHADRAFT_44521 [Nectria haematococca mpVI 77-13-4]
  misc_feature (5)..(186): NCBI GI: 70982682 Blast Desc: conserved [Aspergillus fumigatus Af293] gi|66844493|gb|EAL84831.1| conserved [Aspergillus fumigatus Af293]
  misc_feature (9)..(186): NCBI GI: 159122889 Blast Desc: conserved [Aspergillus fumigatus A1163]
  misc_feature (5)..(186): NCBI GI: 119488384 Blast Desc: cupin domain protein [Neosartorya fischeri NRRL 181] gi|119410853|gb|EAW20798.1| cupin domain protein [Neosartorya fischeri NRRL 181]
  misc_feature (10)..(185): NCBI GI: 46121177 Blast Desc: FG04967.1 [Gibberella zeae PH-1]
  misc_feature (11)..(175): NCBI GI: 238482137 Blast Desc: conserved [Aspergillus flavus NRRL3357] gi|220700357|gb|EED56695.1| conserved [Aspergillus flavus NRRL3357]
  misc_feature (16)..(185): NCBI GI: 256729592 Blast Desc: NECHADRAFT_83579 [Nectria haematococca mpVI 77-13-4]
  misc_feature (11)..(185): NCBI GI: 255933666 Blast Desc: Pc12g14060 [Penicillium chrysogenum Wisconsin 54-1255] gi|211582831|emb|CAP81033.1| Pc12g14060 [Penicillium chrysogenum Wisconsin 54-1255]
  misc_feature (11)..(175): NCBI GI: 189212065 Blast Desc: cupin domain containing protein [Pyrenophora tritici-repentis Pt-1C-BFP] gi|187979558|gb|EDU46184.1| cupin domain containing protein [Pyrenophora tritici-repentis
  misc_feature (1)..(186): NCBI GI: 189202976 Blast Desc: cupin domain containing protein [Pyrenophora tritici-repentis Pt-1C-BFP] gi|187984923|gb|EDU50411.1| cupin domain containing protein [Pyrenophora tritici-repentis
  misc_feature: Useful for introducing or modulating the production of volatile compounds
MSASTTAAKDIRPISRFITTHDSDGITTFDETITEEAPFQPLPDGAEFALCYATDEFPADMNSDKDLGTYSRYQQSLPGITISTGSVLRVVDMRPGALAPMHRTVSIDYGVVIEGEVELILDSGAKRLMKRGDISVQRGTNHTWRNTSSTSWARMLYVLLPAVPITVGGAALGEDTASIPGVRAST

SEQ ID NO: 6752 - DNA, 2299 bp, Muscodor strobelii
  misc_feature: SGI EST ID NO. CUFF.16813.0
  misc_feature: Variant of the nucleotide sequence at SEQ ID NO 6750
ctgatctaccggacatagtcggagtgtgtttctcttccagagcaggtccagagacgtgaagtggggaaactcatccccaacgaccttcggctcctcacgccgtatgtgggggagaggagtatctcgggcgtttgttagtatatatacgcaggtgcaatatggggactcaaatgatctgccgagtactaggtattttgtgcatttacctcctaacaggattcggccattcaagtcctcctggttgattcattatctgagagaaagtcgcactggaagctctactataattacaagagtaccaaaagcccattcgcgatctaaagcccaataacgccataatgtccgcttcgacaaccgcagcaaaagacattcggcctatcagccgcttcatcacaacacacgatagtgatggtatcactacctttgatgaaaccatcacagaagaggcgccgtttcaaccacttcctgacggagccgagttcgctttatgctacgccactgacgagttcccagcagacatgaatagcgacaaggatctgggcacctactcgcggtaccaacagagcctccccggcatcaccatctcaacaggttcagtgctccgcgtagtcgacatgcgccccggcgcgctggcgccaatgcaccgcacggtcagcattgactacggcgtggtaatcgagggggaagtggaactcattctggactctggtgccaagcggctgatgaagcgaggtgatatctcggtgcaaagaggtacaaaccacacctggcggaatactagctcgacttcttgggcccgcatgctttacgtgctcttgccggcggtgccgataactgttgggggagctgcgcttggcgaagacacggcgtcgatccctggggtgagagcatcgacttgatctatttcttgcttgacggaaaaatgattagaatctcagggcgcccgacgtcgtgcgaggaaagcaatccgagggatgcgttgggtttgaaacaaaacgtgtcagttgcagatgcagatctagacaacaattagagctagtcatcgatagagcagtctactgtctagtcacgagcaagcgacacgcttgaaaacgaagcagtcacgcacataatcagaagaattgatctctacatgctgatttagtaaataaaaagtcctccatcggcaatcaggtgtaaaccattaacccaactcgcacggggctcgcataggaaggcgacggcgaacgcaatctcctcgggcttgcccattctgtttcccacgggcgtcttttccatgacgggacgaatctttgccatgaactcctccccagcctgtgagaacccctccgtcatggtcggaccgggactcacggcgttgactgtgaccccgtacttccgcggcagctctttcgcccataccttcgtgaaactgtccaccatgcctttggtccctgcatagatggtttgcagggccggtgcttctctcgccgaaattgacacgatgttgacaattcggcctccgccgtcttttgggaaatgaggcagtgctagctgcgtcatcaagaaggtcccgcgcccattaaggttgacgagacggtcccagtcatcgagagattgctcctcgaatggcttattgatggctaaaccggcgttattgatgagaatatcgatgcgcccgaatgcctcgacagtggcgtctatcagggccttggggccctcgacgatgctcaagtctgcttcgaccgcgatgctcttcgtggtcaggccggcagttactgtttcggcttcggccttgagactcgcaaaggggtaattgatgacgacgtcggcccctcgagagcagagctcgcgagcaatctcggcgccaattccggagctggagccagtaacgattgcgaccatgttgactagcgtttgcgctaccccagccgccgccatcgccatctcgtacctagatgattgacttttatgcacgttcaaataggtatcttagtatatgagcttcgggctcgagataatgttgcagtctggcttctgagcccgaatggaggacgaacccgatacgatgattgttccctttttgtgatacgatcgacaaaacgttgatgtgtgaatatccgtacaaacaatgcataccgagactggatcatgataagagcccccgcacaaaaccctgcgcattcagctttctatagctttttagtggccgccacatcccgattataacatgtttctcaatacaagacgcaaaaatccctagatgttcgcgactccgcgaaacaacactttaagatcatggctttagatggtattaccg

SEQ ID NO: 6753 - DNA, 780 bp, Muscodor strobelii
  misc_feature: SGI cDNA ID NO. 562000
  misc_feature: Encodes the peptide sequence at SEQ ID NO 6754
atggcggcggctggggtagcgcaaacgctagtcaacatggtcgcaatcgttactggctccagctccggaattggcgccgagattgctcgcgagctctgctctcgaggggccgacgtcgtcatcaattacccctttgcgagtctcaaggccgaagccgaaacagtaactgccggcctgaccacgaagagcatcgcggtcgaagcagacttgagcatcgtcgagggccccaaggccctgatagacgccactgtcgaggcattcgggcgcatcgatattctcatcaataacgccggtttagccatcaataagccattcgaggagcaatctctcgatgactgggaccgtctcgtcaaccttaatgggcgcgggaccttcttgatgacgcagctagcactgcctcatttcccaaaagacggcggaggccgaattgtcaacatcgtgtcaatttcggcgagagaagcaccggccctgcaaaccatctatgcagggaccaaaggcatggtggacagtttcacgaaggtatgggcgaaagagctgccgcggaagtacggggtcacagtcaacgccgtgagtcccggtccgaccatgacggaggggttctcacaggctggggaggagttcatggcaaagattcgtcccgtcatggaaaagacgcccgtgggaaacagaatgggcaagcccgaggagattgcgttcgccgtcgccttcctatgcgagccccgtgcgagttgggttaatggtttacacctgattgccgatggaggactttttatttactaa

SEQ ID NO: 6754 - protein, 259 aa, Muscodor strobelii
  misc_feature: SGI Peptide ID NO. 562000
  misc_feature (13)..(180): Pfam Id: PF00106 Pfam Desc: short chain dehydrogenase
  misc_feature (9)..(258): NCBI GI: 119494099 Blast Desc: short chain type dehydrogenase [Neosartorya fischeri NRRL 181] gi|119412131|gb|EAW22072.1| short chain type dehydrogenase [Neosartorya fischeri NRRL 181]
  misc_feature (6)..(258): NCBI GI: 145256378 Blast Desc: An19g00390 [Aspergillus niger CBS 513.88] gi|134084774|emb|CAK47362.1| protein product [Aspergillus niger]
  misc_feature (9)..(258): NCBI GI: 146322696 Blast Desc: short chain dehydrogenase [Aspergillus fumigatus Af293] gi|129557796|gb|EAL91098.2| short chain dehydrogenase, [Aspergillus fumigatus Af293]
  misc_feature (9)..(258): NCBI GI: 159131872 Blast Desc: short chain dehydrogenase, [Aspergillus fumigatus A1163]
  misc_feature (8)..(258): NCBI GI: 238482143 Blast Desc: short chain dehydrogenase, [Aspergillus flavus NRRL3357] gi|220700360|gb|EED56698.1| short chain dehydrogenase, [Aspergillus flavus NRRL3357]
  misc_feature (8)..(258): NCBI GI: 169765578 Blast Desc: [Aspergillus oryzae RIB40] gi|83765115|dbj|BAE55258.1| protein product [Aspergillus oryzae]
  misc_feature (6)..(258): NCBI GI: 115436750 Blast Desc: conserved [Aspergillus terreus NIH2624] gi|114188450|gb|EAU30150.1| conserved [Aspergillus terreus NIH2624]
  misc_feature (7)..(258): NCBI GI: 256721042 Blast Desc: NECHADRAFT_44498 [Nectria haematococca mpVI 77-13-4]
  misc_feature (8)..(237): NCBI GI: 67525885 Blast Desc: AN3400.2 [Aspergillus nidulans FGSC A4] gi|40744188|gb|EAA63368.1| AN3400.2 [Aspergillus nidulans FGSC A4] gi|259485612|tpe|CBF82782.1| TPA: short chain dehydrogenase,
  misc_feature (6)..(258): NCBI GI: 189212093 Blast Desc: 3-oxoacyl-(acyl-carrier-protein) reductase 1 [Pyrenophora tritici-repentis Pt-1C-BFP] gi|187979572|gb|EDU46198.1| 3-oxoacyl-(acyl-carrier-protein) 1
  misc_feature (8)..(259): SWISSPROT Homolog: EC 1.1.1.47 Glucose 1-dehydrogenase
MAAAGVAQTLVNMVAIVTGSSSGIGAEIARELCSRGADVVINYPFASLKAEAETVTAGLTTKSIAVEADLSIVEGPKALIDATVEAFGRIDILINNAGLAINKPFEEQSLDDWDRLVNLNGRGTFLMTQLALPHFPKDGGGRIVNIVSISAREAPALQTIYAGTKGMVDSFTKVWAKELPRKYGVTVNAVSPGPTMTEGFSQAGEEFMAKIRPVMEKTPVGNRMGKPEEIAFAVAFLCEPRASWVNGLHLIADGGLFIY

SEQ ID NO: 6755 - DNA, 2299 bp, Muscodor strobelii
  misc_feature: SGI EST ID NO. CUFF.16813.0
  misc_feature: Variant of the nucleotide sequence at SEQ ID NO 6753
cggtaataccatctaaagccatgatcttaaagtgttgtttcgcggagtcgcgaacatctagggatttttgcgtcttgtattgagaaacatgttataatcgggatgtggcggccactaaaaagctatagaaagctgaatgcgcagggttttgtgcgggggctcttatcatgatccagtctcggtatgcattgtttgtacggatattcacacatcaacgttttgtcgatcgtatcacaaaaagggaacaatcatcgtatcgggttcgtcctccattcgggctcagaagccagactgcaacattatctcgagcccgaagctcatatactaagatacctatttgaacgtgcataaaagtcaatcatctaggtacgagatggcgatggcggcggctggggtagcgcaaacgctagtcaacatggtcgcaatcgttactggctccagctccggaattggcgccgagattgctcgcgagctctgctctcgaggggccgacgtcgtcatcaattacccctttgcgagtctcaaggccgaagccgaaacagtaactgccggcctgaccacgaagagcatcgcggtcgaagcagacttgagcatcgtcgagggccccaaggccctgatagacgccactgtcgaggcattcgggcgcatcgatattctcatcaataacgccggtttagccatcaataagccattcgaggagcaatctctcgatgactgggaccgtctcgtcaaccttaatgggcgcgggaccttcttgatgacgcagctagcactgcctcatttcccaaaagacggcggaggccgaattgtcaacatcgtgtcaatttcggcgagagaagcaccggccctgcaaaccatctatgcagggaccaaaggcatggtggacagtttcacgaaggtatgggcgaaagagctgccgcggaagtacggggtcacagtcaacgccgtgagtcccggtccgaccatgacggaggggttctcacaggctggggaggagttcatggcaaagattcgtcccgtcatggaaaagacgcccgtgggaaacagaatgggcaagcccgaggagattgcgttcgccgtcgccttcctatgcgagccccgtgcgagttgggttaatggtttacacctgattgccgatggaggactttttatttactaaatcagcatgtagagatcaattcttctgattatgtgcgtgactgcttcgttttcaagcgtgtcgcttgctcgtgactagacagtagactgctctatcgatgactagctctaattgttgtctagatctgcatctgcaactgacacgttttgtttcaaacccaacgcatccctcggattgctttcctcgcacgacgtcgggcgccctgagattctaatcatttttccgtcaagcaagaaatagatcaagtcgatgctctcaccccagggatcgacgccgtgtcttcgccaagcgcagctcccccaacagttatcggcaccgccggcaagagcacgtaaagcatgcgggcccaagaagtcgagctagtattccgccaggtgtggtttgtacctctttgcaccgagatatcacctcgcttcatcagccgcttggcaccagagtccagaatgagttccacttccccctcgattaccacgccgtagtcaatgctgaccgtgcggtgcattggcgccagcgcgccggggcgcatgtcgactacgcggagcactgaacctgttgagatggtgatgccggggaggctctgttggtaccgcgagtaggtgcccagatccttgtcgctattcatgtctgctgggaactcgtcagtggcgtagcataaagcgaactcggctccgtcaggaagtggttgaaacggcgcctcttctgtgatggtttcatcaaaggtagtgataccatcactatcgtgtgttgtgatgaagcggctgataggccgaatgtcttttgctgcggttgtcgaagcggacattatggcgttattgggctttagatcgcgaatgggcttttggtactcttgtaattatagtagagcttccagtgcgactttctctcagataatgaatcaaccaggaggacttgaatggccgaatcctgttaggaggtaaatgcacaaaatacctagtactcggcagatcatttgagtccccatattgcacctgcgtatatatactaacaaacgcccgagatactcctctcccccacatacggcgtgaggagccgaaggtcgttggggatgagtttccccacttcacgtctctggacctgctctggaagagaaacacactccgactatgtccggtagatcag

SEQ ID NO: 6756 - DNA, 1926 bp, Muscodor strobelii
  misc_feature: SGI cDNA ID NO. 562001
  misc_feature: Encodes the peptide sequence at SEQ ID NO 6757
atgcccgaaagaaaacgcggtcctccatctcaggcagcaattccctgggtcatatgtcaaatgaaaaactttgttagcccagcacctacacatgcagtcaagaatggtagaatcgacatcacagtagcgataacaagggtagaagacacgacggccttcgtggcaaccgtgtacggtatcctgcgggcgaactttgtcacgaatcgcgctggtgcatctctaccgccccttgtcggaaatctcgttcagctcatggtcgaccttggaaatgccggaacaaagacacctgaattaagcttcttcgctcactcattctcccagctcaaccctgagcagcgctctgagcactctgcctgggagactcctgatcctggattctggacgtccaaaggttatgccattgtgcgcgcagatgaacggggcatcggccagtctcctggcttgctggatgccatgtcccgtggaacaagtgaggcctttgtccatgtgatcgagtgggcggctgaacagccctggtcgacaggcaaagttggcctccttggcattagctattatgccggcacacagtggagagttgccgctcgcagacccaagggcttagcagccatgataccttgggaaggcatggcggactactatcgggatcggtgtcggcatggtggcatcctgtcggacaagtttattaagttttggtggcaccgacaggtcgtttctaaccaatatggtcgacctgccgacgaagccttgcagctcagcaaagacatcgacatcgccgggccgaagcgccccgagacgactgtggggacattggagggagagcttagcgccgaggagcgtgagcagtatcgcagagatcagaccgtcgacaatgtgaagaatcaattccgagatcaagagtactactcctcgaaagagtatgatctgagagacattgaggtacctctgctctcagtagccaactggggaggcatcctactgcaccttcgtggcaacatagagggctatctctttgctggatccaagcaaaaatggcttcatacgctcgtcggacgccatgatttgcctttttacttcaaagagagtgtcgcgaagcagctcagcttcttcgactgctttttgaagggcgacgaccgcgatgggtggactcaaggcaaggtcccacctgtcaccttaaccttgaggaagggagacgtcgggttcaacgatccggcggccgaggcacagttccccagtcgccatgaagcagagtggccgcttgcgagaacgcagtacatcaactacttcctgacaccggagcgacagatgacaacacatcgtcaccagctttctgacagttatacgaagttaaaatacaaggcattagggactctcgattcgcctcagctgattcagttcaccacaccagctttcgaggtcgagacagaggtcaccgggcacgtagtggctcacctcaatgtctcaataggacccgaggcaactggaagtactccgagtgacatggatttgttcatcacacttcgtcacattggccccgaaggaaaagagatcatgtatacgggtacggcaggagatccgatacccttgaccaagggctggcttcgtgtcagccttcgcaacacgaatccaaagcatcctcgccaccgaccctggcttccctggcgggactatgcctccactgacgtgcgcccagtcatcccaggcgaggtctacgccgtggacgtagagatctggccaactcaggtagtcgtctccccaggaggtaaactggtgcttgaagtgagtagcggtgacacccagggatgcggtattttccaacacagtcaccccgaagacagatctatttccaaactgtccggaaataactacatctgcttcggggcagaccgtcagaattaccttaggctgcctatcattcctccgaagtag

SEQ ID NO: 6757 - protein, 641 aa, Muscodor strobelii
  misc_feature: SGI Peptide ID NO. 562001
  misc_feature (79)..(348): Pfam Id: PF02129 Pfam Desc: X-Pro dipeptidyl-peptidase (S15 family)
  misc_feature (366)..(634): Pfam Id: PF08530 Pfam Desc: X-Pro dipeptidyl-peptidase C-terminal non-catalytic domain
  misc_feature (131)..(223): Pfam Id: PF02129 Pfam Desc: X-Pro dipeptidyl-peptidase (S15 family)
  misc_feature (48)..(641): NCBI GI: 256721032 Blast Desc: NECHADRAFT_44533 [Nectria haematococca mpVI 77-13-4]
  misc_feature (60)..(641): NCBI GI: 169596348 Blast Desc: SNOG_00932 [Phaeosphaeria nodorum SN15] gi|111071307|gb|EAT92427.1| SNOG_00932 [Phaeosphaeria nodorum SN15]
  misc_feature (59)..(641): NCBI GI: 189202978 Blast Desc: X-Pro dipeptidyl-peptidase protein [Pyrenophora tritici-repentis Pt-1C-BFP] gi|187984924|gb|EDU50412.1| X-Pro dipeptidyl-peptidase protein [Pyrenophora tritici-repentis
  misc_feature (44)..(641): NCBI GI: 49409607 Blast Desc: acyl esterase [Aspergillus flavus]
  misc_feature (44)..(638): NCBI GI: 169779757 Blast Desc: [Aspergillus oryzae RIB40] gi|83773082|dbj|BAE63210.1| protein product [Aspergillus oryzae]
  misc_feature (59)..(641): NCBI GI: 115399826 Blast Desc: ATEG_06324 [Aspergillus terreus NIH2624] gi|114191168|gb|EAU32868.1| ATEG_06324 [Aspergillus terreus NIH2624]
  misc_feature (27)..(641): NCBI GI: 159122888 Blast Desc: hydrolase, CocE/NonD family, [Aspergillus fumigatus A1163]
  misc_feature (27)..(641): NCBI GI: 70982684 Blast Desc: hydrolase, CocE/NonD family [Aspergillus fumigatus Af293] gi|66844494|gb|EAL84832.1| hydrolase, CocE/NonD family, [Aspergillus fumigatus Af293]
  misc_feature (48)..(639): NCBI GI: 256729782 Blast Desc: [Nectria haematococca mpVI 77-13-4]
  misc_feature (27)..(641): NCBI GI: 119488382 Blast Desc: X-Pro dipeptidyl-peptidase (S15 family) protein [Neosartorya fischeri NRRL 181] gi|119410852|gb|EAW20797.1| X-Pro dipeptidyl-peptidase (S15 family) protein [Neosartorya fischeri
MPERKRGPPSQAAIPWVICQMKNFVSPAPTHAVKNGRIDITVAITRVEDTTAFVATVYGILRANFVTNRAGASLPPLVGNLVQLMVDLGNAGTKTPELSFFAHSFSQLNPEQRSEHSAWETPDPGFWTSKGYAIVRADERGIGQSPGLLDAMSRGTSEAFVHVIEWAAEQPWSTGKVGLLGISYYAGTQWRVAARRPKGLAAMIPWEGMADYYRDRCRHGGILSDKFIKFWWHRQVVSNQYGRPADEALQLSKDIDIAGPKRPETTVGTLEGELSAEEREQYRRDQTVDNVKNQFRDQEYYSSKEYDLRDIEVPLLSVANWGGILLHLRGNIEGYLFAGSKQKWLHTLVGRHDLPFYFKESVAKQLSFFDCFLKGDDRDGWTQGKVPPVTLTLRKGDVGFNDPAAEAQFPSRHEAEWPLARTQYINYFLTPERQMTTHRHQLSDSYTKLKYKALGTLDSPQLIQFTTPAFEVETEVTGHVVAHLNVSIGPEATGSTPSDMDLFITLRHIGPEGKEIMYTGTAGDPIPLTKGWLRVSLRNTNPKHPRHRPWLPWRDYASTDVRPVIPGEVYAVDVEIWPTQVVVSPGGKLVLEVSSGDTQGCGIFQHSHPEDRSISKLSGNNYICFGADRQNYLRLPIIPPK

SEQ ID NO: 6758 - DNA, 3171 bp, Muscodor strobelii
  misc_feature: SGI cDNA ID NO. 562002
  misc_feature: Elevated expression when VOC is produced
  misc_feature: Encodes the peptide sequence at SEQ ID NO 6759
atgttcgagtggtacaaaaacgcccggatctgttttgcgctgttgtcagatgtcctggactgtaatgaagatgcttcagagccgcgatccagctttcgaaagagccgctggtttgacaggggatggactctacaagaactgattgcccctaagaacgtcaacttctacgatgcaaggtggagatcaataggcaataaaagcagtttggtcgccgtgcttactgacatcactttgattcctagctgggtgttgaaaggtatcgcaccagtacaacaggctagcgttgcccaacgcatgtcctgggctgcgcatcgaatcactaagcgtaaggaagacaaagcgtactgtcttttgggagtttttggcataacaatgcccctgatatatggcgagggcgataatgcgtttcttcgtctacaagaagagatagcgaaacatatcaatgacgattcgatcttggcatggaatcttagcaacaatgggttggctacgaccatggcaagtagccaagcactgactgctcgatcgagcggactattcgccaaggagccctcgaactttgaaaattgcagccgtgtcgtccgcagcaatcccaaaagccactttaatggatcactaggcccaagtcgcggtactctggtgcttcgacgcaagatgtattattcgtcagatcaacgctttatggttcttgaatgccgaatggatgaccagccattaaccgcaatagcattgcctttaaaggtctgtcccgatgcacctgacaaatctgtcagagatctcgagaaaccagccattgtggtaccgagcaacagtgtctgtgcggttgaaacaattcgtatgccaacccatttcacgcatctgagcgatgcgccaaagagagataatgctttttacattgacaacaatgtgggacaacaattggaggtagtctcagtactacctccttgtgcttgggacgagtctagcttgcaaattgtgcctaatgataaggcgtatcttggacccacgatgcatcgtgtttggatacaattcaagtcacgtacggctttggaaccagtacgcgagccagggtacgagtttgtgcattctcgtccttcgaaatacgtgactaatagttcttctcgacgaccaatacaaccttcgttccagtatgattcagatgatgaggcagagtgcgtttttgtgtcagagtcggagtcagattccgaatcgtgttcggagacgacacacgccaacttcgttctaatactagatctcgtacggggaagaccggagccagacgcccatttctatgttgtaacatgtgacgcaggcattgatttagaaacagttcagcgagatttacacaaagtgggccgagatgaggtgtttcaaaagactacgtccgctgggaatggctcagtcaacatcaacattacactgacacgagagagggtcgccgaagatgacatgtttgtcgtgcggctttctccctccaaagtgatcactgagacctacaattgcacgaaagatatacagagactccaaatggaacgagaagtggcagacttattcaatggggggcacaaagcacggagacatttagagtcgacaaaggcagcagcccacaagaaggaggtcgaattggaaccaactactaggcgattagctgaggtccgtgcaaaaattaacgaactgtgggaggaaaaagaacaattgaaacaagtagagaaatcggcatcgcgagatcaagagaagcttgctgcccggcgcgaggaatataatcgttcttttgaaagcagtatggcagaggcagagaagttggaaagccgactccagagaaaatttactgggtctacacattccggcatagatcttccagaccaagtttctgataaatgttcagagaaagcaacgaaggagctgatcgaaaagtacaaacccacagattgggtccaaagcaaatggaaaggggtagataatcccactgagaaatatttgtttgctgctgctggagttgggcatcaaccacctttccgacagttgactcgatggggtatcgacgtcaacatgagaaatcctgaaggcgaaagcctcatcaccattgcggcgataggaggcgaaccagcaattgtaacaacgctcctcactctaggggcaaacactataccggaagacggcgcaatgtcagccttacttgcggccagctggagcggcaatcctaagaccgttgagttactcttgaatcatgatggtgcagctacgttaaactcaaagacgacctgggacaatcccctggggatcgctgcctctagtggtaatacacccgtgatcgacctgctgctgaggttcggcgccgatatcaatgataacaaggctgtgaggaacaatgagaccgcgttaatgggcgcagccagacatggctttggagatgctgtgctccatcttctgggctgtggagcagatcaaacagtaaggaaccctgctgaattacccgtgcagcccaatagtacgaagccagacgttatgcaaaacgacaagctagacggtgtacaacacaataagcaacgcgacgagccagatggtacgcaacacgacaagcaacacgataagaagcatcacaagaagcaacacaagcgcaacaaggaaccaaatgagcagcaagacgagcgaatgcagaaccattaccaacaggagcagctacaggaacagtacgggcacgagcaacgccaagaagagtaccaagacgaacagtggcaaggacagtaccagagtgagcagcgacaagaagagtactacgaagacgagcactacgaggatgagcaacgacaagacgcgtacgaatacgaggatcatcagggagagtacgaaaatgagcagcaccagcaccagcaccagcagcaatctgtgatggagcaccatgttacgccacagcaggcaatgcaacattacaaaccagaaagcagaatgaaaccgcagcaattacaacatcgactcgaacaacaaggcgcgccacaaattgggaatccaaattgggcattctaccatgaaatccgacaacaagcagacgggcagcaggtcgaaatacaaataatgagaccggaacacggaacagaaactggctattatcctcaaaggtctgagaatgcgcgctcgggtctagaatatgctgcggatgcccttctacagtag

SEQ ID NO: 6759 - protein, 1056 aa, Muscodor strobelii
  misc_feature: SGI Peptide ID NO. 562002
  misc_feature (789)..(821): Pfam Id: PF00023 Pfam Desc: Ankyrin repeat
  misc_feature (28)..(46): Pfam Id: PF06985 Pfam Desc: Heterokaryon incompatibility protein (HET)
  misc_feature (1)..(345): NCBI GI: 238507085 Blast Desc: conserved [Aspergillus flavus NRRL3357] gi|220689457|gb|EED45808.1| conserved [Aspergillus flavus NRRL3357]
  misc_feature (1)..(246): NCBI GI: 46139697 Blast Desc: FG11363.1 [Gibberella zeae PH-1]
  misc_feature (1)..(346): NCBI GI: 145244357 Blast Desc: An11g06570 [Aspergillus niger] gi|134079325|emb|CAK96954.1| protein product [Aspergillus niger]
  misc_feature (1)..(244): NCBI GI: 238485594 Blast Desc: ankyrin repeat-containing protein, [Aspergillus flavus NRRL3357] gi|220698914|gb|EED55253.1| ankyrin repeat-containing protein, [Aspergillus flavus NRRL3357]
  misc_feature (1)..(232): NCBI GI: 169786143 Blast Desc: [Aspergillus oryzae RIB40] gi|83776280|dbj|BAE66399.1| protein product [Aspergillus oryzae]
  misc_feature (1)..(247): NCBI GI: 238492441 Blast Desc: ankyrin repeat-containing protein, [Aspergillus flavus NRRL3357] gi|220695951|gb|EED52293.1| ankyrin repeat-containing protein, [Aspergillus flavus NRRL3357]
  misc_feature (1)..(189): NCBI GI: 261354085 Blast Desc: HET domain-containing protein [Verticillium albo-atrum VaMs.102]
  misc_feature (1)..(247): NCBI GI: 169782792 Blast Desc: [Aspergillus oryzae RIB40] gi|83774602|dbj|BAE64725.1| protein product [Aspergillus oryzae]
  misc_feature (1)..(201): NCBI GI: 256722404 Blast Desc: NECHADRAFT_44368 [Nectria haematococca mpVI 77-13-4]
  misc_feature (1)..(260): NCBI GI: 256720502 Blast Desc: NECHADRAFT_55867 [Nectria haematococca mpVI 77-13-4]
  misc_feature: Useful for introducing or modulating the production of volatile compounds
MFEWYKNARICFALLSDVLDCNEDASEPRSSFRKSRWFDRGWTLQELIAPKNVNFYDARWRSIGNKSSLVAVLTDITLIPSWVLKGIAPVQQASVAQRMSWAAHRITKRKEDKAYCLLGVFGITMPLIYGEGDNAFLRLQEEIAKHINDDSILAWNLSNNGLATTMASSQALTARSSGLFAKEPSNFENCSRVVRSNPKSHFNGSLGPSRGTLVLRRKMYYSSDQRFMVLECRMDDQPLTAIALPLKVCPDAPDKSVRDLEKPAIVVPSNSVCAVETIRMPTHFTHLSDAPKRDNAFYIDNNVGQQLEVVSVLPPCAWDESSLQIVPNDKAYLGPTMHRVWIQFKSRTALEPVREPGYEFVHSRPSKYVTNSSSRRPIQPSFQYDSDDEAECVFVSESESDSESCSETTHANFVLILDLVRGRPEPDAHFYVVTCDAGIDLETVQRDLHKVGRDEVFQKTTSAGNGSVNINITLTRERVAEDDMFVVRLSPSKVITETYNCTKDIQRLQMEREVADLFNGGHKARRHLESTKAAAHKKEVELEPTTRRLAEVRAKINELWEEKEQLKQVEKSASRDQEKLAARREEYNRSFESSMAEAEKLESRLQRKFTGSTHSGIDLPDQVSDKCSEKATKELIEKYKPTDWVQSKWKGVDNPTEKYLFAAAGVGHQPPFRQLTRWGIDVNMRNPEGESLITIAAIGGEPAIVTTLLTLGANTIPEDGAMSALLAASWSGNPKTVELLLNHDGAATLNSKTTWDNPLGIAASSGNTPVIDLLLRFGADINDNKAVRNNETALMGAARHGFGDAVLHLLGCGADQTVRNPAELPVQPNSTKPDVMQNDKLDGVQHNKQRDEPDGTQHDKQHDKKHHKKQHKRNKEPNEQQDERMQNHYQQEQLQEQYGHEQRQEEYQDEQWQGQYQSEQRQEEYYEDEHYEDEQRQDAYEYEDHQGEYENEQHQHQHQQQSVMEHHVTPQQAMQHYKPESRMKPQQLQHRLEQQGAPQIGNPNWAFYHEIRQQADGQQVEIQIMRPEHGTETGYYPQRSENARSGLEYAADALLQ

SEQ ID NO: 6760 - DNA, 1077 bp, Muscodor strobelii
  misc_feature: SGI cDNA ID NO. 562003
  misc_feature: Elevated expression when VOC is produced
  misc_feature: Encodes the peptide sequence at SEQ ID NO 6761
atggatccgaaaaattctagcaatctctccttcatcctcaacaaaccgaaagacgtatccttctcagagcgcgatgttccgaccctgaaagacgagcacgatgttctagtcggtatcaactacacaggtatctgtggcagcgatgtccactactggcaagatggcgcaatcggccacttcgttgtcaaagaccccatggttttgggccacgaatcagctggtaccgttgtccaggttggatccgccgtgacatctctgaaagctggtgatcgcgttgccctcgagcccggatatccctgtcgtcgctgtgcgccctgcctctcgggccattataacctctgtcccgaaatgaaattcgccgcgacgcccccctacaacggaacgctcacagggttctggacggcacccgcagatttctgctataaactacccgaatcagtatcgcttcaagagggcgcattgattgagcctttagcggttgcagtacacattgtccgccaagctgttgtagtgcccggtcaatcggtcgtcgtaatgggcgctgggcctgtcggcttgctctgcgcagctgttgcaggcgcccacggcgcaacgacggtcgtctccgtcgacatcgtgcaatccaaactggacttcgctaaatccttctgttccacacatatatacactagtcaacgtactagcgccgaggaaaacgcaaagaacatcaaggatctcgcagggctcccggacggcgcggatgtggtcatcgacgcaagcggtgcggagcctagtatccagacctctctgcacaccgttcgaatgggcggcacttacgtccaaggaggcatgggcaagtccgacatcaatttcccgatcatggctatgtgcctcaaggaagtgactgcgaaaggtagtttccggtacggaagtggagactacaagcttgctgttgagcttgtggccagcggcaaagtcgatgtgaagaagttgattagcgatgttgtacagttcaaggaggcagaggaggcattcaagaaggttcttaagggtgaggttatcaaggtcttgattgctggtccgaatgagaaggcttga

SEQ ID NO: 6761 - protein, 358 aa, Muscodor strobelii
  misc_feature: SGI Peptide ID NO. 562003
  misc_feature (32)..(143): Pfam Id: PF08240 Pfam Desc: Alcohol dehydrogenase GroES-like domain
  misc_feature (172)..(316): Pfam Id: PF00107 Pfam Desc: Zinc-binding dehydrogenase
  misc_feature (6)..(357): NCBI GI: 116182670 Blast Desc: conserved [Chaetomium globosum CBS 148.51] gi|88186260|gb|EAQ93728.1| conserved [Chaetomium globosum CBS 148.51]
  misc_feature (6)..(357): NCBI GI: 171694834 Blast Desc: protein product [Podospora anserina] gi|170947659|emb|CAP59821.1| protein product [Podospora anserina]
  misc_feature (7)..(357): NCBI GI: 28394778 Blast Desc: AF428150_1 xylitol dehydrogenase [Hypocrea jecorina]
  misc_feature (6)..(357): NCBI GI: 261361357 Blast Desc: sorbitol dehydrogenase [Verticillium albo-atrum VaMs.102]
  misc_feature (6)..(357): NCBI GI: 46120550 Blast Desc: FG04922.1 [Gibberella zeae PH-1]
  misc_feature (6)..(357): NCBI GI: 256734906 Blast Desc: [Nectria haematococca mpVI 77-13-4]
  misc_feature (1)..(356): NCBI GI: 85115060 Blast Desc: NCU00891 [Neurospora crassa OR74A] gi|28926601|gb|EAA35571.1| NCU00891 [Neurospora crassa OR74A]
  misc_feature (2)..(357): NCBI GI: 156054260 Blast Desc: SS1G_05978 [Sclerotinia sclerotiorum 1980] gi|154703758|gb|EDO03497.1| SS1G_05978 [Sclerotinia sclerotiorum 1980]
  misc_feature (4)..(357): NCBI GI: 145614058 Blast Desc: MGG_01176 [Magnaporthe grisea 70-15] gi|145021034|gb|EDK05163.1| MGG_01176 [Magnaporthe grisea 70-15]
  misc_feature (2)..(357): NCBI GI: 154303353 Blast Desc: xylitol dehydrogenase [Botryotinia fuckeliana B05.10] gi|150854988|gb|EDN30180.1| xylitol dehydrogenase [Botryotinia fuckeliana B05.10]
  misc_feature (5)..(354): SWISSPROT Homolog: EC 1.1.1.14 L-iditol 2-dehydrogenase
  misc_feature: Useful for introducing or modulating the production of volatile compounds
MDPKNSSNLSFILNKPKDVSFSERDVPTLKDEHDVLVGINYTGICGSDVHYWQDGAIGHFVVKDPMVLGHESAGTVVQVGSAVTSLKAGDRVALEPGYPCRRCAPCLSGHYNLCPEMKFAATPPYNGTLTGFWTAPADFCYKLPESVSLQEGALIEPLAVAVHIVRQAVVVPGQSVVVMGAGPVGLLCAAVAGAHGATTVVSVDIVQSKLDFAKSFCSTHIYTSQRTSAEENAKNIKDLAGLPDGADVVIDASGAEPSIQTSLHTVRMGGTYVQGGMGKSDINFPIMAMCLKEVTAKGSFRYGSGDYKLAVELVASGKVDVKKLISDVVQFKEAEEAFKKVLKGEVIKVLIAGPNEKA

SEQ ID NO: 6762 - DNA, 1451 bp, Muscodor strobelii
  misc_feature: SGI EST ID NO. CUFF.16846.0
  misc_feature: Variant of the nucleotide sequence at SEQ ID NO 6760
cgacaacgcatgatgtgtttgtttcgctcagagtgagcgcgaaaataaaattcagaaatcatattcattgaaactgtcatcaagctgaacttcgtactaaattttctgtgccctacacctgtgtaactctcgtctgtgacgcaacatcccactatcgcgagaatctccattgactctcccgcttctccgtcgcaactcaaaatctcaacgcccagcccacctagcaatggatccgaaaaattctagcaatctctccttcatcctcaacaaaccgaaagacgtatccttctcagagcgcgatgttccgaccctgaaagacgagcacgatgttctagtcggtatcaactacacaggtatctgtggcagcgatgtccactactggcaagatggcgcaatcggccacttcgttgtcaaagaccccatggttttgggccacgaatcagctggtaccgttgtccaggttggatccgccgtgacatctctgaaagctggtgatcgcgttgccctcgagcccggatatccctgtcgtcgctgtgcgccctgcctctcgggccattataacctctgtcccgaaatgaaattcgccgcgacgcccccctacaacggaacgctcacagggttctggacggcacccgcagatttctgctataaactacccgaatcagtatcgcttcaagagggcgcattgattgagcctttagcggttgcagtacacattgtccgccaagctgttgtagtgcccggtcaatcggtcgtcgtaatgggcgctgggcctgtcggcttgctctgcgcagctgttgcaggcgcccacggcgcaacgacggtcgtctccgtcgacatcgtgcaatccaaactggacttcgctaaatccttctgttccacacatatatacactagtcaacgtactagcgccgaggaaaacgcaaagaacatcaaggatctcgcagggctcccggacggcgcggatgtggtcatcgacgcaagcggtgcggagcctagtatccagacctctctgcacaccgttcgaatgggcggcacttacgtccaaggaggcatgggcaagtccgacatcaatttcccgatcatggctatgtgcctcaaggaagtgactgcgaaaggtagtttccggtacggaagtggagactacaagcttgctgttgagcttgtggccagcggcaaagtcgatgtgaagaagttgattagcgatgttgtacagttcaaggaggcagaggaggcattcaagaaggttcttaagggtgaggttatcaaggtcttgattgctggtccgaatgagaaggcttgagtgaattgagcttcacgatggtatagagtcatttcccgaatacgaattgtggcccacgtgatcatcgaaagcaagttgtttgtacttataacataagtgaactatagagtagtgctatctgtactccattaatgaatcccgattgttg

SEQ ID NO: 6763 - DNA, 7203 bp, Muscodor strobelii
  misc_feature: SGI cDNA ID NO. 562004
  misc_feature: Encodes the peptide sequence at SEQ ID NO 6764
atgcccggacttgtaagatcctcgagaacaccttcgccctcctggttcgaagtcggagccgagctgaacagcgactccagcatatctaatggcgactacccggcaacgcaattccctggttatgcagaaaagccactacaggaacaactggagcctatcgctgtggttggaatgggttgccgcttgccgggtgatgtcagctccccttcccaattctgggacatgttagtcgaaaagaagacgggaaacacgccaaaggtgccggcctcgagattcaacatcgatgcccattttcacagaaacaatgatcgccctggcagcttcggcgtgttgggcggttatttcctgaaccaggatctgtctgattttgaccctggcctttttggcatgactccaatagaagccatgtggatggacccccagcaacgaaaactgctcgaggtcgtctatgggaccctcgagtcgggaggtatctcgatccactccatcgcaggctcacgtacagctgtattcgcggccagtttcattgccgattggcagcagatgtctttcaaagagcagtcttttcgacacagcttgtcggctaccggggtcgatccgggcatcataagcaatcgcattagccatgtctttaacctcaatggtccgagcattatgtgtaataccgcctgttcctcatcagtatatgcgcttcataacgcttgtaatgcgctccgcaacagagaagccgagggcgcaattgtcggcggtgtgaacctcattattaccgtcgaccagcatatgaatacggctaagctcggggttctttcaccaacgtcgacctgccacacgtttgacgagcgcgctgatgggtatggacgcgccgatgcagttggtgcggtctaccttaaacgattgtctgatgccatccgcgatggggaccctattcgcggtgtaattcggacgagtgccgtcaactccaacgggaaggtccccgcagtaggtatcactcatccaaatcgtgatggccaggccgatgttattacacaggcttataagcgtggcggggatctcgatccccgtctgactggctatttcgaatgccatggtacaggaacggccatcggcgaccctctcgaggttcacgcaggtggggacattttcagctcgcctcaatcttccagctccttatcgatggccatgaacaagcaacgtgaacgaacagacgatgctctatggattggagctgtaaagaccaatattggacacagtgaagctgcgagtggcatttcagcacttataaaggcaatcctcatcgtcgaaagaggtattattccaccaacgcgtggtttggtgaccccaaaccctaagatcaaatgggatgaatggaaagtcagggtaaattcggaacctgttccgtttccgagtgccctgcccgtcagacgagtttcgctcaactcatttggctacggtggtacaaatgcccatctcgttgttgaagatgcccactcctttcttggatgtggcaatcagaccatcaagtacttcgacaagaacgcgcagcgcagcgctcgcagccttcctcggcgcgttcttcaacgcaagcgagcctttttccttctgttctccgcccacgacaagcctacactgaagaggaacattgacgcctatggcaaggtggcaagtaactataatctgattgacttgtcatatacactagcgaatcgccgcagtcaactacaaagccgtgcatttgctatcgccagccatgatacgctcgctcaagtcttcggcaacaccgcctcatcattcgaatttgcggaaaacacggcaaaccctactctgggttttgtattcacggggcaggggtcgcaatgggcgcggatgggtgcggaactaatggagtactacccaagcttcttgcgttttatacgcgtccttgatttggccctagaggagcttcccgacgtgccagattggtccattgaggacgctctacttgaggatgcggagagctcacgagtcaatgaagcgagccactcgcaaccgctgtgtacggcggttcaaattgctcttgttcagcttctcgatcagtggggcatccgacctgtagttgcagtgggccattcctcgggcgaaattgcagctgcatatactgccggactcgtctcggcgaaagaggccataattgcggcctactaccgcggcaaggtcgcgcaaaatattactacagatggctcaatgctcgctgtcggactcggtgcggaagatgttgcagagtatctcacagatgtgcagggaacagttgtagttgggtgtcataactcaccttcgagcgtcaccctcagtggtgataccgacgctctagagactgttaaagctctacttgatgccaaaggtatattcacgcgagccgtacaaaccgggaaggcgtaccactcacaccacatgaaagccgtctcgtcggaatacgaaacgttagttcggaatgccaatcttgtcgtctcctcggatgcttcaatcgtgacatctgctcagatggtctcatcagtaacaggcaaagtattcccagcgaatacagaaataaatgaaacatactggagtgccaacttgacgcacccggtgcttttcaaccaggccgttcagaccatattaaccgattccagctttgcagatgtcaacattctggtcgagattggtcctcattctgccatgagcggtccgattaagcagatcaaggcacatatgaacgatggtaagattcattacttgccgacgttagtacgagggaaaaattcggctgtccagactctgaatcttgtaggacagctattcctccatcgataccctgtcgacatggaccgggccacagctgtcgaggaactatcagtcaattccaagttacaagtcacaaagggctcaattatcgtcgacctccctccctatcagtggaactataccaagccgttctgggccgagagccgcgcaagccacgagcaccgccttccgcaattccctagacacgatgtactcggccagcgtgtcataggctcgtcacttgccgaaccgacctggagaaacgtacttcgtgcaaaggaccttccgtggcttagagatcattgtctcggtggcgaatgggtattccctgccgcaggctaccttgccatggcaatagaggcgattacgcaattaaaggaaatggacgtcgatcgaagtgttgaaatcgagagctatgtggtgcgagacatttcaatcaaaaaggcgttggtgacgccagatgatgacaacggtatcgaagttctgtttaatatacgatcttcggtgcaaaacgaatcagcctccgatgtgatttggtgggactttagtgtttcctcaatcgacgacagcggtgacaaaaaggatcactgtgccggcagtgtcagcatcaacacacgctgccgcggaaaaacaccaagacctatcccattgtttacgcagcgagcaagcggcaaggcttggaatgaagcactaagagatgtcggctttgattacggcccgacattccaagacatggatgatatacgatttgacgggaggaactacgaggcacgctgctctactgctgtgaaaaatcaggtcgacgaaagccttggagaatcacgctatgctttgcatccagcgtcggtcgactccacgctacagcttagtattgctgccatttatgcaggccgaactaacgccatgaattgcggcgttgttccagtccaaatcgaagaagtggcaatatggccacccactccatatcaattgaaggctcagaaagcgacggcatatgcttgggttgaccaacgaggataccgcgcattccagaacagtgtccagatgctagcgggagacggcgaaatggtcatggaaataaccaacgtgcgcactaccagctatgaggcagcagtgcccccgaaggcagagactatgctctctgatgctccattcggcgaaatgaagtggcaactcgatatagatagccttgattcctcggacatcgaggagatttgcgatgttgttgacctagctttattcaagagtccgggcatcaagatcatcgagatgggttgtcgatacgcaacgcagatcttaggtagatctccaaacagctcgtatacttgtcttctcacctcggacaatggctttaaggatttgacttcagctgttaaggttcatcccggggctagggtcgtcaaactcgatgacacgcagattgctgatgatcagcccttagagttaggatcgtttgacataatcatcgtttcagataccacagaacgggatttggcagttctctctcgactccgtgaaactctcaaagacaaagctcgtgttctctggaactttgcgtctgacaaatcctctatgatagaaaggcaacttggaccctttgatcatattttgaagggaacatcgggcattgcgattggtcaattgcccttctcaacttcaagagaggacacggttggaagtgacccgggacggaaggttcagcttgtgtatcgctcagttcagagcccaatcgtttcgcaggttgaatccattttgaaacatttaggatgggatgtcacgatctttcatctcgatgactgtcgcactatcaacaccttgacccatgtaattctgctcgccgacttcgaaggcccacttcttctcactttggaggaagagggattttcggcaatccagaacattatgaattccacgagttctctcctttgggtctctccgagtgacgttctacaagggagaaagcccgcttatgacatgatactcgggttgatcagggccatcacttccgagcaagcatcgattgatattcgaaccctagccgttgacgtagggaacaataccgtagaacaggtcgtctcatcgatcacgcgacttgcccagaaacaggtgcttcaacatgaggtctccccagagcgtgaactgcgcatatttcgcggaaagacctacattagtcgtctgctacggaacgaagaactgaataacctcacttccaatagtctcacgaaagaaccggtcgacttgcggccgggtatgctattcaacgggagagttgcgaaaggtcaagtcctatttcagcagcaacatctcggcgtcgtagacatagaacctggccacgtcgagctcgaggtcgaatgcgctgctctcacaaaggaaggagttcgcgtgatcgcggaggcagactatcccaccactttcagccacgcgattggtggcgtcgtgaaatcagttggacctaacgtcaaatcactcaaggtcggtgacaaggtaatcgggctccacgccaatacgctcgcgaatgttcaacaggtaccggctattaatctccatgccgttgcacttggggataaattggacgaaacggtcagtatgctcatgccgtatgctgaagccgtgtacggtcttaaggttctggccacgctccagcccggggaaactgttcttgtgctcagcgggaccggcgccggcgggctcgctgcagtcaaggtggcgcagagtttgggagcaaatgtgtatgtggctacagattcagaagatgaggcacgatttttaagccaggcattccagcttgatcccagtgccgtaatcaaggctggggacgggctcttgcgcgacagacttgatcagctttcagaccattgcgtagtggacgttgtctttagcagtgcttatgtggatcgccaactatctcacgacgcctggcgatgcatcgccccctttggccgcttcatacacggtggtcggaaggacgtcttgagtcgcaattcaattgacattgtcccttcgcaacgcggcgctagctacatgtctttcgacatcgttgagatgtgtgcggcccgccctgacatcctgctggacatagccgctgctgcgatacaagagtccgcacattccctgctcgggccgccgacaacagtcagcattgcagatatcaataccgccgtttctacattctctaacacttttgctgcttcctactgtcctacagtcgtgacatacgacacacaagtcccgataccgatccttcctgccaaaacgcctctccgtttcagccccgaccacacgtatttccttgttgggtgtctaggcggtatcgggcgtagcctaaccgcgtggatgatggagtccggtgccagaagattcacgttcctatcgcggagcggcaccgactcgaagtctgcttctcagctagttcgcaacatcgagcaagcaggggcgattgttcaagtcgtacggggcaacgcaaactctgtccaggatgtctccagggctgtgcgcgaagtgtcgccagaacacccaatcaaaggtgtaattcatgctgcaatggtgctgcgggacggtcttttccagtcgatgagcttcgaaaactggagacagtcaattgaacccaaggttctgggtgccatgaacctcgatgcagcgttaaacgacacgcccctcgacttcttcatcatgaccagctcagtctcgggcattctcggtacaccggcacagagcaactacgccgcaggcaacagcttcctcgattcgcttgctcgccaccggcggagccgagggcttgcggcgacttctatcatcctgcccatggtactcggcgtaggtgtcgtagctgagaacacacagctggagcagtcattgaaaagcaaaggaatgtatggaatcgatgaggagcatcttttggagtcctttgaagccgctatccgctcgcaacagctggaccccgtcccaagccaggtcgtagtagggctcgaccccgccaagctgcagaaatcccttggcgataccagcgaaacgaccagtttctggatggatgatgtacgcctcagccacatcgtcaatgacatggccgtttccaaggctgatgcagggagggtcggggcgcagagcattcttgcgacgatgctcaatgccgagtcgccacgcgaggctatcagcgccgtcgttgagcatttcgccaacaagctagctcgcatgctactcttgcctcaagaagcttttgaccctgatagcaagtcagtcgctgattacggtattgacagtatggttggcgccgagttgcgcagctggatcttcaaggagtatcgcttggatattgcctttcaacagctgttgggctctacatttactatcagaaaatttgcgactcaggtttgcgaggcacatggtatctctcttcaaaaagacacttga

SEQ ID NO: 6764 - protein, 2400 aa, Muscodor strobelii
  misc_feature: SGI Peptide ID NO. 562004
  misc_feature (609)..(944): Pfam Id: PF00698 Pfam Desc: Acyl transferase domain
  misc_feature (2025)..(2191): Pfam Id: PF00106 Pfam Desc: short chain dehydrogenase
  misc_feature (51)..(302): Pfam Id: PF00109 Pfam Desc: Beta-ketoacyl synthase, N-terminal domain
  misc_feature (310)..(445): Pfam Id: PF02801 Pfam Desc: Beta-ketoacyl synthase, C-terminal domain
  misc_feature (2026)..(2204): Pfam Id: PF08659 Pfam Desc: KR domain
  misc_feature (610)..(813): Pfam Id: PF00698 Pfam Desc: Acyl transferase domain
  misc_feature (1814)..(1853): Pfam Id: PF00107 Pfam Desc: Zinc-binding dehydrogenase
  misc_feature (398)..(445): Pfam Id: PF02801 Pfam Desc: Beta-ketoacyl synthase, C-terminal domain
  misc_feature (310)..(376): Pfam Id: PF02801 Pfam Desc: Beta-ketoacyl synthase, C-terminal domain
  misc_feature (1)..(2394): NCBI GI: 242793230 Blast Desc: polyketide synthase, [Talaromyces stipitatus ATCC 10500] gi|218718708|gb|EED18128.1| polyketide synthase, [Talaromyces stipitatus ATCC 10500]
  misc_feature (28)..(2397): NCBI GI: 242823008 Blast Desc: polyketide synthase, [Talaromyces stipitatus ATCC 10500] gi|218712925|gb|EED12350.1| polyketide synthase, [Talaromyces stipitatus ATCC 10500]
  misc_feature (1)..(2395): NCBI GI: 255953389 Blast Desc: Pc21g03990 [Penicillium chrysogenum Wisconsin 54-1255] gi|211589158|emb|CAP95296.1| Pc21g03990 [Penicillium chrysogenum Wisconsin 54-1255]
  misc_feature (26)..(2397): NCBI GI: 240110610 Blast Desc: polyketide synthase, [Coccidioides posadasii C735 delta SOWgp]
  misc_feature (26)..(2397): NCBI GI: 119196047 Blast Desc: CIMG_02398 [Coccidioides immitis RS]
  misc_feature (43)..(2398): NCBI GI: 269996426 Blast Desc: polyketide synthase [Alternaria brassicicola]
  misc_feature (22)..(1775): NCBI GI: 258575337 Blast Desc: UREG_01366 [Uncinocarpus reesii 1704] gi|237902116|gb|EEP76517.1| UREG_01366 [Uncinocarpus reesii 1704]
  misc_feature (43)..(2394): NCBI GI: 242783828 Blast Desc: polyketide synthase, [Talaromyces stipitatus ATCC 10500] gi|218720411|gb|EED19830.1| polyketide synthase, [Talaromyces stipitatus ATCC 10500]
  misc_feature (43)..(2394): NCBI GI: 212545621 Blast Desc: polyketide synthase, [Penicillium marneffei ATCC 18224] gi|210064484|gb|EEA18579.1| polyketide synthase, [Penicillium marneffei ATCC 18224]
  misc_feature (58)..(2394): NCBI GI: 115387133 Blast Desc: ATEG_01894 [Aspergillus terreus NIH2624] gi|114195156|gb|EAU36856.1| ATEG_01894 [Aspergillus terreus NIH2624]
  misc_feature (51)..(1250): SWISSPROT Homolog: EC 2.3.1.161 Lovastatin nonaketide synthase
  misc_feature: Useful for fungicidal and/or biocontrol applications
MPGLVRSSRTPSPSWFEVGAELNSDSSISNGDYPATQFPGYAEKPLQEQLEPIAVVGMGCRLPGDVSSPSQFWDMLVEKKTGNTPKVPASRFNIDAHFHRNNDRPGSFGVLGGYFLNQDLSDFDPGLFGMTPIEAMWMDPQQRKLLEVVYGTLESGGISIHSIAGSRTAVFAASFIADWQQMSFKEQSFRHSLSATGVDPGIISNRISHVFNLNGPSIMCNTACSSSVYALHNACNALRNREAEGAIVGGVNLIITVDQHMNTAKLGVLSPTSTCHTFDERADGYGRADAVGAVYLKRLSDAIRDGDPIRGVIRTSAVNSNGKVPAVGITHPNRDGQADVITQAYKRGGDLDPRLTGYFECHGTGTAIGDPLEVHAGGDIFSSPQSSSSLSMAMNKQRERTDDALWIGAVKTNIGHSEAASGISALIKAILIVERGIIPPTRGLVTPNPKIKWDEWKVRVNSEPVPFPSALPVRRVSLNSFGYGGTNAHLVVEDAHSFLGCGNQTIKYFDKNAQRSARSLPRRVLQRKRAFFLLFSAHDKPTLKRNIDAYGKVASNYNLIDLSYTLANRRSQLQSRAFAIASHDTLAQVFGNTASSFEFAENTANPTLGFVFTGQGSQWARMGAELMEYYPSFLRFIRVLDLALEELPDVPDWSIEDALLEDAESSRVNEASHSQPLCTAVQIALVQLLDQWGIRPVVAVGHSSGEIAAAYTAGLVSAKEAIIAAYYRGKVAQNITTDGSMLAVGLGAEDVAEYLTDVQGTVVVGCHNSPSSVTLSGDTDALETVKALLDAKGIFTRAVQTGKAYHSHHMKAVSSEYETLVRNANLVVSSDASIVTSAQMVSSVTGKVFPANTEINETYWSANLTHPVLFNQAVQTILTDSSFADVNILVEIGPHSAMSGPIKQIKAHMNDGKIHYLPTLVRGKNSAVQTLNLVGQLFLHRYPVDMDRATAVEELSVNSKLQVTKGSIIVDLPPYQWNYTKPFWAESRASHEHRLPQFPRHDVLGQRVIGSSLAEPTWRNVLRAKDLPWLRDHCLGGEWVFPAAGYLAMAIEAITQLKEMDVDRSVEIESYVVRDISIKKALVTPDDDNGIEVLFNIRSSVQNESASDVIWWDFSVSSIDDSGDKKDHCAGSVSINTRCRGKTPRPIPLFTQRASGKAWNEALRDVGFDYGPTFQDMDDIRFDGRNYEARCSTAVKNQVDESLGESRYALHPASVDSTLQLSIAAIYAGRTNAMNCGVVPVQIEEVAIWPPTPYQLKAQKATAYAWVDQRGYRAFQNSVQMLAGDGEMVMEITNVRTTSYEAAVPPKAETMLSDAPFGEMKWQLDIDSLDSSDIEEICDVVDLALFKSPGIKIIEMGCRYATQILGRSPNSSYTCLLTSDNGFKDLTSAVKVHPGARVVKLDDTQIADDQPLELGSFDIIIVSDTTERDLAVLSRLRETLKDKARVLWNFASDKSSMIERQLGPFDHILKGTSGIAIGQLPFSTSREDTVGSDPGRKVQLVYRSVQSPIVSQVESILKHLGWDVTIFHLDDCRTINTLTHVILLADFEGPLLLTLEEEGFSAIQNIMNSTSSLLWVSPSDVLQGRKPAYDMILGLIRAITSEQASIDIRTLAVDVGNNTVEQVVSSITRLAQKQVLQHEVSPERELRIFRGKTYISRLLRNEELNNLTSNSLTKEPVDLRPGMLFNGRVAKGQVLFQQQHLGVVDIEPGHVELEVECAALTKEGVRVIAEADYPTTFSHAIGGVVKSVGPNVKSLKVGDKVIGLHANTLANVQQVPAINLHAVALGDKLDETVSMLMPYAEAVYGLKVLATLQPGETVLVLSGTGAGGLAAVKVAQSLGANVYVATDSEDEARFLSQAFQLDPSAVIKAGDGLLRDRLDQLSDHCVVDVVFSSAYVDRQLSHDAWRCIAPFGRFIHGGRKDVLSRNSIDIVPSQRGASYMSFDIVEMCAARPDILLDIAAAAIQESAHSLLGPPTTVSIADINTAVSTFSNTFAASYCPTVVTYDTQVPIPILPAKTPLRFSPDHTYFLVGCLGGIGRSLTAWMMESGARRFTFLSRSGTDSKSASQLVRNIEQAGAIVQVVRGNANSVQDVSRAVREVSPEHPIKGVIHAAMVLRDGLFQSMSFENWRQSIEPKVLGAMNLDAALNDTPLDFFIMTSSVSGILGTPAQSNYAAGNSFLDSLARHRRSRGLAATSIILPMVLGVGVVAENTQLEQSLKSKGMYGIDEEHLLESFEAAIRSQQLDPVPSQVVVGLDPAKLQKSLGDTSETTSFWMDDVRLSHIVNDMAVSKADAGRVGAQSILATMLNAESPREAISAVVEHFANKLARMLLLPQEAFDPDSKSVADYGIDSMVGAELRSWIFKEYRLDIAFQQLLGSTFTIRKFATQVCEAHGISLQKDT

SEQ ID NO: 6765 - DNA, 1821 bp, Muscodor strobelii
  misc_feature: SGI cDNA ID NO. 562005
  misc_feature: Encodes the peptide sequence at SEQ ID NO 6766
atgtctgacgagatcgagacgtttgacgtcgtcgttgtgggggctggttggaatggattgatcgctgctaaaacctatctcgacttcatacccagtgcaaatattgtgttgcttgatgatcaagcatcgatcggtggagtttggtgcgatgagaaaatctatccgagcctgtacgcccagatcaaatacggccagttcgaatacagcttctatcccatgcagaatgagggcgtcacggccgacgggtacatatctggatatacaatcaacagatacctaaataactttgcacgagacttcaatctagtgcaaagaacccgccttcgtacaatagtcgtcaaggtgcaccggctttctggaggcgggtggcagcttgacctcgctggcaaagcctcaatcaagtgcacgaagctcgtatacgcttctggggcaacctctcacccagtcatcccatcttggccaacctcatctgagttccgtgcgcctatcatccactcttccgaactcggaactcatctcactcaactagagaagatacagacggtgacagtagttggtgctgcaaagtctgcgtatgatactgtgtttcatctccttaagcgcggaaagcgcgtcgtttggataatacgcgaggatggatccggccctttggctattatgcccccaaccatcctcggcctcatcaacaccatggacgcagtcgcaaccagagcagtcgccgcaatgggttcaagtatcatgcaaacagaaggcatattgtatgcgatattccaacgaaccttacttggtcgggctatcgctaaagccttttggattatgttaacagcgatcgctagtgctcacgcgggctacgggaggtcttcgaacgcggagaaattgaggccgttgccgtacggcaatggaatattctgggcaaacgctggtctcggtgccgccagcgttcctgacttttggaaagtctttcacagtggcgactgcgccgtccaccgatcggaaatagaaatactagccaaagccaatgtcgtacggcttcataacggcgctcgattctctacagattacattattttgtgtaccggcttcgacaagtcatatcaaccctttgaccaaatgctccagcgcacatgtggactgtcacccgaaccagtcgagtcgagccactggacagaactggaggaatacgcagaaagaaatatcgacgtcttacttcctgctatttcgcggtctccattgcgtacaaattgccagaccattaagtctacagaaaactttgcatacggcccaagccggcactatcgccgcctcgtctcccctcatctcacagctcaaggcgacaggtccatttactttccaggattcattcacacgatttatacccccttggtctccgaagttcaggcactatggggtgtcacgtatttgcttgggctcagagatctcccatctcaagcagtgatggaaaaggaggtagccgagtggaacgtctggtctcgtaagagatacgtgacacaagggcgaaagcatgcatatgctatatatgatttcttatcatatatcgacgtcttgctcggagacctaggtatcaatccaaagcgacgtcacaaccctttcgcccattatcttattccggtctatccgagagagtataaaggtctaatagatgagtttcgaaagtcgaagcaacagcccgagaaatttcatatcgttgacaagaaatcaaatctctcttacgcacttggcatgctgctcggatgttcagctctgctcctgctcagtacaatcttgacgcagagctgtcagactttctcaacaagctattag

SEQ ID NO: 6766 - protein, 606 aa, Muscodor strobelii
  misc_feature: SGI Peptide ID NO. 562005
  misc_feature (16)..(562): NCBI GI: 116179234 Blast Desc: CHGG_00245 [Chaetomium globosum CBS 148.51] gi|88184542|gb|EAQ92010.1| CHGG_00245 [Chaetomium globosum CBS 148.51]
  misc_feature (6)..(562): NCBI GI: 242793240 Blast Desc: monooxygenase, [Talaromyces stipitatus ATCC 10500] gi|218718710|gb|EED18130.1| monooxygenase, [Talaromyces stipitatus ATCC 10500]
  misc_feature (5)..(562): NCBI GI: 240110609 Blast Desc: Flavin-binding monooxygenase-like family protein [Coccidioides posadasii C735 delta SOWgp]
  misc_feature (5)..(561): NCBI GI: 258575339 Blast Desc: [Uncinocarpus reesii 1704] gi|237902117|gb|EEP76518.1| [Uncinocarpus reesii 1704]
  misc_feature (5)..(562): NCBI GI: 119196045 Blast Desc: CIMG_02397 [Coccidioides immitis RS]
  misc_feature (5)..(561): NCBI GI: 269996425 Blast Desc: monooxygenase [Alternaria brassicicola]
  misc_feature (8)..(562): NCBI GI: 255953393 Blast Desc: Pc21g04010 [Penicillium chrysogenum Wisconsin 54-1255] gi|211589160|emb|CAP95298.1| Pc21g04010 [Penicillium chrysogenum Wisconsin 54-1255]
  misc_feature (4)..(565): NCBI GI: 238845681 Blast Desc: conserved [Microsporum canis CBS 113480]
  misc_feature (1)..(556): NCBI GI: 119483520 Blast Desc: NFIA_093860 [Neosartorya fischeri NRRL 181] gi|119409819|gb|EAW19766.1| NFIA_093860 [Neosartorya fischeri NRRL 181]
  misc_feature (9)..(592): NCBI GI: 242783838 Blast Desc: dimethylaniline monooxygenase, [Talaromyces stipitatus ATCC 10500] gi|218720413|gb|EED19832.1| dimethylaniline monooxygenase, [Talaromyces stipitatus ATCC 10500]
MSDEIETFDVVVVGAGWNGLIAAKTYLDFIPSANIVLLDDQASIGGVWCDEKIYPSLYAQIKYGQFEYSFYPMQNEGVTADGYISGYTINRYLNNFARDFNLVQRTRLRTIVVKVHRLSGGGWQLDLAGKASIKCTKLVYASGATSHPVIPSWPTSSEFRAPIIHSSELGTHLTQLEKIQTVTVVGAAKSAYDTVFHLLKRGKRVVWIIREDGSGPLAIMPPTILGLINTMDAVATRAVAAMGSSIMQTEGILYAIFQRTLLGRAIAKAFWIMLTAIASAHAGYGRSSNAEKLRPLPYGNGIFWANAGLGAASVPDFWKVFHSGDCAVHRSEIEILAKANVVRLHNGARFSTDYIILCTGFDKSYQPFDQMLQRTCGLSPEPVESSHWTELEEYAERNIDVLLPAISRSPLRTNCQTIKSTENFAYGPSRHYRRLVSPHLTAQGDRSIYFPGFIHTIYTPLVSEVQALWGVTYLLGLRDLPSQAVMEKEVAEWNVWSRKRYVTQGRKHAYAIYDFLSYIDVLLGDLGINPKRRHNPFAHYLIPVYPREYKGLIDEFRKSKQQPEKFHIVDKKSNLSYALGMLLGCSALLLLSTILTQSCQTFSTSY

SEQ ID NO: 6767 - DNA, 1551 bp, Muscodor strobelii
  misc_feature: SGI cDNA ID NO. 562006
  misc_feature: Encodes the peptide sequence at SEQ ID NO 6768
atgtttctattgtcggcgagaatggaacatttgtcgaatttgcaatttggaattggtgccgtggccatcctgtctctgctcgtctttggattcacgtcttatcgacgaagccccttttccaaagttccgggaccatggtactcgaattggacgggtctggtactgaaatattacactcttgcgggccaagaggcatcgtacattcattcactacatttagtatatggccgcgtggtgcgtgtcagtccctatagtgtagacaccatctctcccgccgatgttcagcagatccatggtatcaagcggccgttcctgaagtcacagtggtacgcagactttatacccggaaacgagaatctggtgaatgtacaagatgtcgaggtgcatcgtcgccatcgacgactgctctctgcgccactgtcagatactagtctcaagttagtactccctcgcgtcgggaagaatctacgtcttgcaatcttccagatggagagagaatcgaaagaccgcggattcatcgacgtgttcaagtggtggacctgcatggccacagacattattggtgagctgacgtttggcgagtcgtttcgaacgttggagactggagaggtaaccttatccatattcatagtccagcacattgaagacacggtgacttaccacctatgcaaacagaaaaatcagtatatgcacgacctagaggtcacaggggcaaccaacgccatgatggcgtcttttccaactttgtaccgactagggcattggattcccgccttcaaggaagctagagccattcaagctcgtctcagtctctacgcagaccagtctctcaagcgataccgtgacaacttggaaaggaaccccaagtcgagcaatcagacactgtttaccaaagtctaccaggctcatgacgaagagacactgacagacaaggagatcaacgaggaggcacaaatctacatcgtggctgggtccgacactacggccaacaccttaacatacctcacctggcgaatgtgtctgccagagaacaccaagcggaaggcaagacttatagatgagcttagtactctgcctgatggtactccgactgaccaagacttgaaaaatcttccttatctgaacagggtcatatccgagaccctgcgccttcacagtgctgttcccgggtgcctcaggcgcgaaatccctcccggtggcgctgtgattgggggacatgccttgccatccaagagcgaggtcatgacgaacgcttattgtctccatcgcaatgaaagcgcatttcctgatcccgagaagtttgatccagaccgatgggagcacccgactcgggatatgaaggatgcttatttgccatttggcggcggctcgcgagtatgcatcggtatccacttggcgtatgcgcaacttcgcgtggggactgccgcgtttttcagggcgttcccgaaagcaacggtctcttcaagagatgggatgaatgctgatgatatggacccggccttgtacttcttgatgtcgccacgtggccatcgatgcttgatagacgtctaa

SEQ ID NO: 6768 - protein, 516 aa, Muscodor strobelii
  misc_feature: SGI Peptide ID NO. 562006
  misc_feature (42)..(514): Pfam Id: PF00067 Pfam Desc: Cytochrome P450
  misc_feature (125)..(481): Pfam Id: PF00067 Pfam Desc: Cytochrome P450
  misc_feature (17)..(516): NCBI GI: 238495244 Blast Desc: cytochrome P450, [Aspergillus flavus NRRL3357] gi|220695508|gb|EED51851.1| cytochrome P450, [Aspergillus flavus NRRL3357]
  misc_feature (17)..(516): NCBI GI: 169777991 Blast Desc: [Aspergillus oryzae RIB40] gi|83772198|dbj|BAE62328.1| protein product [Aspergillus oryzae]
  misc_feature (13)..(516): NCBI GI: 259489566 Blast Desc: TPA: cytochrome P450, (Eurofung) [Aspergillus nidulans FGSC A4]
  misc_feature (3)..(515): NCBI GI: 212538573 Blast Desc: benzoate 4-monooxygenase cytochrome P450, [Penicillium marneffei ATCC 18224] gi|210069184|gb|EEA23275.1| benzoate 4-monooxygenase cytochrome P450, [Penicillium marneffei ATCC
  misc_feature (13)..(515): NCBI GI: 242806422 Blast Desc: cytochrome P450, [Talaromyces stipitatus ATCC 10500] gi|218715365|gb|EED14787.1| cytochrome P450, [Talaromyces stipitatus ATCC 10500]
  misc_feature (37)..(516): NCBI GI: 255941390 Blast Desc: Pc16g11620 [Penicillium chrysogenum Wisconsin 54-1255] gi|211586087|emb|CAP93832.1| Pc16g11620 [Penicillium chrysogenum Wisconsin 54-1255]
  misc_feature (44)..(515): NCBI GI: 256729978 Blast Desc: NECHADRAFT_45084 [Nectria haematococca mpVI 77-13-4]
  misc_feature (37)..(515): NCBI GI: 212539207 Blast Desc: benzoate 4-monooxygenase cytochrome P450, [Penicillium marneffei ATCC 18224] gi|210069501|gb|EEA23592.1| benzoate 4-monooxygenase cytochrome P450, [Penicillium marneffei ATCC
  misc_feature (18)..(515): NCBI GI: 255941466 Blast Desc: Pc16g12030 [Penicillium chrysogenum Wisconsin 54-1255] gi|211586125|emb|CAP93873.1| Pc16g12030 [Penicillium chrysogenum Wisconsin 54-1255]
  misc_feature (37)..(515): NCBI GI: 242760737 Blast Desc: cytochrome P450, [Talaromyces stipitatus ATCC 10500] gi|218723246|gb|EED22663.1| cytochrome P450, [Talaromyces stipitatus ATCC 10500]
  misc_feature (35)..(481): SWISSPROT Homolog: EC 1.14.13.12 Benzoate 4-monooxygenase
MFLLSARMEHLSNLQFGIGAVAILSLLVFGFTSYRRSPFSKVPGPWYSNWTGLVLKYYTLAGQEASYIHSLHLVYGRVVRVSPYSVDTISPADVQQIHGIKRPFLKSQWYADFIPGNENLVNVQDVEVHRRHRRLLSAPLSDTSLKLVLPRVGKNLRLAIFQMERESKDRGFIDVFKWWTCMATDIIGELTFGESFRTLETGEVTLSIFIVQHIEDTVTYHLCKQKNQYMHDLEVTGATNAMMASFPTLYRLGHWIPAFKEARAIQARLSLYADQSLKRYRDNLERNPKSSNQTLFTKVYQAHDEETLTDKEINEEAQIYIVAGSDTTANTLTYLTWRMCLPENTKRKARLIDELSTLPDGTPTDQDLKNLPYLNRVISETLRLHSAVPGCLRREIPPGGAVIGGHALPSKSEVMTNAYCLHRNESAFPDPEKFDPDRWEHPTRDMKDAYLPFGGGSRVCIGIHLAYAQLRVGTAAFFRAFPKATVSSRDGMNADDMDPALYFLMSPRGHRCLIDV

SEQ ID NO: 6769 - DNA, 648 bp, Muscodor strobelii
  misc_feature: SGI EST ID NO. CUFF.16881.0
  misc_feature: Variant of the nucleotide sequence at SEQ ID NO 6767
cgtacattcattcactacatttagtatatggccgcgtggtgcgtgtcagtccctatagtgtagacaccatctctcccgccgatgttcagcagatccatggtatcaagcggccgttcctgaagtcacagtggtacgcagactttatacccggaaacgagaatctggtgaatgtacaagatgtcgaggtgcatcgtcgccatcgacgactgctctctgcgccactgtcagatactagtctcaagttagtactccctcgcgtcgggaagaatctacgtcttgcaatcttccagatggagagagaatcgaaagaccgcggattcatcgacgtgttcaagtggtggacctgcatggccacagacattattggtgagctgacgtttggcgagtcgtttcgaacgttggagactggagaggtaaccttatccatattcatagtccagcacattgaagacacggtgacttaccacctatgcaaacagaaaaatcagtatatgcacgacctagaggtcacaggggcaaccaacgccatgatggcgtcttttccaactttgtaccgactagggcattggattcccgccttcaaggaagctagagccattcaagctcgtctcagtctctacgcagaccagtctctcaagcgataccgtg

SEQ ID NO: 6770 - DNA, 1680 bp, Muscodor strobelii
  misc_feature: SGI cDNA ID NO. 562007
  misc_feature: Encodes the peptide sequence at SEQ ID NO 6771
atgcatttctctgaagataaagcggaagtacccagagaaccagacgatggggctgttgtcattgcgcccgtacagacacgacaaatccgtggtgtcaaggtgagtgccccttgtccctcctattatcagctgcagctcacgcaagtgcagtggttcttggtggttatggccattctgtcgagcatgcttatctactcgcttgatagtacaatcactgctgacctcgtccccgccatctcaaacgagtttggggagcctcagctgctaccctggctgtctgtcggctttatcctcggcgccatcgctgccctgctgcccgtcgggaggttgtatgccaaattcgacgccaaatgggtctatatcggtagcatcgtcatcttcctcgccgcctctggcctctgcggtggcgctccgagcatgaacgccatcatcgttggccgtgtcatccttggtgtctcggggagcggcctgtactgtggcattctgacattcttgtccaccttgaccgatgaccacgagcgcccgacttacctcagtttttccggcgccacttggggtcttggtaccagtctcgggcccctcatcggaggtgccttcgctcaggtgaactggagatttggcttttacatcaacttgatcatcggtggtgtttttgcgcctgtctacttgtttcttttaccgtcattggatccgatgccaaaggggaccacattctctgagcgtttcaaggattttgacattattggtaccgttctgtcgatcgggtccatcttgagcttagtccttgcaatcaacttcggcggcatactctatccgtggagcagcggaagtgagatcgcgctctttgttgtagggggcctggtcttcatcgctttctctgtccagcagaacttctcgtggcttacaacccgcgccgaacgcctgttccccgggcacttgctccgaagacgggaatctctccttcttttcatcatctccatctgcaccaatgctgccattttcgtcccaatcttctatattccagtgtacttccaatttacaaggggcgattcggctcttgaggctgcagtacgactcctacctctcattctggttgtcacagcctcaatgctggccaacgggttcctgatggctcgttttcaatacgcgtttccttggtatattctaggaacagcgattggcctcgtcggaaacgtgcttctatacaccgtccgcgtcaacactgcgaacgcaaatatatatggctacgaggtcctcctcgggctcggaatcggcgcctgtaatcaggccggctacgccgtcattcaaaccgttgctgccccacatgacatgccatttaccatcccattcatgatgatggctcagtttaccggtatcacggtaggactatccgttagtggcgccatattcatcaaccagtcactcgttcgactgcggcggctcttgcctaccttttccgatatacagctcaatgctctgatcagcggtacatccggcgacggcatcaaagccgttcctgacgcgctgcggggacccaccatcgacaatcttgtcagtagcttaagcttgacgttcatcgtttcctttgcctttggagcactcgcccttgttttgtcccttttcctaaagaaaaccaagacatttacaaagggaactgatattcaggccgtcataggctag

SEQ ID NO: 6771 - protein, 559 aa, Muscodor strobelii
  misc_feature: SGI Peptide ID NO. 562007
  misc_feature (58)..(467): Pfam Id: PF07690 Pfam Desc: Major Facilitator Superfamily
  misc_feature (53)..(153): Pfam Id: PF00083 Pfam Desc: Sugar (and other) transporter
  misc_feature (7)..(548): NCBI GI: 116200408 Blast Desc: CHGG_10749 [Chaetomium globosum CBS 148.51] gi|88175463|gb|EAQ82931.1| CHGG_10749 [Chaetomium globosum CBS 148.51]
  misc_feature (2)..(557): NCBI GI: 171693323 Blast Desc: protein product [Podospora anserina] gi|170946610|emb|CAP73412.1| protein product [Podospora anserina]
  misc_feature (50)..(546): NCBI GI: 170940123 Blast Desc: protein product [Podospora anserina]
  misc_feature (13)..(550): NCBI GI: 242761503 Blast Desc: efflux pump antibiotic resistance protein, [Talaromyces stipitatus ATCC 10500] gi|218723388|gb|EED22805.1| efflux pump antibiotic resistance protein, [Talaromyces ATCC
  misc_feature (46)..(550): NCBI GI: 121715077 Blast Desc: MFS drug efflux transporter, [Aspergillus clavatus NRRL 1] gi|119403304|gb|EAW13722.1| MFS drug efflux transporter, [Aspergillus clavatus NRRL 1]
  misc_feature (1)..(469): NCBI GI: 115433859 Blast Desc: [Aspergillus terreus NIH2624] gi|114189918|gb|EAU31618.1| [Aspergillus terreus NIH2624]
  misc_feature (32)..(545): NCBI GI: 225560080 Blast Desc: conserved [Ajellomyces capsulatus G186AR]
  misc_feature (36)..(547): NCBI GI: 261203489 Blast Desc: MFS drug efflux transporter [Ajellomyces dermatitidis SLH14081] gi|239586743|gb|EEQ69386.1| MFS drug efflux transporter [Ajellomyces dermatitidis SLH14081]
  misc_feature (15)..(545): NCBI GI: 225679583 Blast Desc: transporter [Paracoccidioides brasiliensis Pb03]
  misc_feature (36)..(547): NCBI GI: 239608226 Blast Desc: MFS drug efflux transporter [Ajellomyces dermatitidis ER-3]
MHFSEDKAEVPREPDDGAVVIAPVQTRQIRGVKVSAPCPSYYQLQLTQVQWFLVVMAILSSMLIYSLDSTITADLVPAISNEFGEPQLLPWLSVGFILGAIAALLPVGRLYAKFDAKWVYIGSIVIFLAASGLCGGAPSMNAIIVGRVILGVSGSGLYCGILTFLSTLTDDHERPTYLSFSGATWGLGTSLGPLIGGAFAQVNWRFGFYINLIIGGVFAPVYLFLLPSLDPMPKGTTFSERFKDFDIIGTVLSIGSILSLVLAINFGGILYPWSSGSEIALFVVGGLVFIAFSVQQNFSWLTTRAERLFPGHLLRRRESLLLFIISICTNAAIFVPIFYIPVYFQFTRGDSALEAAVRLLPLILVVTASMLANGFLMARFQYAFPWYILGTAIGLVGNVLLYTVRVNTANANIYGYEVLLGLGIGACNQAGYAVIQTVAAPHDMPFTIPFMMMAQFTGITVGLSVSGAIFINQSLVRLRRLLPTFSDIQLNALISGTSGDGIKAVPDALRGPTIDNLVSSLSLTFIVSFAFGALALVLSLFLKKTKTFTKGTDIQAVIG

SEQ ID NO: 6772 - DNA, 716 bp, Muscodor strobelii
  misc_feature: SGI EST ID NO. CUFF.16898.0
  misc_feature: Variant of the nucleotide sequence at SEQ ID NO 6770
gcgaacgcaaatatatatggctacgaggtcctcctcgggctcggaatcggcgcctgtaatcaggccggctacgccgtcattcaaaccgttgctgccccacatgacatgccatttaccatcccattcatgatgatggctcagtttaccggtatcacggtaggactatccgttagtggcgccatattcatcaaccagtcactcgttcgactgcggcggctcttgcctaccttttccgatatacagctcaatgctctgatcagcggtcggtagcccctccatctttaatcctttctcatatctctcatatcctcgctctgtaaagtataacatagatctatggacacgcggctaagccaccttttcacaggtacatccggcgacggcatcaaagccgttcctgacgcgctgcggggacccaccatcgacaatcttgtcagtagcttaagcttgacgttcatcgtttcctttgcctttggagcactcgcccttgttttgtcccttttcctaaagaaaaccaagacatttacaaagggaactgatattcaggccgtcataggctaggctagagtgcgcttggctttcatgtaaggaaacagagaaaggagatagctctgcattaaagtttatattacaaggttgtatgaacatataaattatactgtcgaaaaccttcttgttgataatgcatctacatatgcagatacatgcgaccacca

SEQ ID NO: 6773 - DNA, 1860 bp, Muscodor strobelii
  misc_feature: SGI cDNA ID NO. 562008
  misc_feature: Encodes the peptide sequence at SEQ ID NO 6774
atgaactccgttgtattgtatcgggcttttggtctactactgtccctcgctccgctcacaaatgcgtctccagtcgcgaggctgctagggtcgtcatttggactgcctggcttggatgccacgtacgactatgtcatcgtcggcgggggaaccgctggcctgacactggcgacacgactggtcgagcaacaagcaggaaccgtcgctattattgaagccggctcgttctatgaaatcggacagggcaatataagccagattcccgccgatacggtgtattacaccggcaaaagtgtcgatgattggcagcccaggacggattgggggtatgtcactacacctcaagcaggagcgtacaatcaacgactgcactatcccagggctaaaatgctaggagggtgttccggtcgcaattatatgatttatcagcgtgccacagtcggggcctttgacaaatggtctgatatggtaaatgacacaagctttgcgttcaaaaagatgctgccgtacctagagaagagtatacgcttcacgccgcccaataccgaactccgccaggccaatgcgacacccgagttcaacttggcgacgttgacgaagagccacggtcccttgtcggtgacgtacccaaactacgcatattcgttccctacgtgggcggtgcgagggctggcggaaattggcatcgccatgcgctcagcattcgtcgatggttctatcctcgggcagtcgtggagtctattcaccatcgacgccgcgacgcagactcgggcgtcctccgagacggcattcctccggtcgagtctggaggatgaaaagtacttcctctacgacttgactatgggcaaacagatcctcttcgatggtgctaacagagcgaccggtgtccgcgtaaacacgcttggtaccgagtacacactgtcggcaaggaaggaagtgattctctcttccggtgtcatcggatctccgcaaatgcttcaggcatccggtgtcggccccgccgaggtgctagagccgctcggcatagacgtcgtcgccaacctgaaaggcgttggacagggtttccaagaccacgtgctcttcggtgtgacacatcgcgtcgcgggcatcacagcatcgtcgcttgggaatcccgtctacgcagacgaacaaaatgagctctttaccaaatatcaagccggcgtgctggtgaacccagctgttgacgtactcgcgttcgagaaattgccagcgcacagccgtcgggcgctaagcaaccgcacacgcggcatcctcgatacagactacccggctgactggcccgagctcgaatatattacactgtcagcctatctaggcgagttcgagacaccaatccgcgagagccccgacgacggagccgattacgccgcgctgtcagtcgttctgtgcacgccgcgatcgcgcggcagcgtcaacatcacgtcgcccgacacggctgtgcacccggcgcttgacccagggttcctgacggaccgcgccgacgtcgaggtcgcggtcgcgggattcaagcgagtgcgcgcgttttgggagacgagggcgctgcgcggattcgccgaccccggcgaggcgtaccccggcgccaacgtcacgactgacgcgcagattgaggacagcatccggcgcagcttccagaccatcttccacggctcgagcacctgcgcgatgggaagcgctgacgacgcgcacgccgtcgtggatacgcagggccgcgtgtacggcgttgacggtctgcgcatcgttgacgcgagcattttccctttcctgcctcctggacatccgcagtcaactatttatgcactggctgaaaagatttcctgtgacatctcgcggaattgctga

SEQ ID NO: 6774 - protein, 619 aa, Muscodor strobelii
  misc_feature: SGI Peptide ID NO. 562008
  misc_feature (465)..(611): Pfam Id: PF05199 Pfam Desc: GMC oxidoreductase
  misc_feature (42)..(373): Pfam Id: PF00732 Pfam Desc: GMC oxidoreductase
  misc_feature (43)..(76): Pfam Id: PF01266 Pfam Desc: FAD dependent oxidoreductase
  misc_feature (43)..(76): Pfam Id: PF00890 Pfam Desc: FAD binding domain
  misc_feature (284)..(373): Pfam Id: PF00732 Pfam Desc: GMC oxidoreductase
  misc_feature (42)..(155): Pfam Id: PF00732 Pfam Desc: GMC oxidoreductase
  misc_feature (43)..(74): Pfam Id: PF05834 Pfam Desc: Lycopene cyclase protein
  misc_feature (43)..(73): Pfam Id: PF07992 Pfam Desc: Pyridine nucleotide-disulphide oxidoreductase
  misc_feature (15)..(619): NCBI GI: 212526186 Blast Desc: glucose-methanol-choline (gmc) oxidoreductase, [Penicillium marneffei ATCC 18224] gi|210072648|gb|EEA26735.1| glucose-methanol-choline (gmc) oxidoreductase, [Penicillium ATCC
  misc_feature (8)..(619): NCBI GI: 238845985 Blast Desc: glucose-methanol-choline oxidoreductase [Microsporum canis CBS 113480]
  misc_feature (9)..(619): NCBI GI: 121710942 Blast Desc: glucose-methanol-choline (gmc) oxidoreductase [Aspergillus clavatus NRRL 1] gi|119401237|gb|EAW11661.1| glucose-methanol-choline (gmc) oxidoreductase [Aspergillus NRRL
  misc_feature (26)..(619): NCBI GI: 116181804 Blast Desc: CHGG_01530 [Chaetomium globosum CBS 148.51] gi|88185827|gb|EAQ93295.1| CHGG_01530 [Chaetomium globosum CBS 148.51]
  misc_feature (28)..(615): NCBI GI: 156065439 Blast Desc: SS1G_00730 [Sclerotinia sclerotiorum 1980] gi|154691589|gb|EDN91327.1| SS1G_00730 [Sclerotinia sclerotiorum 1980]
  misc_feature (7)..(615): NCBI GI: 154320081 Blast Desc: BC1G_02021 [Botryotinia fuckeliana B05.10] gi|150854760|gb|EDN29952.1| BC1G_02021 [Botryotinia fuckeliana B05.10]
  misc_feature (1)..(616): NCBI GI: 242812067 Blast Desc: choline dehydrogenase, [Talaromyces stipitatus ATCC 10500] gi|218714221|gb|EED13644.1| choline dehydrogenase, [Talaromyces stipitatus ATCC 10500]
  misc_feature (27)..(619): NCBI GI: 145236316 Blast Desc: protein product [Aspergillus niger] gi|134075258|emb|CAK44899.1| protein product [Aspergillus niger]
  misc_feature (84)..(619): NCBI GI: 145616785 Blast Desc: MGG_14477 [Magnaporthe grisea 70-15] gi|145022986|gb|EDK06647.1| MGG_14477 [Magnaporthe grisea 70-15]
  misc_feature (28)..(615): NCBI GI: 169767846 Blast Desc: [Aspergillus oryzae RIB40] gi|83766249|dbj|BAE56392.1| protein product [Aspergillus oryzae]
  misc_feature (38)..(615): SWISSPROT Homolog: EC 1.1.99.1 Choline dehydrogenase
MNSVVLYRAFGLLLSLAPLTNASPVARLLGSSFGLPGLDATYDYVIVGGGTAGLTLATRLVEQQAGTVAIIEAGSFYEIGQGNISQIPADTVYYTGKSVDDWQPRTDWGYVTTPQAGAYNQRLHYPRAKMLGGCSGRNYMIYQRATVGAFDKWSDMVNDTSFAFKKMLPYLEKSIRFTPPNTELRQANATPEFNLATLTKSHGPLSVTYPNYAYSFPTWAVRGLAEIGIAMRSAFVDGSILGQSWSLFTIDAATQTRASSETAFLRSSLEDEKYFLYDLTMGKQILFDGANRATGVRVNTLGTEYTLSARKEVILSSGVIGSPQMLQASGVGPAEVLEPLGIDVVANLKGVGQGFQDHVLFGVTHRVAGITASSLGNPVYADEQNELFTKYQAGVLVNPAVDVLAFEKLPAHSRRALSNRTRGILDTDYPADWPELEYITLSAYLGEFETPIRESPDDGADYAALSVVLCTPRSRGSVNITSPDTAVHPALDPGFLTDRADVEVAVAGFKRVRAFWETRALRGFADPGEAYPGANVTTDAQIEDSIRRSFQTIFHGSSTCAMGSADDAHAVVDTQGRVYGVDGLRIVDASIFPFLPPGHPQSTIYALAEKISCDISRNC

SEQ ID NO: 6775 - DNA, 849 bp, Muscodor strobelii
  misc_feature: SGI EST ID NO. CUFF.16902.0
  misc_feature: Variant of the nucleotide sequence at SEQ ID NO 6773
cgtcgcgggcatcacagcatcgtcgcttgggaatcccgtctacgcagacgaacaaaatgagctctttaccaaatatcaagccggcgtgctggtgaacccagctgttgacgtactcgcgttcgagaaattgccagcgcacagccgtcgggcgctaagcaaccgcacacgcggcatcctcgatacagactacccggctgactggcccgagctcgaatatattacactgtcagcctatctaggcgagttcgagacaccaatccgcgagagccccgacgacggagccgattacgccgcgctgtcagtcgttctgtgcacgccgcgatcgcgcggcagcgtcaacatcacgtcgcccgacacggctgtgcacccggcgcttgacccagggttcctgacggaccgcgccgacgtcgaggtcgcggtcgcgggattcaagcgagtgcgcgcgttttgggagacgagggcgctgcgcggattcgccgaccccggcgaggcgtaccccggcgccaacgtcacgactgacgcgcagattgaggacagcatccggcgcagcttccagaccatcttccacggctcgagcacctgcgcgatgggaagcgctgacgacgcgcacgccgtcgtggatacgcagggccgcgtgtacggcgttgacggtctgcgcatcgttgacgcgagcattttccctttcctgcctcctggacatccgcagtcaactatttatgcactggctgaaaagatttcctgtgacatctcgcggaattgctgagatacccaaaggcactgtttttgggacgtgatcccaattggggaagaaaataaggaagagagccaaaaaagacaacgacattagtt

SEQ ID NO: 6776 - DNA, 1020 bp, Muscodor strobelii
  misc_feature: SGI cDNA ID NO. 562009
  misc_feature: Elevated expression when VOC is produced
  misc_feature: Encodes the peptide sequence at SEQ ID NO 6777
atgtctttgccacgaaccttcaagcgtgccgccttcaaggcccagggagagcccctggccatcgaagatgttcccctgcagctgcctgaccgcaatgagatcctcgtcaaggtgcaagcctgcggtgtctgccacactgacttctatgtccagatcaatgtcctggggggtgggttccccataactccaggccatgagattattgggaccgtcgctgcactaggcgaagatgtcaaaggctggaacataaacgatcgcatcggcgctggatatcacggcggccatgatggaacatgccactcgtgcagagagagcctgccccagatgtgcgacaacaaggtcgccaatggcattcataggcaaggaggatttgccgaatattgccttcttcgcgctgaaagtgcagttcgtgtcccgtgccagggcgatgccgcaaactatgcgccattgctttgtgcagggtctactatgttcagcgccttgacactatgcgatatcaagcctggggaaacagtcgcagtgcaaggtctcggaggtctcggacatgttgccgtacagattgcagcacgcatgggctaccgcgttatcgccatttctcgtggtgccgaaaaggagaaggcagcaagacagctaggcgcccacgaatacatcgatgcctcaaagggtgacggtggcgagtccctgttggcgatgggcggggctaaagtcgtcctctcgactgccatggccgccgaggccattactcctttgatcaaaggcctcaatgctttcggaaagctcgttgtcgtgagcttcccagggccgcttcctatcgactcggcttatctggttggtcggggcatctctttgattatccctcctacggccagccccaccgattccgagaagacgcttgagttcgctcggcttcaaggtatcaagtgcgagatcgagaagtttcctttctcgaaagtgcacgatgcttttgatgccatgatgactggtaaagtgcgattccgatctgtcattactatggaataa

SEQ ID NO: 6777 - protein, 339 aa, Muscodor strobelii
  misc_feature: SGI Peptide ID NO. 562009
  misc_feature (31)..(138): Pfam Id: PF08240 Pfam Desc: Alcohol dehydrogenase GroES-like domain
  misc_feature (168)..(303): Pfam Id: PF00107 Pfam Desc: Zinc-binding dehydrogenase
  misc_feature (1)..(339): NCBI GI: 116181812 Blast Desc: CHGG_01534 [Chaetomium globosum CBS 148.51] gi|88185831|gb|EAQ93299.1| CHGG_01534 [Chaetomium globosum CBS 148.51]
  misc_feature (1)..(338): NCBI GI: 39945148 Blast Desc: zinc-binding dehydrogenase [Magnaporthe grisea 70-15] gi|145011364|gb|EDJ96020.1| zinc-binding dehydrogenase [Magnaporthe grisea 70-15]
  misc_feature (1)..(338): NCBI GI: 212535582 Blast Desc: alcohol dehydrogenase, [Penicillium marneffei ATCC 18224] gi|210070346|gb|EEA24436.1| alcohol dehydrogenase, [Penicillium marneffei ATCC 18224]
  misc_feature (1)..(322): NCBI GI: 240108343 Blast Desc: alcohol dehydrogenase, [Coccidioides posadasii C735 delta SOWgp]
  misc_feature (1)..(328): NCBI GI: 238844168 Blast Desc: alcohol dehydrogenase [Microsporum canis CBS 113480]
  misc_feature (2)..(339): NCBI GI: 116191191 Blast Desc: CHGG_05313 [Chaetomium globosum CBS 148.51] gi|88181226|gb|EAQ88694.1| CHGG_05313 [Chaetomium globosum CBS 148.51]
  misc_feature (1)..(339): NCBI GI: 119187051 Blast Desc: CIMG_03573 [Coccidioides immitis RS]
  misc_feature (6)..(322): NCBI GI: 238845983 Blast Desc: alcohol dehydrogenase [Microsporum canis CBS 113480]
  misc_feature (1)..(339): NCBI GI: 156039950 Blast Desc: SS1G_12111 [Sclerotinia sclerotiorum 1980] gi|154696168|gb|EDN95906.1| SS1G_12111 [Sclerotinia sclerotiorum 1980]
  misc_feature (1)..(338): NCBI GI: 242783599 Blast Desc: alcohol dehydrogenase, [Talaromyces stipitatus ATCC 10500] gi|218720366|gb|EED19785.1| alcohol dehydrogenase, [Talaromyces stipitatus ATCC 10500]
  misc_feature (7)..(339): SWISSPROT Homolog: EC 1.1.1.1 Alcohol dehydrogenase
  misc_feature: Useful for introducing or modulating the production of volatile compounds
MSLPRTFKRAAFKAQGEPLAIEDVPLQLPDRNEILVKVQACGVCHTDFYVQINVLGGGFPITPGHEIIGTVAALGEDVKGWNINDRIGAGYHGGHDGTCHSCRESLPQMCDNKVANGIHRQGGFAEYCLLRAESAVRVPCQGDAANYAPLLCAGSTMFSALTLCDIKPGETVAVQGLGGLGHVAVQIAARMGYRVIAISRGAEKEKAARQLGAHEYIDASKGDGGESLLAMGGAKVVLSTAMAAEAITPLIKGLNAFGKLVVVSFPGPLPIDSAYLVGRGISLIIPPTASPTDSEKTLEFARLQGIKCEIEKFPFSKVHDAFDAMMTGKVRFRSVITME

SEQ ID NO: 6778 - DNA, 1652 bp, Muscodor strobelii
  misc_feature: SGI EST ID NO. CUFF.16911.0
  misc_feature: Variant of the nucleotide sequence at SEQ ID NO 6776
cggcttaataattacctatgctgccaaattactgctcagcatcccctatcgccgaaggccttgtctacctcttttctgtcttccatcagtatatcccgcctgaatggagctctccatccccagcttacacctcacttcaccgcgtaacctttcttaatcggtctcactcataccacaacgccagatactcagaacatgtctttgccacgaaccttcaagcgtgccgccttcaaggcccagggagagcccctggccatcgaagatgttcccctgcagctgcctgaccgcaatgagatcctcgtcaaggtgcaagcctgcggtgtctgccacactgacttctatgtccagatcaatgtcctggggggtgggttccccataactccaggccatgagattattgggaccgtcgctgcactaggcgaagatgtcaaaggctggaacataaacgatcgcatcggcgctggatatcacggcggccatgatggaacatgccactcgtgcagagagagcctgccccagatgtgcgacaacaaggtcgccaatggcattcataggcaaggaggatttgccgaatattgccttcttcgcgctgaaagtgcagttcgtgtcccgtgccagggcgatgccgcaaactatgcgccattgctttgtgcagggtctactatgttcagcgccttgacactatgcgatatcaagcctggggaaacagtcgcagtgcaaggtctcggaggtctcggacatgttgccgtacagattgcagcacgcatgggctaccgcgttatcgccatttctcgtggtgccgaaaaggagaaggcagcaagacagctaggcgcccacgaatacatcgatgcctcaaagggtgacggtggcgagtccctgttggcgatgggcggggctaaagtcgtcctctcgactgccatggccgccgaggccattactcctttgatcaaaggcctcaatgctttcggaaagctcgttgtcgtgagcttcccagggccgcttcctatcgactcggcttatctggttggtcggggcatctctttgattatccctcctacggccagccccaccgattccgagaagacgcttgagttcgctcggcttcaaggtatcaagtgcgagatcgagaagtttcctttctcgaaagtgcacgatgcttttgatgccatgatgactggtaaagtgcgattccgatctgtcattactatggaataagcaggtgtgtcccggtacatgattatcagcatccattggaacgaaatgagaagagacatgatgtcaagctgcatgcgttatgacttgaccccaatccaatatacgattatcggaatgcatccccatagcgtaaccaactgtgtcatgaaataaaatgttttaccagtgaccacttgcggttgatgtttggctcagcttatgtatagttctatgttgattacttcgtcgcctttaaccaaaacagctgtcctgcgactttatacgacctacatttgcgttgcgtgattgacaggcttgaaaggttccacacctgtggtcagtagccactctattattcgcaagagtgtcgtcatatcggaatatcgtagctctgtgctcaggctgcgaagtactaggacctacctagtgttaaaagggaggatgccgcaagatatcac

SEQ ID NO: 6779 - DNA, 333 bp, Muscodor strobelii
  misc_feature: SGI cDNA ID NO. 562010
  misc_feature: Encodes the peptide sequence at SEQ ID NO 6780
atggtccccggaggccaccgggggacaccggagtgtgcgatcatgaacgttatggccgagcagcgcaaatccttgattgggcttgacagcgacaagcttgatgtagatgccgaatactcaatcgatgccatgaaatttgaggtcaaaaactctacgcgaaaacactcggttaccaaggagataggagacaagcaaatacctgttaagggtacagactgtatggtgtcttctgtacttgtgggtgacttgaggctctcgcaacagtccgctcccacggaattccgtggaagaactccgccatctccgacaatctccatgtcagggatgttctaa

SEQ ID NO: 6780 - protein, 110 aa, Muscodor strobelii
  misc_feature: SGI Peptide ID NO. 562010
MVPGGHRGTPECAIMNVMAEQRKSLIGLDSDKLDVDAEYSIDAMKFEVKNSTRKHSVTKEIGDKQIPVKGTDCMVSSVLVGDLRLSQQSAPTEFRGRTPPSPTISMSGMF

SEQ ID NO: 6781 - DNA, 1476 bp, Muscodor strobelii
  misc_feature: SGI cDNA ID NO. 562011
  misc_feature: Encodes the peptide sequence at SEQ ID NO 6782
atgtccatgccgtctgagcctccatttcgcgttgtggtggtcggtgctggcatcaccggcctgatggcctcgcactgcttgcaaaaggcaggcatcgatcacgtcgtgcttgaaaaacgcgacgacgtccatcccgccgaaggagccagcatcagtatctatccacaggttgcccgcgttctatcccagctgtgctgcctggagagcctgcagaagattagcatgcctcacctgctcggacacatccgccgaccagacggacgcctcgcggggagcgttgacttgtttcaacgatggcagaagaatcatggctatgatctcttgcccatggagaggagacaattcctgcgcatcctgtacgagctcttgccagacaaaactaggatacacaaagaggcaaaaatcgtccacgtcttcgaatcaaatgctggcgtcgaggtaaagctcgaagatggcactgtggagaagggcgatatggtcctcggctgtgatggtgtacatagcatgatgagggaagtcatgtgggggcaaatgcgcaacgacaggacaatacctcagtctttgatcaagagggatgaagcggctttcaagatagagtggaagtgcttgatcggtgttggtcccgccatgccgtgcctggggggcagcgatgccacattcattcacgacacgaaattctcgttcgttcttcttgcacaaccgcactgtacctttttcttcgtcttgttcttactcgacaagcctcatctcccctcggacagggttcgctataccgacgccgacgccgagtctcttgccgccacgatccttgaccatcccattaccgagtcaaccaagtttagcttcctatggaataatcggactcgcggcgatctcatatctttggaagagggcgtcttggaacgctggcatcacggccgcatcgttctcaccggagatgccgtccacaaggcaacgccaaacattgctctagggggcaatgcagcgatggaagatatcgtcgcgctagtcaatggccttcatcgtttattggaagaaaacagagggactaagccggacaccgcggggctggacggcttattcacgaggtaccaaactgaaagaatggagcgtgtgaagtatatggtgactatatcggggctttcgagcagaatccaggcccagcagacgctggcacacaaggctttcggactgctcatgcccatactcccgatcggccccgtggcgagccacttttccgaatacatcagggcaggtccgaagttggattttgtacacgatgccaagtctcctgtgcgcgggctacttgcgtggaaagacgaagaggaggccgcaaagaaggtcatgcaggacggacatccaggtgccggtcggttcttgaagctgattggtgtcactagcgtatttgtcatcctcctatctgcagttcgtttgactgctctccgtatgtttggaattaagaccaacttggagtag

SEQ ID NO: 6782 - protein, 491 aa, Muscodor strobelii
  misc_feature: SGI Peptide ID NO. 562011
  misc_feature (8)..(379): Pfam Id: PF01494 Pfam Desc: FAD binding domain
  misc_feature (10)..(41): Pfam Id: PF01266 Pfam Desc: FAD dependent oxidoreductase
  misc_feature (10)..(39): Pfam Id: PF00890 Pfam Desc: FAD binding domain
  misc_feature (8)..(45): Pfam Id: PF01494 Pfam Desc: FAD binding domain
  misc_feature (299)..(337): Pfam Id: PF01494 Pfam Desc: FAD binding domain
  misc_feature (9)..(444): NCBI GI: 119483518 Blast Desc: FAD binding domain protein [Neosartorya fischeri NRRL 181] gi|119409818|gb|EAW19765.1| FAD binding domain protein [Neosartorya fischeri NRRL 181]
  misc_feature (3)..(452): NCBI GI: 116179230 Blast Desc: CHGG_00243 [Chaetomium globosum CBS 148.51] gi|88184540|gb|EAQ92008.1| CHGG_00243 [Chaetomium globosum CBS 148.51]
  misc_feature (8)..(474): NCBI GI: 255953399 Blast Desc: Pc21g04040 [Penicillium chrysogenum Wisconsin 54-1255] gi|211589163|emb|CAP95301.1| Pc21g04040 [Penicillium chrysogenum Wisconsin 54-1255]
  misc_feature (3)..(481): NCBI GI: 242783852 Blast Desc: FAD-dependent monooxygenase, [Talaromyces stipitatus ATCC 10500] gi|218720416|gb|EED19835.1| FAD-dependent monooxygenase, [Talaromyces stipitatus ATCC 10500]
  misc_feature (3)..(446): NCBI GI: 212545611 Blast Desc: FAD-dependent monooxygenase, [Penicillium marneffei ATCC 18224] gi|210064479|gb|EEA18574.1| FAD-dependent monooxygenase, [Penicillium marneffei ATCC 18224]
  misc_feature (9)..(457): NCBI GI: 269996423 Blast Desc: monooxygenase [Alternaria brassicicola]
  misc_feature (5)..(476): NCBI GI: 258575331 Blast Desc: [Uncinocarpus reesii 1704] gi|237902113|gb|EEP76514.1| [Uncinocarpus reesii 1704]
  misc_feature (6)..(463): NCBI GI: 240105427 Blast Desc: FAD dependent oxidoreductase domain containing protein [Coccidioides posadasii C735 delta SOWgp]
  misc_feature (8)..(448): NCBI GI: 169596088 Blast Desc: SNOG_00795 [Phaeosphaeria nodorum SN15] gi|111071170|gb|EAT92290.1| SNOG_00795 [Phaeosphaeria nodorum SN15]
  misc_feature (9)..(442): NCBI GI: 49409615 Blast Desc: monooxygenase [Aspergillus flavus]
  misc_feature (10)..(394): SWISSPROT Homolog: EC 1.14.13.2 4-hydroxybenzoate 3-monooxygenase
MSMPSEPPFRVVVVGAGITGLMASHCLQKAGIDHVVLEKRDDVHPAEGASISIYPQVARVLSQLCCLESLQKISMPHLLGHIRRPDGRLAGSVDLFQRWQKNHGYDLLPMERRQFLRILYELLPDKTRIHKEAKIVHVFESNAGVEVKLEDGTVEKGDMVLGCDGVHSMMREVMWGQMRNDRTIPQSLIKRDEAAFKIEWKCLIGVGPAMPCLGGSDATFIHDTKFSFVLLAQPHCTFFFVLFLLDKPHLPSDRVRYTDADAESLAATILDHPITESTKFSFLWNNRTRGDLISLEEGVLERWHHGRIVLTGDAVHKATPNIALGGNAAMEDIVALVNGLHRLLEENRGTKPDTAGLDGLFTRYQTERMERVKYMVTISGLSSRIQAQQTLAHKAFGLLMPILPIGPVASHFSEYIRAGPKLDFVHDAKSPVRGLLAWKDEEEAAKKVMQDGHPGAGRFLKLIGVTSVFVILLSAVRLTALRMFGIKTNLE

SEQ ID NO: 6783 - DNA, 1415 bp, Muscodor strobelii
  misc_feature: SGI EST ID NO. CUFF.16920.0
  misc_feature: Variant of the nucleotide sequence at SEQ ID NO 6781
catcccgccgaaggagccagcatcagtatctatccacaggttgcccgcgttctatcccagctgtgctgcctggagagcctgcagaagattagcatgcctcacctgctcggacacatccgccgaccagacggacgcctcgcggggagcgttgacttgtttcaacgatggcagaagaatcatggctatgatctcttgcccatggagaggagacaattcctgcgcatcctgtacgagctcttgccagacaaaactaggatacacaaagaggcaaaaatcgtccacgtcttcgaatcaaatgctggcgtcgaggtaaagctcgaagatggcactgtggagaagggcgatatggtcctcggctgtgatggtgtacatagcatgatgagggaagtcatgtgggggcaaatgcgcaacgacaggacaatacctcagtctttgatcaagagggatgaagcggctttcaagatagagtggaagtgcttgatcggtgttggtcccgccatgccgtgcctggggggcagcgatgccacattcattcacgacacgaaattctcgttcgttcttcttgcacaaccgcactgtacctttttcttcgtcttgttcttactcgacaagcctcatctcccctcggacagggttcgctataccgacgccgacgccgagtctcttgccgccacgatccttgaccatcccattaccgagtcaaccaagtttagcttcctatggaataatcggactcgcggcgatctcatatctttggaagagggcgtcttggaacgctggcatcacggccgcatcgttctcaccggagatgccgtccacaaggcaacgccaaacattgctctagggggcaatgcagcgatggaagatatcgtcgcgctagtcaatggccttcatcgtttattggaagaaaacagagggactaagccggacaccgcggggctggacggcttattcacgaggtaccaaactgaaagaatggagcgtgtgaagtatatggtgactatatcggggctttcgagcagaatccaggcccagcagacgctggcacacaaggctttcggactgctcatgcccatactcccgatcggccccgtggcgagccacttttccgaatacatcagggcaggtccgaagttggattttgtacacgatgccaagtctcctgtgcgcgggctacttgcgtggaaagacgaagaggaggccgcaaagaaggtcatgcaggacggacatccaggtgccggtcggttcttgaagctgattggtgtcactagcgtatttgtcatcctcctatctgcagttcgtttgactgctctccgtatgtttggaattaagaccaacttggagtagaatgaccatcatttcttcccgatctagacgccctgtgagcattgggatatttatatctaccctcgaaa

SEQ ID NO: 6784 - DNA, 543 bp, Muscodor strobelii
  misc_feature: SGI cDNA ID NO. 562012
  misc_feature: Encodes the peptide sequence at SEQ ID NO 6785
atggcggagcaaacggatgctgtcatcatggaaagcttcccaaccacaaagccagccatgatcttcaagaccgccttcaaccagacgtatatgtgcggcgacttacacacaggatcaaccttagtggttgtgccgcttgtagagggtactattgaatctgtgggagactttgagccccaattcaaattccacttgaagtcgggggcggattggttccagatcgacgcggacaagaggcacggccgcatgtgtattaaagctgtggcaacggatagcgaggggcagtcggtgtgcatcgccaccgagggagttgtcgaaatgaacgacatcaccatgccgcttgcgttcggcgcgcctgacgccaagccgtcctcattcggctttggagtcgagctcttcaagattgaaacagggtcggaaaagtacaagtcactctccaacatggtctttgcaggcagtcaacgcttcacgaaagacgagagcggcatgatcggcgtcgaagctagagtatcggttcttgtctctggaacagggatgggatag

SEQ ID NO: 6785 - protein, 180 aa, Muscodor strobelii
  misc_feature: SGI Peptide ID NO. 562012
  misc_feature (12)..(179): NCBI GI: 242783847 Blast Desc: conserved [Talaromyces stipitatus ATCC 10500] gi|218720415|gb|EED19834.1| conserved [Talaromyces stipitatus ATCC 10500]
  misc_feature (49)..(178): NCBI GI: 119483524 Blast Desc: NFIA_093880 [Neosartorya fischeri NRRL 181] gi|119409821|gb|EAW19768.1| conserved [Neosartorya fischeri NRRL 181]
  misc_feature (12)..(179): NCBI GI: 212545613 Blast Desc: conserved [Penicillium marneffei ATCC 18224] gi|210064480|gb|EEA18575.1| conserved [Penicillium marneffei ATCC 18224]
  misc_feature (12)..(178): NCBI GI: 115387149 Blast Desc: [Aspergillus terreus NIH2624] gi|114195164|gb|EAU36864.1| [Aspergillus terreus NIH2624]
  misc_feature (5)..(171): NCBI GI: 169611316 Blast Desc: SNOG_08768 [Phaeosphaeria nodorum SN15] gi|160702264|gb|EAT83936.2| SNOG_08768 [Phaeosphaeria nodorum SN15]
  misc_feature (10)..(179): NCBI GI: 255953401 Blast Desc: Pc21g04050 [Penicillium chrysogenum Wisconsin 54-1255] gi|211589164|emb|CAP95302.1| Pc21g04050 [Penicillium chrysogenum Wisconsin 54-1255]
  misc_feature (10)..(171): NCBI GI: 189205601 Blast Desc: conserved [Pyrenophora tritici-repentis Pt-1C-BFP] gi|187975228|gb|EDU41854.1| conserved [Pyrenophora tritici-repentis Pt-1C-BFP]
  misc_feature (10)..(176): NCBI GI: 242768496 Blast Desc: conserved [Talaromyces stipitatus ATCC 10500] gi|218724777|gb|EED24194.1| conserved [Talaromyces stipitatus ATCC 10500]
  misc_feature (10)..(176): NCBI GI: 212542615 Blast Desc: conserved [Penicillium marneffei ATCC 18224] gi|210066369|gb|EEA20462.1| conserved [Penicillium marneffei ATCC 18224]
  misc_feature (10)..(174): NCBI GI: 259488531 Blast Desc: TPA: conserved [Aspergillus nidulans FGSC A4]
MAEQTDAVIMESFPTTKPAMIFKTAFNQTYMCGDLHTGSTLVVVPLVEGTIESVGDFEPQFKFHLKSGADWFQIDADKRHGRMCIKAVATDSEGQSVCIATEGVVEMNDITMPLAFGAPDAKPSSFGFGVELFKIETGSEKYKSLSNMVFAGSQRFTKDESGMIGVEARVSVLVSGTGMG

SEQ ID NO: 6786 - DNA, 1461 bp, Muscodor strobelii
  misc_feature: SGI cDNA ID NO. 562013
  misc_feature: Encodes the peptide sequence at SEQ ID NO 6787
atgtctagcaactctcattcttctgcacccgtcttcgaattctactacgacgttgtatgtccattcgcatatatagcatctctccgcatcgaaagcctcgcaaagagaacttctgcgaccatacaatggcggccagtgctcctcggaggcatctaccgagcaacggaagcgccacaaggcgcccaaggctcggcgacagaccctatgaatccgacgaagaaggcagtgtttgggacttcattccggcggactttgaaacgcttccaagtcccgatcgatgcaccgaaggaacaccctcgcaagacggtagatgcactccggttactgcattacctacctcatgacgtgagagcagttgctagtcatgcgctgttcaaggcatattgggtagatcatattgacatagctcacggagatactctacttgaagttgtgcacaacgctctagagaattacccagaatctcagaagcgagttacggcagatgcgttcactgacgaggggtcaaggagagcacttgaacaggcgacagcagatgcagtatgtcggggcgcgcctggagtacctggattctgggttcccgacgagacttgggtggattttcaaggtgagccacagacagggcgtttgtactggggacaagaccgtatgcatttccttgaagcaagcttgcttcgtcttgctgatcgccggtcatcgatctcacttcgaaatctactccctcggtgtagggagagcaagattctgagggaacctatgaagcttgagttttggttcgatttcgcgagtccatggtcatatcttggttggacgcgtctaagaatgttgcaagccacctttgggaatcggttgcaggttgatttcaagccaatactgctgggtgccctgtttaaggagattggtgcaccacaaatgccgagctttgcgatatcgaaacaaaagcgtcgacagaacactctcgacatatttgactgggcgaaattttggagcgccgtagatcaacaagaaggcacctcggaacagggcgtcggattccaatggccagatgtgtttccaatcagaagtccttggttgcttaggtgtgccattgtgaatccgaaatgcgttcctattttgtatgaatcgtgctggaagtcgaaccgcaatgttagtgacaacactgttctcaaacaggtactgcaggaggcaggattcaacggtgaggagcttctaaccgaggccggatctccacccgtgaaagaagccctattcgcgaatacaaaggttgcaaaagacgcaggcttctgcggagtcccgacgtaccgagtatttcgaaaaggaacagaagatacgtgggttcaggcaggtgactttgtctggggacaagatgaaatcgctgttgttgaggatatgattagtgggtgggacgctagttccaatgaactagcaagaccaagatgtgtcattaattcacagctgtag

SEQ ID NO: 6787 - protein, 486 aa, Muscodor strobelii
  misc_feature: SGI Peptide ID NO. 562013
  misc_feature (11)..(225): Pfam Id: PF01323 Pfam Desc: DSBA-like thioredoxin domain
  misc_feature (254)..(466): Pfam Id: PF01323 Pfam Desc: DSBA-like thioredoxin domain
  misc_feature (9)..(479): NCBI GI: 169612678 Blast Desc: SNOG_09463 [Phaeosphaeria nodorum SN15] gi|111061608|gb|EAT82728.1| SNOG_09463 [Phaeosphaeria nodorum SN15]
  misc_feature (5)..(193): NCBI GI: 189188696 Blast Desc: DSBA oxidoreductase [Pyrenophora tritici-repentis Pt-1C-BFP] gi|187972293|gb|EDU39792.1| DSBA oxidoreductase [Pyrenophora tritici-repentis Pt-1C-BFP]
  misc_feature (8)..(470): NCBI GI: 149921878 Blast Desc: DSBA oxidoreductase [Plesiocystis pacifica SIR-1] gi|149817231|gb|EDM76708.1| DSBA oxidoreductase [Plesiocystis pacifica SIR-1]
  misc_feature (11)..(471): NCBI GI: 196004730 Blast Desc: TRIADDRAFT_56056 [Trichoplax adhaerens] gi|190586131|gb|EDV26199.1| TRIADDRAFT_56056 [Trichoplax adhaerens]
  misc_feature (14)..(421): NCBI GI: 221109075 Blast Desc: : similar to , partial [Hydra magnipapillata]
  misc_feature (170)..(468): NCBI GI: 156380925 Blast Desc: [Nematostella vectensis] gi|156219067|gb|EDO39954.1| [Nematostella vectensis]
  misc_feature (14)..(274): NCBI GI: 221120303 Blast Desc: [Hydra magnipapillata]
  misc_feature (13)..(471): NCBI GI: 196004728 Blast Desc: TRIADDRAFT_63921 [Trichoplax adhaerens] gi|190586130|gb|EDV26198.1| TRIADDRAFT_63921 [Trichoplax adhaerens]
  misc_feature (9)..(320): NCBI GI: 196003710 Blast Desc: TRIADDRAFT_56055 [Trichoplax adhaerens] gi|190585621|gb|EDV25689.1| TRIADDRAFT_56055 [Trichoplax adhaerens]
  misc_feature (173)..(421): NCBI GI: 221117127 Blast Desc: : similar to [Hydra magnipapillata]
MSSNSHSSAPVFEFYYDVVCPFAYIASLRIESLAKRTSATIQWRPVLLGGIYRATEAPQGAQGSATDPMNPTKKAVFGTSFRRTLKRFQVPIDAPKEHPRKTVDALRLLHYLPHDVRAVASHALFKAYWVDHIDIAHGDTLLEVVHNALENYPESQKRVTADAFTDEGSRRALEQATADAVCRGAPGVPGFWVPDETWVDFQGEPQTGRLYWGQDRMHFLEASLLRLADRRSSISLRNLLPRCRESKILREPMKLEFWFDFASPWSYLGWTRLRMLQATFGNRLQVDFKPILLGALFKEIGAPQMPSFAISKQKRRQNTLDIFDWAKFWSAVDQQEGTSEQGVGFQWPDVFPIRSPWLLRCAIVNPKCVPILYESCWKSNRNVSDNTVLKQVLQEAGFNGEELLTEAGSPPVKEALFANTKVAKDAGFCGVPTYRVFRKGTEDTWVQAGDFVWGQDEIAVVEDMISGWDASSNELARPRCVINSQL

SEQ ID NO: 6788 - DNA, 1481 bp, Muscodor strobelii
  misc_feature: SGI EST ID NO. CUFF.16958.1
  misc_feature: Variant of the nucleotide sequence at SEQ ID NO 6786
tcccgatcgatgcaccgaaggaacaccctcgcaagacggtagatgcactccggttactgcattacctacctcatgacgtgagagcagttgctagtcatgcgctgttcaaggcatattgggtagatcatattgacatagctcacggagatactctacttgaagttgtgcacaacgctctagagaattacccagaatctcagaagcgagttacggcagatgcgttcactgacgaggggtcaaggagagcacttgaacaggcgacagcagatgcagtatgtcggggcgcgcctggagtacctggattctgggttcccgacgagacttgggtggattttcaaggtgagccacagacagggcgtttgtactggggacaagaccgtatgcatttccttgaagcaagcttgcttcgtcttgctgatcgccggtcatcgatctcacttcgaaatctactccctcggtgtagggagagcaagattctgagggaacctatgaagcttgagttttggttcgatttcgcgagtccatggtcatatcttggttggacgcgtctaagaatgttgcaagccacctttgggaatcggttgcaggttgatttcaagccaatactgctgggtgccctgtttaaggagtgagttattgcgatccttagagaatctggactaatgtcaagttcaaaggattggtgcaccacaaatgccgagctttgcgatatcgaaacaaaagcgtcgacagaacactctcgacatatttgactgggcgaaattttggagcgccgtagatcaacaagaaggcacctcggaacagggcgtcggattccaatggccagatgtgtttccaatcagaagtccttggttgcttaggtgtgccattgtgaatccgaaatgcgttcctattttgtatgaatcgtgctggaagtcgaaccgcaatgttagtgacaacactgttctcaaacaggtactgcaggaggcaggattcaacggtgaggagcttctaaccgaggccggatctccacccgtgaaagaagccctattcgcgaatacaaaggttgcaaaagacgcaggcttctgcggagtcccgacgtaccgagtatttcgaaaaggaacagaagatacgtgggttcaggcaggtgactttgtctggggacaagatgaaatcgctgttgttgaggatatgattagtgggtgggacgctagttccaatgaactagcaagaccaagatgtgtcattaattcacagctgtagttgtcatgatagtggacaaaggcattagtatatgaactgatcatattccctgcatcagtcatcgatggccgaaaatccgaatatactcctgagatgatccctacactctcaatcatacaccacgttgtccgaagcgggctaacttgccgtcgcattcgcctggatcccgaagacagtggcaagcaataaaaaaacaaaaatagtacatattatactctacataatatgagtcatggtcg

SEQ ID NO: 6789 - DNA, 393 bp, Muscodor strobelii
  misc_feature: SGI cDNA ID NO. 562014
  misc_feature: Encodes the peptide sequence at SEQ ID NO 6790
atgcacgctccgtccattctccaagtcgtctttaccggcctattggctgcgtctgctgtgaacagctaccaagttgctggtcctcaggagttggctcgtcgccatgtaggcttcctgcttaccttcgccattccggcctttgggtcgcccgtgaccatcgaagataggagtcctgagccacaccactccggaaagaaaaatggtggcaaaaacaatgccaagcgagaccctgagccgctgccagagcctcatcatgctggtaaaaagggtggcaaagtgaacgcccgggagcccgaacctgagccacaccatgcgggcaagaagggcgggaaggtcaatgctcgcgagcccgagcctcaccactctggaaagaagggtggtaagaacaactag

SEQ ID NO: 6790 - protein, 130 aa, Muscodor strobelii
  misc_feature: SGI Peptide ID NO. 562014
MHAPSILQVVFTGLLAASAVNSYQVAGPQELARRHVGFLLTFAIPAFGSPVTIEDRSPEPHHSGKKNGGKNNAKRDPEPLPEPHHAGKKGGKVNAREPEPEPHHAGKKGGKVNAREPEPHHSGKKGGKNN

SEQ ID NO: 6791 - DNA, 801 bp, Muscodor strobelii
  misc_feature: SGI cDNA ID NO. 562015
  misc_feature: Elevated expression when VOC is produced
  misc_feature: Encodes the peptide sequence at SEQ ID NO 6792
atggcgaaaacataccacccaatctccctcgacgaagagcctttcctgacaaaagagcaagtgacacaacagactttcacatggagagatgagagagatgcttggagatcaagaatccagaggataagtccgcattggatttggttagcacatacagtcctgctgtccacatcaattgtattattcgcattgtcatattgcgcgaaaacggccagactgtccgactcggaatacacgagaaaattctcagcttggtcaccggctgcgagcgcagtgaaatatgaaacacaacattttgacctacctgcgatagctgaagggccattcataggaaaaggaccagaggtggacgagcgatgggagtacatctcacgtattggcgacacgatgatatcgcacgaggaaatggtcggtctaggactcaacccggacatctctttaaaaataacagacccaaacggcaagccaggatatcgggtggccatcgaagtgttccaccaactgcattgtctgaatctgctgcgacagaatgtttacaaagaccattacgcacccatgggaggcgacacagcagacccagagatggatttacagggacatctcaaccattgcattgatgcactacgacaattcgtcatgtgccagggtgatatcggagtgttcagtttcaactatccgttcaacgatggggatccttggccagagtatagtacgccacacacatgccgcaatttcgagagcattcggcaatggggcatcgatcacacagtcccccgtgctccaggcgaacctgagcattga

SEQ ID NO: 6792 - protein, 266 aa, Muscodor strobelii
  misc_feature: SGI Peptide ID NO. 562015
  misc_feature (1)..(257): NCBI GI: 39953454 Blast Desc: MGG_08831 [Magnaporthe grisea 70-15] gi|145021234|gb|EDK05363.1| MGG_08831 [Magnaporthe grisea 70-15]
  misc_feature (1)..(257): NCBI GI: 46139913 Blast Desc: FG11471.1 [Gibberella zeae PH-1]
  misc_feature (44)..(257): NCBI GI: 256726448 Blast Desc: NECHADRAFT_60615 [Nectria haematococca mpVI 77-13-4]
  misc_feature (42)..(257): NCBI GI: 212541640 Blast Desc: conserved [Penicillium marneffei ATCC 18224] gi|210068274|gb|EEA22366.1| conserved [Penicillium marneffei ATCC 18224]
  misc_feature (38)..(252): NCBI GI: 116192827 Blast Desc: CHGG_06131 [Chaetomium globosum CBS 148.51] gi|88182044|gb|EAQ89512.1| CHGG_06131 [Chaetomium globosum CBS 148.51]
  misc_feature (31)..(257): NCBI GI: 242798176 Blast Desc: conserved [Talaromyces stipitatus ATCC 10500] gi|218716461|gb|EED15882.1| conserved [Talaromyces stipitatus ATCC 10500]
  misc_feature (73)..(257): NCBI GI: 154308124 Blast Desc: BC1G_08229 [Botryotinia fuckeliana B05.10] gi|150853114|gb|EDN28306.1| BC1G_08229 [Botryotinia fuckeliana B05.10]
  misc_feature (24)..(257): NCBI GI: 261358390 Blast Desc: conserved [Verticillium albo-atrum VaMs.102]
  misc_feature (46)..(260): NCBI GI: 169605931 Blast Desc: SNOG_05998 [Phaeosphaeria nodorum SN15] gi|111065942|gb|EAT87062.1| SNOG_05998 [Phaeosphaeria nodorum SN15]
  misc_feature (38)..(260): NCBI GI: 189198165 Blast Desc: conserved [Pyrenophora tritici-repentis Pt-1C-BFP] gi|187981368|gb|EDU47994.1| conserved [Pyrenophora tritici-repentis Pt-1C-BFP]
  misc_feature: Useful for introducing or modulating the production of volatile compounds
MAKTYHPISLDEEPFLTKEQVTQQTFTWRDERDAWRSRIQRISPHWIWLAHTVLLSTSIVLFALSYCAKTARLSDSEYTRKFSAWSPAASAVKYETQHFDLPAIAEGPFIGKGPEVDERWEYISRIGDTMISHEEMVGLGLNPDISLKITDPNGKPGYRVAIEVFHQLHCLNLLRQNVYKDHYAPMGGDTADPEMDLQGHLNHCIDALRQFVMCQGDIGVFSFNYPFNDGDPWPEYSTPHTCRNFESIRQWGIDHTVPRAPGEPEH

SEQ ID NO: 6793 - DNA, 1962 bp, Muscodor strobelii
  misc_feature: SGI EST ID NO. CUFF.16951.0
  misc_feature: Variant of the nucleotide sequence at SEQ ID NO 6791
aggcaatagctcaacaaccctgctcaaacatggctactagcagatctagtttgatcttggcatttctgcttcatctctgcgacgcagtgcaccaaaattggaagaatttgtaacagcatgaactcactcaactaggactcggtcaatagggcaggactaaattcacctcacgagagtgattacgagcaggctgggattccactgagccagctgaacacggtgtttggtctgatttgtcacctctcgatagataaactattttctgtcaaacttagagacgggatgaatgctgattttcgcttggcttcttcgataaccgagaaaccacagctagatctccgccgagacgtgaatcttcataatagtctattgatgatgtgactttggatgaaaatctggggacaatgtttcgacatgtcgcaagcccctgtcccaatgtaacgtcttgtccaaatggggtaacgcagaggtggacctgtacgtttcggcttggcagctctcactgagttgagacatcacaaccgaatctgagacgcctgtgtcacagaggagcccactctactgtaaaagaggccgtatgaaaatgaatgttgaatgaggtgttggcgtcaaggattggggtcgagatggctagcatcctgtgtgcatgcaagcctccagcgttatggtcttccggcgagagctttgcatctttccttctttccgtccttctcactgccggttggtctgttgcgattagttgtttacttcgtgtttgcttctgtttctatattacttctattcttgcacctggtgtgctttacttttgatgatattctaacataatggcgaaaacataccacccaatctccctcgacgaagagcctttcctgacaaaagagcaagtgacacaacagactttcacatggagagatgagagagatgcttggagatcaagaatccagaggataagtccgcattggatttggttagcacatacagtcctgctgtccacatcaattgtattattcgcattgtcatattgcgcgaaaacggccagactgtccgactcggaatacacgagaaaattctcagcttggtcaccggctgcgagcgcagtgaaatatgaaacacaacattttgacctacctgcgatagctgaagggccattcataggaaaaggaccagaggtggacgagcgatgggagtacatctcacgtattggcgacacgatgatatcgcacgaggaaatggtcggtctaggactcaacccggacatctctttaaaaataacagacccaaacggcaagccaggatatcgggtggccatcgaagtgttccaccaactgcattgtctgaatctgctgcgacagaatgtttacaaagaccattacgcacccatgggaggcgacacagcagacccagagatggatttacagggacatctcaaccattgcattgatgcactacgacaattcgtcatgtgccagggtgatatcggagtgttcagtttcaactatccgttcaacgatggggatccttggccagagtatagtacgccacacacatgccgcaatttcgagagcattcggcaatggggcatcgatcacacagtcccccgtgctccaggcgaacctgagcattgagaattgctagcattagaagtgcatcaatacctcgtgctcaaaaaataaataaagaattagatacagtagagtcgcacaccgtgttcgcgaaagctcgtaactcttccaattccatgctggcttacattgaggagcgagatgccatgcctacctgataactaaaggaagcagacacttagtaatacgcctgatagcactagcaacatacccttccaaatgaaacatcatttattcgaaatcagaccgtacatattatatcaaaattgaaacaaccaatcattcagatgatatcagggaagtatacgccgtgttgttcattatatcatgaccgttgcgc

SEQ ID NO: 6794 - DNA, 1035 bp, Muscodor strobelii
  misc_feature: SGI cDNA ID NO. 562016
  misc_feature: Reduced expression when VOC is produced
  misc_feature: Encodes the peptide sequence at SEQ ID NO 6795
atggatgttattctcgaagtttgggacaccttcgtaggtgactacgtctttgctcatgcctatcctctgaagcagcctgtcgcttcacaatatctcgatgtcgccaactcgaccacatccacttggcaatacaagcctgcctcatcatatatctcgatcgagccaagccaatatgcctaccagagcgcatgggacagagacaacattttccggcaggccgtctcgctatggtcaattaccgtagtctttggcttcctgctgtattttgtattcgcctcattatcttactggctagtgtttgacaagaacaccaaaacgcaccccaaatacctaaagaaccagatttccatggagattagacaatccatcgagtctatgcctggcatggctgttctcacaactcttttctggctcctcgaggttcgcggccacactaagctctacgacacgcctgctgagggaccgggcatgtggtacgagttcttccaattcccgttcttcctcgtcttcaccgacgccctgatctacctcatccaccgcgggttgcaccacccgagcgtctacaagcacctgcacaagccacaccacaaatggatcatgcccactccctacgcctcgcacgccttccacccgatcgacggattctcgcagtcgttcccctaccacttgttccccatcttgttccccctgaacaagtatgcttcggtggcgcttttcgtcttcgtcaacttctggaccatcatgattcacgacggcgagtacgtggccaacagccccgtgatcaacggtgccgcgtgccacaccatgcaccacttgtacttcaactacaactacggccagtacaccactctctgggaccgtctcggcggcagctaccgcaagcccgacgacgacctcttcgagaaggagaagaagatgagcgagcagcagtggaaggcccaggtcaaggagatggagaagatggtcaaagaggtcgagggcaaggacgaccggtcctacgaccccccaacggccgaggccaagaagacaaaataa

SEQ ID NO: 6795 - protein, 344 aa, Muscodor strobelii
  misc_feature: SGI Peptide ID NO. 562016
  misc_feature (164)..(272): Pfam Id: PF04116 Pfam Desc: Fatty acid hydroxylase superfamily
  misc_feature (1)..(333): NCBI GI: 212546185 Blast Desc: sterol delta 5,6-desaturase ERG3 [Penicillium marneffei ATCC 18224] gi|210064766|gb|EEA18861.1| sterol delta 5,6-desaturase ERG3 [Penicillium marneffei ATCC 18224]
  misc_feature (1)..(343): NCBI GI: 242824129 Blast Desc: sterol delta 5,6-desaturase ERG3 [Talaromyces stipitatus ATCC 10500] gi|218713117|gb|EED12542.1| sterol delta 5,6-desaturase ERG3 [Talaromyces stipitatus ATCC 10500]
  misc_feature (1)..(344): NCBI GI: 85109451 Blast Desc: C-5 sterol desaturase [Neurospora crassa OR74A] gi|51701418|sp|Q7SBB6.1|ERG3_NEUCR RecName: Full= C-5 sterol desaturase; AltName: Full=Sterol-C5-desaturase; AltName: C-5
  misc_feature (1)..(334): NCBI GI: 258569649 Blast Desc: C-5 sterol desaturase [Uncinocarpus reesii 1704] gi|237903898|gb|EEP78299.1| C-5 sterol desaturase [Uncinocarpus reesii 1704]
  misc_feature (1)..(333): NCBI GI: 240110879 Blast Desc: Sterol delta 5,6-desaturase, [Coccidioides posadasii C735 delta SOWgp]
  misc_feature (1)..(343): NCBI GI: 156048466 Blast Desc: SS1G_08964 [Sclerotinia sclerotiorum 1980] gi|154693361|gb|EDN93099.1| SS1G_08964 [Sclerotinia sclerotiorum 1980]
  misc_feature (1)..(333): NCBI GI: 119196471 Blast Desc: C-5 sterol desaturase [Coccidioides immitis RS]
  misc_feature (1)..(343): NCBI GI: 238842772 Blast Desc: C-5 sterol desaturase [Microsporum canis CBS 113480]
  misc_feature (1)..(333): NCBI GI: 154297423 Blast Desc: BC1G_12308 [Botryotinia fuckeliana B05.10] gi|150858504|gb|EDN33696.1| BC1G_12308 [Botryotinia fuckeliana B05.10]
  misc_feature (1)..(344): NCBI GI: 261187628 Blast Desc: C-5 sterol desaturase [Ajellomyces dermatitidis SLH14081] gi|239594124|gb|EEQ76705.1| C-5 sterol desaturase [Ajellomyces dermatitidis SLH14081]
  misc_feature (56)..(307): SWISSPROT Homolog: EC 1.14.21.6 Lathosterol oxidase
  misc_feature: Useful for introducing or modulating the production of volatile compounds
MDVILEVWDTFVGDYVFAHAYPLKQPVASQYLDVANSTTSTWQYKPASSYISIEPSQYAYQSAWDRDNIFRQAVSLWSITVVFGFLLYFVFASLSYWLVFDKNTKTHPKYLKNQISMEIRQSIESMPGMAVLTTLFWLLEVRGHTKLYDTPAEGPGMWYEFFQFPFFLVFTDALIYLIHRGLHHPSVYKHLHKPHHKWIMPTPYASHAFHPIDGFSQSFPYHLFPILFPLNKYASVALFVFVNFWTIMIHDGEYVANSPVINGAACHTMHHLYFNYNYGQYTTLWDRLGGSYRKPDDDLFEKEKKMSEQQWKAQVKEMEKMVKEVEGKDDRSYDPPTAEAKKTK

SEQ ID NO: 6796 - DNA, 1662 bp, Muscodor strobelii
  misc_feature: SGI EST ID NO. CUFF.17108.1
  misc_feature: Variant of the nucleotide sequence at SEQ ID NO 6794
ggagagatgattattactgctccgaccctggcttgcgttgtttgcctcgctctattgccaccaccttaaacactgccgagttgcttaataggacggccgatattttccagagcagttgccaaacgagattcgcgtcaaggtcacgccaaataaatatatgtactatatatactctacagccactaatcttatctcctacttcttccatatttcaaccactcgacattgctagttgtctcactcaccactacgatccagtcgcattgcccgccatggatgttattctcgaagtttgggacaccttcgtaggtgactacgtctttgctcatgcctatcctctgaagcagcctgtcgcttcacaatatctcgatgtcgccaactcgaccacatccacttggcaatacaagcctgcctcatcatatatctcgatcgagccaagccaatatgcctaccagagcgcatgggacagagacaacattttccggcaggccgtctcgctatggtcaattaccgtagtctttggcttcctgctgtattttgtattcgcctcattatcttactggctagtgtttgacaagaacaccaaaacgcaccccaaatacctaaagaaccagatttccatggagattagacaatccatcgagtctatgcctggcatggctgttctcacaactcttttctggctcctcgaggttcgcggccacactaagctctacgacacgcctgctgagggaccgggcatgtggtacgagttcttccaattcccgttcttcctcgtcttcaccgacgccctgatctacctcatccaccgcgggttgcaccacccgagcgtctacaagcacctgcacaagccacaccacaaatggatcatgcccactccctacgcctcgcacgccttccacccgatcgacggattctcgcagtcgttcccctaccacttgttccccatcttgttccccctgaacaagtatgcttcggtggcgcttttcgtcttcgtcaacttctggaccatcatgattcacgacggcgagtacgtggccaacagccccgtgatcaacggtgccgcgtgccacaccatgcaccacttgtacttcaactacaactacggccagtacaccactctctgggaccgtctcggcggcagctaccgcaagcccgacgacgacctcttcgagaaggagaagaagatgagcgagcagcagtggaaggcccaggtcaaggagatggagaagatggtcaaagaggtcgagggcaaggacgaccggtcctacgaccccccaacggccgaggccaagaagacaaaataaactactcgcgactaccaatacccaagtcctcagtgaaaaagcaatcggggacgagttcatgatttacaagcgaaactactgggacaaattgtggcctttgttgattaatgaagcgctctctaagcaagagggatcaaaaactgtatatagctactagaagatgaaagccctcgttactcaacagtccgagtggtgaagcatgacaaagtgcacggcgacggcgtttagacggcatcgtttgattagacattctcccattatccatacgggttgggagatattatgaattttaactccttaatcaatgtaacaatctcagatgaagtgaaaataatttggctttagtcgtgttagg

SEQ ID NO: 6797 - DNA, 390 bp, Muscodor strobelii
  misc_feature: SGI cDNA ID NO. 562017
  misc_feature: Reduced expression when VOC is produced
  misc_feature: Encodes the peptide sequence at SEQ ID NO 6798
atgtacgccctctacgcgctcgtcttcctcgtcctcacatccggcactgcgctatacttgacccggaactcatggctacatcgtcttcccgaggtcactgcccgtctaccaggctcgtcgtacctctactcacggctaccgaacacattttctggcgacatcgaagccggtctctcgagcagtacttttgacttgggtgcaaatgtagactccggagacggccgcgccgggctggacaataaggccaaagccgagatattaaagatcatgaagaagagacgcatgcagtttgacgaggcacgccgtgtctatatggagcagcgcttcagcgataacggaatcggccccgacggtagaccaagagatcccaagtttgtcagcttttcgtga

SEQ ID NO: 6798 - protein, 129 aa, Muscodor strobelii
  misc_feature: SGI Peptide ID NO. 562017
  misc_feature (1)..(124): Pfam Id: PF09435 Pfam Desc: Fungal protein of function (DUF2015)
  misc_feature (43)..(124): Pfam Id: PF09435 Pfam Desc: Fungal protein of function (DUF2015)
  misc_feature (2)..(129): NCBI GI: 256725810 Blast Desc: NECHADRAFT_102732 [Nectria haematococca mpVI 77-13-4]
  misc_feature (2)..(129): NCBI GI: 226290827 Blast Desc: conserved [Paracoccidioides brasiliensis Pb18]
  misc_feature (2)..(129): NCBI GI: 226285812 Blast Desc: conserved [Paracoccidioides brasiliensis Pb01]
  misc_feature (2)..(129): NCBI GI: 116191815 Blast Desc: CHGG_05625 [Chaetomium globosum CBS 148.51] gi|88181538|gb|EAQ89006.1| CHGG_05625 [Chaetomium globosum CBS 148.51]
  misc_feature (2)..(129): NCBI GI: 39953479 Blast Desc: MGG_08833 [Magnaporthe grisea 70-15] gi|145021232|gb|EDK05361.1| MGG_08833 [Magnaporthe grisea 70-15]
  misc_feature (2)..(129): NCBI GI: 261187646 Blast Desc: conserved [Ajellomyces dermatitidis SLH14081] gi|239594133|gb|EEQ76714.1| conserved [Ajellomyces dermatitidis SLH14081] gi|239608888|gb|EEQ85875.1| conserved [Ajellomyces
  misc_feature (2)..(129): NCBI GI: 145250069 Blast Desc: An15g00090 [Aspergillus niger] gi|134082059|emb|CAK42178.1| protein product [Aspergillus niger]
  misc_feature (2)..(129): NCBI GI: 242824070 Blast Desc: conserved [Talaromyces stipitatus ATCC 10500] gi|218713108|gb|EED12533.1| conserved [Talaromyces stipitatus ATCC 10500]
  misc_feature (2)..(129): NCBI GI: 212546199 Blast Desc: conserved [Penicillium marneffei ATCC 18224] gi|210064773|gb|EEA18868.1| conserved [Penicillium marneffei ATCC 18224]
  misc_feature (2)..(129): NCBI GI: 70984074 Blast Desc: conserved [Aspergillus fumigatus Af293] gi|66845185|gb|EAL85520.1| conserved [Aspergillus fumigatus Af293] gi|159122343|gb|EDP47464.1| conserved [Aspergillus A1163]
  misc_feature: Useful for introducing or modulating the production of volatile compounds
MYALYALVFLVLTSGTALYLTRNSWLHRLPEVTARLPGSSYLYSRLPNTFSGDIEAGLSSSTFDLGANVDSGDGRAGLDNKAKAEILKIMKKRRMQFDEARRVYMEQRFSDNGIGPDGRPRDPKFVSFS

SEQ ID NO: 6799 - DNA, 1413 bp, Muscodor strobelii
  misc_feature: SGI EST ID NO. CUFF.16963.0
  misc_feature: Variant of the nucleotide sequence at SEQ ID NO 6797
ctcaaatgggagtcgcaggagcagctgagaccaacacttcacccgtacatcttcacaaaggacagtcaaccgcctcgtctcacggcctcatcaagatggcttgaggagatacaatacgctctgccaaactcattcactgcacttctgccattcctgaattttcttccttttctttctcatttgtcatagttcctttcgttccgaactccgccatccttgtattctgcgacagcgcccgagtttcacctcaaacccgaacctacggaccgccgctctcgctcctctactttcatcatcgtgaaccatccgcgacagactcgcatccattcctaatacaccaacacaacgaataagatgtacgccctctacgcgctcgtcttcctcgtcctcacatccggcactgcgctatacttgacccggaactcatggctacatcgtcttcccgaggtcactgcccgtctaccaggctcgtcgtacctctactcacggctaccgaacacattttctggcgacatcgaagccggtctctcgagcagtacttttgacttgggtgcaaatgtagactccggagacggccgcgccgggctggacaataaggccaaagccgagatattaaagatcatgaagaagagacgcatgcagtttgacgaggcacgccgtgtctatatggagcagcgcttcagcgataacggaatcggccccgacggtagaccaagagatcccaagtttgtcagcttttcgtgaagtgcgatgcggtatacacgcaagacaggtggaacactcgcttgtattgaaataatggcctcgtgggatgaggtggactgatgacgaacacgcctagtccaatgttgtatgactagatttttgtctcgggcagaaatacctctacacacatgaacctacgacactttccttttaatctgtttgagataccacaacccgactacgcggacacgcccgcgctcttttcacttttatctcatttggttatggcgtaaggagtttggttgcaatacggttcggcttatacttgccgcgtcaaaagtgcgggaagaggaaacagtgatgatacgaagacgaagttctgtcactacactacccatggagattaggggctgttttcattgatactggcagagtgagctaaagaagggacaagagtaataagatccaaacttggtgcttcttcgcccgacgacttgcatataccaaacctctcgcatccaatttgctttttatacagtagtggcagttggtgataatacagtttcaatcgccgtaaggagaggaggtctgaatgcgcgcgcatttcgtacgtatttcagataagaaccaaaatattatgacatgcatataccaataaaacatatcgttttttttatctagctattagagaataaaatctgttacgga

SEQ ID NO: 6800 - DNA, 459 bp, Muscodor strobelii
  misc_feature: SGI cDNA ID NO. 562018
  misc_feature: Reduced expression when VOC is produced
  misc_feature: Encodes the peptide sequence at SEQ ID NO 6801
atggcttccaacgtttccgctgacttgatctgggagatcgtccgtcccaacaactccttccttgtcaagcgcaagcactctggcggagttcagttctctcgcgaccctcttaacctgaccaacgtccactctcgcaagtacgccggtttcgtcaacgacaaggccatcggtgttatccctgccgagaagggtggtgtccatgtcatcagcaagaagaccgctactgcccaccaaccctacaagtccaccagcaccactacctaccacggcggaaagaccgctcgcaagacctacgttgctgtcgccaaccagaccgccaagtctggttaccgttctgatctccgtcaagccgccgttgcccgcacatctgccatccgcgcatctcagagagagcccaagcccgcccccgagcccaagctccgtggcaacaaggccaagaaggccgccgagtcctcttag

SEQ ID NO: 6801 - protein, 152 aa, Muscodor strobelii
  misc_feature: SGI Peptide ID NO. 562018
  misc_feature (6)..(137): Pfam Id: PF01778 Pfam Desc: Ribosomal L28e protein family
  misc_feature (6)..(130): Pfam Id: PF01778 Pfam Desc: Ribosomal L28e protein family
  misc_feature (3)..(152): NCBI GI: 171686982 Blast Desc: protein product [Podospora anserina] gi|170943452|emb|CAP69105.1| protein product [Podospora anserina]
  misc_feature (3)..(147): NCBI GI: 39953490 Blast Desc: MGG_08834 [Magnaporthe grisea 70-15] gi|145021231|gb|EDK05360.1| MGG_08834 [Magnaporthe grisea 70-15]
  misc_feature (3)..(143): NCBI GI: 85109457 Blast Desc: NCU06210 [Neurospora crassa OR74A] gi|28924570|gb|EAA33690.1| [Neurospora crassa OR74A]
  misc_feature (4)..(152): NCBI GI: 226285813 Blast Desc: PAAG_03664 [Paracoccidioides brasiliensis Pb01]
  misc_feature (3)..(149): NCBI GI: 242824061 Blast Desc: 60S ribosomal protein L28 [Talaromyces stipitatus ATCC 10500] gi|218713106|gb|EED12531.1| 60S ribosomal protein L28 [Talaromyces stipitatus ATCC 10500]
  misc_feature (3)..(142): NCBI GI: 46111243 Blast Desc: FG02503.1 [Gibberella zeae PH-1]
  misc_feature (3)..(143): NCBI GI: 116191819 Blast Desc: CHGG_05627 [Chaetomium globosum CBS 148.51] gi|88181540|gb|EAQ89008.1| CHGG_05627 [Chaetomium globosum CBS 148.51]
  misc_feature (4)..(150): NCBI GI: 238842779 Blast Desc: conserved [Microsporum canis CBS 113480]
  misc_feature (1)..(143): NCBI GI: 154300847 Blast Desc: 60S ribosomal protein L28 [Botryotinia fuckeliana B05.10] gi|150856471|gb|EDN31663.1| 60S ribosomal protein L28 [Botryotinia fuckeliana B05.10]
  misc_feature (1)..(143): NCBI GI: 156048490 Blast Desc: SS1G_08976 [Sclerotinia sclerotiorum 1980] gi|154693373|gb|EDN93111.1| SS1G_08976 [Sclerotinia sclerotiorum 1980]
  misc_feature: Useful for introducing or modulating the production of volatile compounds
MASNVSADLIWEIVRPNNSFLVKRKHSGGVQFSRDPLNLTNVHSRKYAGFVNDKAIGVIPAEKGGVHVISKKTATAHQPYKSTSTTTYHGGKTARKTYVAVANQTAKSGYRSDLRQAAVARTSAIRASQREPKPAPEPKLRGNKAKKAAESS

SEQ ID NO: 6802 - DNA, 924 bp, Muscodor strobelii
  misc_feature: SGI EST ID NO. CUFF.16969.0
  misc_feature: Variant of the nucleotide sequence at SEQ ID NO 6800
cagaaatcagtcgcatcaccaaactgaacgacgacaagcctgaaaatcgataccccgcgacagccgacataccgcagagtccgatactcacccatacgcaacaatggcttccaacgtttccgctgacttgatctgggagatcgtccgtcccaacaactccttccttgtcaagcgcaagcactctggcggagttcagttctctcgcgaccctcttaacctgaccaacgtccactctcgcaagtacgccggtttcgtcaacgacaaggccatcggtgttatccctgccgagaagggtggtgtccatgtcatcagcaagaagaccgctactgcccaccaaccctacaagtccaccagcaccactacctaccacggcggaaagaccgctcgcaagacctacgttgctgtcgccaaccagaccgccaagtctggttaccgttctgatctccgtcaagccgccgttgcccgcacatctgccatccgcgcatctcagagagagcccaagcccgcccccgagcccaagctccgtggcaacaaggccaagaaggccgccgagtcctcttaggagaatggagacatggaaagtgtagagatgggccagggaagaacagcatcggaaagcagcatgggtttcgaggttaggtcaaccggcgaataggcatcatgctacttttgggcagctcagtagtcgcaatcgaaaataaagagaagcgagactacgcaaacacatttcaagtgtcacctaatacccttcctttcggctgtgactgcacttgtgggacgttttcaagcatgattatttagaaattctctacctaaagacaaacagggttagacggaatattctatggcgcaaaaccaatatgttttcgcttggaacggtaagtcaagaagtgaatcgggagaggacgaaagaggtgctcctcg

SEQ ID NO: 6803 - DNA, 993 bp, Muscodor strobelii
  misc_feature: SGI cDNA ID NO. 562019
  misc_feature: Encodes the peptide sequence at SEQ ID NO 6804
atggttaaagctgtcgttgctggtgcctctggcggtattggccagcccctctctctgcttctcaagctgagtcctcttgtcgacgagctcgccctctacgatgtagtcaacacccccggtgttgctaccgatctttctcacatctcttccacagctaaagtcacaggctacctccccaaggatgatggtggcaaggccgctatgaaggatgctgatatcattgtcattcccgctggtattccccgcaagcctggcatgacccgtgacgacctgttcaacatcaacgccggtatcgttaagggccttatcgagatcgctgctgaggtcgcccccaaggctttcatccttgtcatctccaaccctgtcaactctaccgtgcccattgccgccgaggttctcaaggctaagggtgtcttcaacccccagaagctcttcggtgtcaccactctcgacatcgtccgtgctgagacctttgtcgccgagatcgccggcaagaagaccggctccgagttgaccgttcctgttgtcggtggccactccggagagactatcgttcctctcttcagccaagtcagccccagcacttctatccctgacgacaagtacgatgcgcttgtcaaccgtgttcagttcggtggtgatgaagtcgtcaaggccaaggatggtgctggttccgccactctgtccatggctttcgctggttaccgcttcgccgagaaggtcctgaaggctgtcaagggtgagaagggtctggtcgagcccagcttcgtttacctgcccggtgttcccggtggtgaggagatcgccaagtccactggcgtcgacttcttctccgtccccgttgagcttggtcccaacggtgtcgagaaggccaccaaccccttggctggtatcactgacaaggagaagaccctgctggacgccgccatcaagggtctgaagggcaacatcgagaagggcattacctttgcccataatcctcctcaaaagtaa

SEQ ID NO: 6804 - protein, 330 aa, Muscodor strobelii
  misc_feature: SGI Peptide ID NO. 562019
  misc_feature (148)..(324): Pfam Id: PF02866 Pfam Desc: lactate/malate dehydrogenase, alpha/beta C-terminal domain
  misc_feature (2)..(146): Pfam Id: PF00056 Pfam Desc: lactate/malate dehydrogenase, NAD binding domain
  misc_feature (1)..(330): NCBI GI: 46111245 Blast Desc: FG02504.1 [Gibberella zeae PH-1]
  misc_feature (1)..(330): NCBI GI: 256726211 Blast Desc: [Nectria haematococca mpVI 77-13-4]
  misc_feature (1)..(330): NCBI GI: 39953501 Blast Desc: conserved [Magnaporthe grisea 70-15] gi|145021230|gb|EDK05359.1| conserved [Magnaporthe grisea 70-15]
  misc_feature (1)..(330): NCBI GI: 261360116 Blast Desc: malate dehydrogenase [Verticillium albo-atrum VaMs.102]
  misc_feature (3)..(330): NCBI GI: 154300849 Blast Desc: conserved [Botryotinia fuckeliana B05.10] gi|150856472|gb|EDN31664.1| conserved [Botryotinia fuckeliana B05.10]
  misc_feature (1)..(330): NCBI GI: 85109459 Blast Desc: malate dehydrogenase, mitochondrial precursor [Neurospora crassa OR74A] gi|28924571|gb|EAA33691.1| malate dehydrogenase, mitochondrial precursor [Neurospora crassa OR74A]
  misc_feature (1)..(330): NCBI GI: 116191823 Blast Desc: malate dehydrogenase, mitochondrial precursor [Chaetomium globosum CBS 148.51] gi|88181542|gb|EAQ89010.1| malate dehydrogenase, mitochondrial precursor [Chaetomium CBS
  misc_feature (1)..(330): NCBI GI: 255931575 Blast Desc: Pc12g04750 [Penicillium chrysogenum Wisconsin 54-1255] gi|211581963|emb|CAP80102.1| Pc12g04750 [Penicillium chrysogenum Wisconsin 54-1255]
  misc_feature (1)..(330): NCBI GI: 259480065 Blast Desc: TPA: malate dehydrogenase, NAD-dependent (AFU_orthologue; AFUA_6G05210) [Aspergillus nidulans FGSC A4]
  misc_feature (3)..(330): NCBI GI: 156048488 Blast Desc: SS1G_08975 [Sclerotinia sclerotiorum 1980] gi|154693372|gb|EDN93110.1| SS1G_08975 [Sclerotinia sclerotiorum 1980]
  misc_feature (3)..(323): SWISSPROT Homolog: EC 1.1.1.37 Malate dehydrogenase
MVKAVVAGASGGIGQPLSLLLKLSPLVDELALYDVVNTPGVATDLSHISSTAKVTGYLPKDDGGKAAMKDADIIVIPAGIPRKPGMTRDDLFNINAGIVKGLIEIAAEVAPKAFILVISNPVNSTVPIAAEVLKAKGVFNPQKLFGVTTLDIVRAETFVAEIAGKKTGSELTVPVVGGHSGETIVPLFSQVSPSTSIPDDKYDALVNRVQFGGDEVVKAKDGAGSATLSMAFAGYRFAEKVLKAVKGEKGLVEPSFVYLPGVPGGEEIAKSTGVDFFSVPVELGPNGVEKATNPLAGITDKEKTLLDAAIKGLKGNIEKGITFAHNPPQK

SEQ ID NO: 6805 - DNA, 2559 bp, Muscodor strobelii
  misc_feature: SGI EST ID NO. CUFF.17462.0
  misc_feature: Variant of the nucleotide sequence at SEQ ID NO 6803
ctccatgcccctctgacccgcaaacccaacaaccatacctcatccaatctcataaccgaagctcccttactactactccactcatctcaacaagtccatcaagatggttaaagctgtcgttgctggtgcctctggcggtattggccagcccctctctctgcttctcaagctgagtcctcttgtcgacgagctcgccctctacgatgtagtcaacacccccggtgttgctaccgatctttctcacatctcttccacagctaaagtcacaggctacctccccaaggatgatggtggcaaggccgctatgaaggatgctgatatcattgtcattcccgctggtattccccgcaagcctggcatgacccgtgacgacctgttcaacatcaacgccggtatcgttaagggccttatcgagatcgctgctgaggtcgcccccaaggctttcatccttgtcatctccaaccctgtcaactctaccgtgcccattgccgccgaggttctcaaggctaagggtgtcttcaacccccagaagctcttcggtgtcaccactctcgacatcgtccgtgctgagacctttgtcgccgagatcgccggcaagaagaccggctccgagttgaccgttcctgttgtcggtggccactccggagagactatcgttcctctcttcagccaagtcagccccagcacttctatccctgacgacaagtacgatgcgcttgtcaaccgtgttcagttcggtggtgatgaagtcgtcaaggccaaggatggtgctggttccgccactctgtccatggctttcgctggttaccgcttcgccgagaaggtcctgaaggctgtcaagggtgagaagggtctggtcgagcccagcttcgtttacctgcccggtgttcccggtggtgaggagatcgccaagtccactggcgtcgacttcttctccgtccccgttgagcttggtcccaacggtgtcgagaaggccaccaaccccttggctggtatcactgacaaggagaagaccctgctggacgccgccatcaagggtctgaagggcaacatcgagaagggcattacctttgcccataatcctcctcaaaagtaaatttctcccccctctatgccatgacattttgattgcggatgatttgcgctgcttcgcatggcataaagagtcggatactttgctgctcagaaagactgcgtttcgtttgcctttggcgggaagataaacgtcttgatctgtaccgagattccttctttagtggtgtcattcggctgaggtagagaaaaacggcaagaaagaggaaaggctcataaacaagacaaaagaaataaacagacggtcgggtgcaatatgcttgtctatttgccaaagcagcgaacctaaagaattgagagatcgattttgactgacttatcttttctttctactcttaggttgtaatacgtgagtgcccaaatgaacgccataatatacccatccattacgttaccccttaaccgggccacacttcatctccgcaccgcattccgcatatcttctatcctgtacgtacacctacgtacatgcctcgaaacctgcgtttacctgttcgagctgtcgctgatgggaggatgatcggtggagcgacaatagaggaaagtttaggaggataaaggagcacatagtcccaagacaggcaaaatgagaggattgggatctaatgaactggttgattgggaagtctcttgtaatcattcatcattactcgtcggtattgtgtcttgtagtctatgtcttcatatctccgattctgtgactcctgtgtacaatgtcaatgcacatctgagagcacatatgttatgatacccatgcctatgacaatttgccatctggtgtttggccactgcgtactggctatagctcggttagagggtcaaatcgacctctggatagggcttgagtcttgagcgctctatgccttcctgctgaccgtaggcgtcatatgtctacagtgagatttgggtatggccggtttccgagcctgtttcacagtaccctgactgtggctgagtatctggtggagtttatcgttgtggacttctcttatagtttcgtctcctttcgtgatcatcctagtttgggcttgtattctacttggacgaagccacggtcttgatctggaatacggcacccggtaactcgctagattcggcctggacggtagcagtgatgcccatagctgctagcgcaccgcgcaggatgccgcaggggaaccagagaaactggcattacgtgttagagaaatcgtctggtccggaatagtggaaagaagagccatgaggggggtactaacaggctgagctcgaactacactttgaccccctgcctcggcactcatacgcgatagcggccgaaaggcgttgtctgtcaggacgtagacaccgcggtggttcgtcttgaggttgtcgacttgcttcttgaagactagcatccagaggtctttgcatacgaattttatggcgtcgagggtatctgtgaagcgggggcggtcgcgggagaacctgggggttgggtgttagctt

SEQ ID NO: 6806 - DNA, 642 bp, Muscodor strobelii
  misc_feature: SGI cDNA ID NO. 562020
  misc_feature: Encodes the peptide sequence at SEQ ID NO 6807
atgtcgtccttcgaccaaccactcccgccattcaacgcctcagaccccagcgcgacattcgtcgggacgtcatgtctcgacttcctgctcatcgagctcgtgcccatggcctaccgcgtcgcgaacgagctcgaggaggcggctgccgaacaatcgaatactgttaaggacaataatacgagtagcggtggtactgtggtgggtagaaggaaaggaaggatggatgaggatgaggagcgggaggcggttttcttccgtcttgaggggttgggctatagagttgggttgggtcttgttgagcggttctcccgcgaccgcccccgcttcacagataccctcgacgccataaaattcgtatgcaaagacctctggatgctagtcttcaagaagcaagtcgacaacctcaagacgaaccaccgcggtgtctacgtcctgacagacaacgcctttcggccgctatcgcgtatgagtgccgaggcagggggtcaaagtgtagttcgagctcagccttttctctggttcccctgcggcatcctgcgcggtgcgctagcagctatgggcatcactgctaccgtccaggccgaatctagcgagttaccgggtgccgtattccagatcaagaccgtggcttcgtccaagtag

SEQ ID NO: 6807 - protein, 213 aa, Muscodor strobelii
  misc_feature: SGI Peptide ID NO. 562020
  misc_feature (25)..(211): Pfam Id: PF04051 Pfam Desc: Transport protein particle (TRAPP) component, Bet3
  misc_feature (3)..(211): NCBI GI: 164425246 Blast Desc: trafficking protein particle complex subunit 6B [Neurospora crassa OR74A] gi|157070850|gb|EAA33692.2| trafficking protein particle complex subunit 6B [Neurospora crassa OR74A]
  misc_feature (3)..(210): NCBI GI: 261360117 Blast Desc: trafficking protein particle complex subunit 6A [Verticillium albo-atrum VaMs.102]
  misc_feature (3)..(211): NCBI GI: 39953514 Blast Desc: MGG_08836 [Magnaporthe grisea 70-15] gi|145021229|gb|EDK05358.1| MGG_08836 [Magnaporthe grisea 70-15]
  misc_feature (3)..(209): NCBI GI: 256725809 Blast Desc: [Nectria haematococca mpVI 77-13-4]
  misc_feature (3)..(212): NCBI GI: 154300843 Blast Desc: BC1G_10721 [Botryotinia fuckeliana B05.10] gi|150856469|gb|EDN31661.1| BC1G_10721 [Botryotinia fuckeliana B05.10]
  misc_feature (3)..(209): NCBI GI: 46111247 Blast Desc: FG02505.1 [Gibberella zeae PH-1]
  misc_feature (3)..(209): NCBI GI: 226283155 Blast Desc: BET3 family protein [Paracoccidioides brasiliensis Pb01]
  misc_feature (3)..(209): NCBI GI: 119196409 Blast Desc: CIMG_02579 [Coccidioides immitis RS]
  misc_feature (3)..(204): NCBI GI: 225684900 Blast Desc: BET3 family protein [Paracoccidioides brasiliensis Pb03]
  misc_feature (3)..(208): NCBI GI: 240110890 Blast Desc: Transport protein particle (TRAPP) component, Bet3 family protein [Coccidioides posadasii C735 delta SOWgp]
MSSFDQPLPPFNASDPSATFVGTSCLDFLLIELVPMAYRVANELEEAAAEQSNTVKDNNTSSGGTVVGRRKGRMDEDEEREAVFFRLEGLGYRVGLGLVERFSRDRPRFTDTLDAIKFVCKDLWMLVFKKQVDNLKTNHRGVYVLTDNAFRPLSRMSAEAGGQSVVRAQPFLWFPCGILRGALAAMGITATVQAESSELPGAVFQIKTVASSK

SEQ ID NO: 6808 - DNA, 3327 bp, Muscodor strobelii
  misc_feature: SGI EST ID NO. CUFF.17463.3
  misc_feature: Variant of the nucleotide sequence at SEQ ID NO 6806
ggagcatctgaaggtagcttgacacctctaaaccctccaacaacctgaatgacttgagacaaaacagatttttagaggcattgttgcgctgatattcacgagaaacaaagagcttaacctcagcttctgggccaatacaatacatcgcggcgtctcccttgcacctccgattcgcgcaatcgcagtgagctgcgataacaccacgacaatcagtttccaccctcttcggtgccagatcctaacctcgccgatcatacttgcgagtttcgcagtggaaggagaatcgaatcggcgggcccgcgaactctcggaaccgtcggggcggcactgggcgagccaacgaaacagaacacaacacgaataaagccgaaatagccgttttgactgcgtctacctaccattcgaaatgtcgtccttcgaccaaccactcccgccattcaacgcctcagaccccagcgcgacattcgtcgggacgtcatgtctcgacttcctgctcatcgagctcgtgcccatggcctaccgcgtcgcgaacgagctcgaggaggcggctgccgaacaatcgaatactgttaaggacaataatacgagtagtgcggaagcgcgggatagtgtttcggtgagcacagcggctggtgtgggggggaactacggtaggcggtggtactgtggtgggtagaaggaaaggaaggatggatgaggatgaggagcgggaggcggttttcttccgtcttgaggggttgggctatagagttgggttgggtcttgttgagcggttctcccgcgaccgcccccgcttcacagataccctcgacgccataaaattcgtatgcaaagacctctggatgctagtcttcaagaagcaagtcgacaacctcaagacgaaccaccgcggtgtctacgtcctgacagacaacgcctttcggccgctatcgcgtatgagtgccgaggcagggggtcaaagtgtagttcgagctcagccttttctctggttcccctgcggcatcctgcgcggtgcgctagcagctatgggcatcactgctaccgtccaggccgaatctagcgagttaccgggtgccgtattccagatcaagaccgtggcttcgtccaagtagaatacaagcccaaactaggatgatcacgaaaggagacgaaactataagagaagtccacaacgataaactccaccagatactcagccacagtcagggtactgtgaaacaggctcggaaaccggccatacccaaatctcactgtagacatatgacgcctacggtcagcaggaaggcatagagcgctcaagactcaagccctatccagaggtcgatttgaccctctaaccgagctatagccagtacgcagtggccaaacaccagatggcaaattgtcataggcatgggtatcataacatatgtgctctcagatgtgcattgacattgtacacaggagtcacagaatcggagatatgaagacatagactacaagacacaataccgacgagtaatgatgaatgattacaagagacttcccaatcaaccagttcattagatcccaatcctctcattttgcctgtcttgggactatgtgctcctttatcctcctaaactttcctctattgtcgctccaccgatcatcctcccatcagcgacagctcgaacaggtaaacgcaggtttcgaggcatgtacgtaggtgtacgtacaggatagaagatatgcggaatgcggtgcggagatgaagtgtggcccggttaaggggtaacgtaatggatgggtatattatggcgttcatttgggcactcacgtattacaacctaagagtagaaagaaaagataagtcagtcaaaatcgatctctcaattctttaggttcgctgctttggcaaatagacaagcatattgcacccgaccgtctgtttatttcttttgtcttgtttatgagcctttcctctttcttgccgtttttctctacctcagccgaatgacaccactaaagaaggaatctcggtacagatcaagacgtttatcttcccgccaaaggcaaacgaaacgcagtctttctgagcagcaaagtatccgactctttatgccatgcgaagcagcgcaaatcatccgcaatcaaaatgtcatggcatagaggggggagaaatttacttttgaggaggattatgggcaaaggtaatgcccttctcgatgttgcccttcagacccttgatggcggcgtccagcagggtcttctccttgtcagtgataccagccaaggggttggtggccttctcgacaccgttgggctacaatcagaagtgtcagcattataggttcaacgtaatatagagaagggactgtatcttacaccaagctcaacggggacggagaagaagtcgacgccagtggacttggcgatctcctcaccaccgggaacaccgggcaggtaaacgaagctgggctcgaccagacccttctcacccttgacagccttcaggaccttctcggcgaagctagtcaagttagttatacgagatcgaaagcactgcgaagttacataccggtaaccagcgaaagccatggacagagtggcggaaccagcaccatccttggccttgacgacttcatcaccaccgaactgaacacggttgacaagcgcatcgtacttgtcgtcagggatagaagtgctggggctgacttggctgaagagaggaacgatagtctctccggagtggccaccgacaacaggaacggtcaactcggagccggtcttcttgccggcgatctcggcgacaaaggtctcagcacggacgatgtcgagagtggtgacaccgaagagcttctgggggttgaagacacccttagccttgagaacctcggcggcaatgggcacggtagagttgacagggttggagatgacaaggatgaaagccttgggggcgacctcagcagcgatctcgataaggcccttaacgataccggcgttgatgttgaacaggtcgtcacgggtcatgccaggcttgcctgttcacagcgtgtaagataaggccttaattttgaaatacgtggcaccgaaagtaggggctcacgtacggggaataccagcgggaatgacaatgatatcagcatccttcatagcggccttgccaccatcatccttggggaggtagcctgtgactttctataccagactttagcaattgcggctaggctgaaaattgaaggttactcacagctgtggaagagatgtgagaaagatcggtagcaacaccgggggtgttgactacatcgtagagggcgagctcgtcgacaagaggactcagcttgagaagcagagagaggggctgtt

SEQ ID NO: 6809 - DNA, 1272 bp, Muscodor strobelii
  misc_feature: SGI cDNA ID NO. 562021
  misc_feature: Encodes the peptide sequence at SEQ ID NO 6810
atgccgccatcagggcagctgggggcttcttttggtagtgcgggcggttcgggtggcagtgggagcggctattacaagactgggacatctaatgcgcgcgatcttcaattcaagcccagccctttctaccatatccagtcaaggattggcgacataaaaacttgtgacgctatgagccagcacaagaattccgtcaacattcgtttcatcatcggggagaatctgactctaagctgtattgtgaacgacaaatcatatcgtgtcatggtcttctgctcggccgacaaccagactgcccaggatatcgccttcccacatcaagctgagctcaaagtgaaccaggacgatgtgaaggcaaatctccggggcctgaagggcaaacctggtaccactagacctgttgacatcacagaccttctacgactcaggccgccctcatacaccaacaatattgagttcacatacgcgcttacgaacaaggtgaagaacaacaatccgtctcccgaagctaccaaattctacctggctctctatctatgcaaaaaggtgtcagtcgaagacctcgtagtcagaatcaagggcaagaagataccgaaggctaccgtcatctctgagatgaccaggaaggctaatgacccagatgtggtggccacttccactgtcctgtctctcaaatgcccgctaagctacacaagactgagaacaccatgtcgatctacactctgtaaccatgtccagtgctttgacgcgacctcatacctgcaattgcaggagcaaggaccacagtggatatgtcccatctgtaacaagccagctgcctttgagaacttggcgatcgacgactacgtcaaagatatcctagagaatacttcagattctcttgagcaggtcaccatcgaacccaatggccagtggcacaagaatgaatctgccgagagtcagcggaaaaaatcacggacctccaccgccagcgccagtatcgatgtcgacgaagatatagcgttccttccgagcggccaaggcagctcaattggagggtatagcggtgcacctgcgtacagcactcccagccgctcctttgcgacacctagtgccagctcgcgggagccgtcaggtgcacctcggtcgactaacaagcgacccgctgcggaggttattgatctcacccttagtagcgatgaggatgatgagccctttgccctccgcccacccaagagacagaacttggggacaaatgatggtagttcgcatcactatacgtcctatagttag

SEQ ID NO: 6810 - protein, 423 aa, Muscodor strobelii
  misc_feature: SGI Peptide ID NO. 562021
  misc_feature (222)..(271): Pfam Id: PF02891 Pfam Desc: MIZ/SP-RING zinc finger
  misc_feature (8)..(386): NCBI GI: 261360118 Blast Desc: MIZ zinc finger protein [Verticillium albo-atrum VaMs.102]
  misc_feature (28)..(412): NCBI GI: 256725808 Blast Desc: NECHADRAFT_62176 [Nectria haematococca mpVI 77-13-4]
  misc_feature (35)..(409): NCBI GI: 145614294 Blast Desc: MGG_08837 [Magnaporthe grisea 70-15] gi|145021228|gb|EDK05357.1| MGG_08837 [Magnaporthe grisea 70-15]
  misc_feature (35)..(417): NCBI GI: 154300865 Blast Desc: BC1G_10732 [Botryotinia fuckeliana B05.10] gi|150856480|gb|EDN31672.1| BC1G_10732 [Botryotinia fuckeliana B05.10]
  misc_feature (7)..(403): NCBI GI: 171686978 Blast Desc: protein product [Podospora anserina] gi|170943450|emb|CAP69103.1| protein product [Podospora anserina]
  misc_feature (32)..(410): NCBI GI: 116191827 Blast Desc: CHGG_05631 [Chaetomium globosum CBS 148.51] gi|88181544|gb|EAQ89012.1| CHGG_05631 [Chaetomium globosum CBS 148.51]
  misc_feature (35)..(420): NCBI GI: 212546183 Blast Desc: SUMO ligase SizA, [Penicillium marneffei ATCC 18224] gi|210064765|gb|EEA18860.1| SUMO ligase SizA, [Penicillium marneffei ATCC 18224]
  misc_feature (35)..(410): NCBI GI: 242824134 Blast Desc: SUMO ligase SizA, [Talaromyces stipitatus ATCC 10500] gi|218713118|gb|EED12543.1| SUMO ligase SizA, [Talaromyces stipitatus ATCC 10500]
  misc_feature (35)..(409): NCBI GI: 238493962 Blast Desc: SUMO ligase SizA, [Aspergillus flavus NRRL3357] gi|220694867|gb|EED51210.1| SUMO ligase SizA, [Aspergillus flavus NRRL3357]
  misc_feature (35)..(409): NCBI GI: 225554691 Blast Desc: MIZ zinc finger protein [Ajellomyces capsulatus G186AR]
MPPSGQLGASFGSAGGSGGSGSGYYKTGTSNARDLQFKPSPFYHIQSRIGDIKTCDAMSQHKNSVNIRFIIGENLTLSCIVNDKSYRVMVFCSADNQTAQDIAFPHQAELKVNQDDVKANLRGLKGKPGTTRPVDITDLLRLRPPSYTNNIEFTYALTNKVKNNNPSPEATKFYLALYLCKKVSVEDLVVRIKGKKIPKATVISEMTRKANDPDVVATSTVLSLKCPLSYTRLRTPCRSTLCNHVQCFDATSYLQLQEQGPQWICPICNKPAAFENLAIDDYVKDILENTSDSLEQVTIEPNGQWHKNESAESQRKKSRTSTASASIDVDEDIAFLPSGQGSSIGGYSGAPAYSTPSRSFATPSASSREPSGAPRSTNKRPAAEVIDLTLSSDEDDEPFALRPPKRQNLGTNDGSSHHYTSYS

SEQ ID NO: 6811 - DNA, 2617 bp, Muscodor strobelii
  misc_feature: SGI EST ID NO. CUFF.17000.0
  misc_feature: Variant of the nucleotide sequence at SEQ ID NO 6809
atagcccaatgagttggtcatcgcagccctaaggtctcatattcgattaagctaaaatttttggaccgactggactcgtctgaaattatgcgactggtgccgtgacctcatcgtattcaatggtgacaaagcccgtactatcagttgctgcactacgcgtagagttcggcacagctcgagagtagctttgctacaatttcttccaaagcactcactatcttccgatatctgctaggagaccaatctttgatcagcatacgacagctactccagagccgcgatccgattttcttcgcagcaacgactcgttacacgaaccacccaagcgcatccgattcgatcaaaaggcgctctcagagcagcctcatacaggcgcatctgcatttgcacaaacgaccgaagaacaggagtcataaacatcccagttgcgaaagggcaattttgcagcatcattggatagatccaggtctgtcgcacggagtggtggaagcgtgaaaaccaggcggccggggatttcccgcgcggtcgtggcaggaagcggagttgagccttcctcgtaaggctacctaatgtttggagtcgcgctacggttggcacctgccctcagcccaatacacttgggcatgcaccgggaatggcttcatctaacaacgaacttcgtgctcttgatcgcacattgagcacactgctcaataggaatctcatggcgatctgtagtcaagttgggttgaaaacaagcggtgtgaaagctgaattgcaaagacgaatcaaggacgcccttatcgagacacagacatcagatccacagacattcagcagaattcgagcggcgattcaaagcttcagttctggacataatacgctgcccaactcatatgggggggagtgggagtctggtatacacgccgacgctagggaaaccatcgtcatatacacaaccggcgtccctctacggtcagggaacttctcacatgccgccatcagggcagctgggggcttcttttggtagtgcgggcggttcgggtggcagtgggagcggctattacaagactgggacatctaatgcgcgcgatcttcaattcaagcccagccctttctaccatatccagtcaaggattggcgacataaaaacttgtgacgctatgagccagcacaagaattccgtcaacattcgtttcatcatcggggagaatctgactctaagctgtattgtgaacgacaaatcatatcgtgtcatggtcttctgctcggccgacaaccagactgcccaggatatcgccttcccacatcaagctgagctcaaagtgaaccaggacgatgtgaaggcaaatctccggggcctgaagggcaaacctggtaccactagacctgttgacatcacagaccttctacgactcaggccgccctcatacaccaacaatattgagttcacatacgcgcttacgaacaaggtgaagaacaacaatccgtctcccgaagctaccaaattctacctggctctctatctatgcaaaaaggtgtcagtcgaagacctcgtagtcagaatcaagggcaagaagataccgaaggctaccgtcatctctgagatgaccaggaaggctaatgacccagatgtggtggccacttccactgtcctgtctctcaaatgcccgctaagctacacaagactgagaacaccatgtcgatctacactctgtaaccatgtccagtgctttgacgcgacctcatacctgcaattgcaggagcaaggaccacagtggatatgtcccatctgtaacaagccagctgcctttgagaacttggcgatcgacgactacgtcaaagatatcctagagaatacttcagattctcttgagcaggtcaccatcgaacccaatggccagtggcacaagaatgaatctgccgagagtcagcggaaaaaatcacggacctccaccgccagcgccagtatcgatgtcgacgaagatatagcgttccttccgagcggccaaggcagctcaattggagggtatagcggtgcacctgcgtacagcactcccagccgctcctttgcgacacctagtgccagctcgcgggagccgtcaggtgcacctcggtcgactaacaagcgacccgctgcggaggttattgatctcacccttagtagcgatgaggatgatgagccctttgccctccgcccacccaagagacagaacttggggacaaatgatggtagttcgcatcactatacgtcctatagttagattgtcgtgcgtgatgctgtgtgaggagggagtgatatggcgatgtgttatggtagcggatcaccgtgtagatttagcagcaactggatgtacttgctgcactcacttctttccctgcagcttgtttacgacagcagtatgacatggctggagatcatggagggcgtctgtctgcattgcgagtggtgattcggcgttagggagtactcaagcctggcatctggtaggggaaaagggaagttcatgacacggccggttgaggagttgggctggtctgctagcctaggcggagatataccaatggtctcacactgctttgccataatcctggattttcgtgtgttctggaatagtgaagtgtctcgtaaatgcat

SEQ ID NO: 6812 - DNA, 378 bp, Muscodor strobelii
  misc_feature: SGI cDNA ID NO. 562022
  misc_feature: Reduced expression when VOC is produced
  misc_feature: Encodes the peptide sequence at SEQ ID NO 6813
atggccaaaagctcccgcgccagctcgcgcaaagcgaacaaccagcgcctgaaagccaaagtcttcggccccgtcgaatcagcgcgcgccgaacgactatccgcccgtctcctcgagcttgccgcccagccgaaacccgagcgccccgaatcagaaaccatgaacattgtagaggacgcgagcgaagagaggaaagacgagaccgcagccgcagccgtagctgatgatgcggcaatggacgtagacgctcccaagacaacctctacatcgagcaaactgagtgcaagcaagaaaggtcgcatcgaaaagcggaagaagacgagcaaaatggtgttccccaaatacggagataagaacaagaaaaagaggaagcactag

SEQ ID NO: 6813 - protein, 125 aa, Muscodor strobelii
  misc_feature: SGI Peptide ID NO. 562022
  misc_feature (1)..(122): NCBI GI: 261360119 Blast Desc: conserved [Verticillium albo-atrum VaMs.102]
  misc_feature (1)..(125): NCBI GI: 256726209 Blast Desc: NECHADRAFT_81891 [Nectria haematococca mpVI 77-13-4]
  misc_feature (1)..(124): NCBI GI: 85109465 Blast Desc: NCU06214 [Neurospora crassa OR74A] gi|28924574|gb|EAA33694.1| [Neurospora crassa OR74A]
  misc_feature (1)..(124): NCBI GI: 169776881 Blast Desc: [Aspergillus oryzae RIB40] gi|83771643|dbj|BAE61773.1| protein product [Aspergillus oryzae]
  misc_feature (1)..(124): NCBI GI: 39953538 Blast Desc: [Magnaporthe grisea 70-15] gi|145021227|gb|EDK05356.1| [Magnaporthe grisea 70-15]
  misc_feature (1)..(122): NCBI GI: 156048588 Blast Desc: [Sclerotinia sclerotiorum 1980] gi|154693422|gb|EDN93160.1| [Sclerotinia sclerotiorum 1980]
  misc_feature (1)..(122): NCBI GI: 154300863 Blast Desc: [Botryotinia fuckeliana B05.10] gi|150856479|gb|EDN31671.1| [Botryotinia fuckeliana B05.10]
  misc_feature (1)..(121): NCBI GI: 238493960 Blast Desc: conserved [Aspergillus flavus NRRL3357] gi|220694866|gb|EED51209.1| conserved [Aspergillus flavus NRRL3357]
  misc_feature (1)..(115): NCBI GI: 46111253 Blast Desc: FG02508.1 [Gibberella zeae PH-1]
  misc_feature (1)..(118): NCBI GI: 115398478 Blast Desc: [Aspergillus terreus NIH2624] gi|114191711|gb|EAU33411.1| [Aspergillus terreus NIH2624]
  misc_feature: Useful for introducing or modulating the production of volatile compounds
MAKSSRASSRKANNQRLKAKVFGPVESARAERLSARLLELAAQPKPERPESETMNIVEDASEERKDETAAAAVADDAAMDVDAPKTTSTSSKLSASKKGRIEKRKKTSKMVFPKYGDKNKKKRKH

SEQ ID NO: 6814 - DNA, 3768 bp, Muscodor strobelii
  misc_feature: SGI EST ID NO. CUFF.17020.2
  misc_feature: Variant of the nucleotide sequence at SEQ ID NO 6812
atcttgtttattatacgaccttaactcatataatcctaagactccgcacaccgtttggctacaaaaaagctaattagacattccaaccaccaagaaccctccacactcccacgcaactaccctccatccctcttcacaatggccaaaagctcccgcgccagctcgcgcaaagcgaacaaccagcgcctgaaagccaaagtcttcggccccgtcgaatcagcgcgcgccgaacgactatccgcccgtctcctcgagcttgccgcccagccgaaacccgagcgccccgaatcagaaaccatgaacattgtagaggacgcgagcgaagagaggaaagacgagaccgcagccgcagccgtagctgatgatgcggcaatggacgtagacgctcccaagacaacctctacatcgagcaaactgagtgcaagcaagaaaggtcgcatcgaaaagcggaagaagacgagcaaaatggtgttccccaaatacggagataagaacaagaaaaagaggaagcactagacagtcggggaagatatcgtaaacctatatatttcttttctgtcagagtgacaaagcattgcgctggcgttcgggttgcccctttcttcgttctgatgtgttggtacatctagttctacattaaaatgtcatacaatgatacccagtatctcggtacctcgcttcttgcctcctctcaagatctctgaggacagctgagtgttcaaatattgatcgaatgcagtacaaagcgactggtaacagataaccggctccatcaagcctactgattcacggttatctcaattttcagtgtaattcttcctgggagtgccttttctggtcataggtgaaatggttactgtgagcagtgtagacaaggcaacttcgtctacagactgctagatcagcgaagcgacaggtttggactcgactgccggttccggtggcgcagtgctatcggcagtcctgacttgtcccattgttggaagaggttcttgtgtagttttggatggggtcgacttctcggcaggcgtagaagctgcaggagtcgtggtcgactgtaactgggtactcttcgccggtgtcttggcctgcattgcaatcatcccagcctttatcgagctgggcgcaacaggtgcatgagcattagaggccggcactttattgctctgctgagctggttggcgcgaaacaggaaccgactttggctgtgatgttgccatatttggcacgctcgagctctgggtctcgattggtgctattgaatccgtcgtctggagatcatctgcatcatttgtcacttcaggcgcgggaggaggcagatcatctttctcatggacgggggccggggcatccggatctaagaatctggctgggacaccttgggcggcttgtgtgccagtaccgacccaagctcctaacatactgctccatttatattctccatcacaaagctttcgaatttccttgaaagcatacgtgttgtagtacggaaggcccgttttcggatctctatacttcgccggatggtttgtgatgacacaacgaggcgctggactcggttctgccgcatagttagcgatgtctgtacataagtgtgagtccataattatcttactgggaagcttattcatctccttgttgaatagaatccgagtttgcacagacttctctttgattgcgttttcgtcgaagttctgcataatgatacagttccgggtcgctctgccattggctggcggcgaaggtgagggaggtggcgaagcctctttggtctgatgcttttgaagattcaccttggtaggtcttgcagaattaagaggagtcttagacggccgacgtgcttgtgaagcggctgcggcggatgatggtgtgggtttaggcgtgtatgaaattgtggcgggctgggatggcgtcgttgctggagatggaggcggtggtgggagagaagggcgactatcaagttgagggattgatagaggcgactgcctttgctgcggagtgggcggagcaaggacattagaagtattactcgtgctaggtgaagagtgatagccgatcaccggcatagataagccactctttgagatgccggctggaggagctaagcagctatttggaggtttcaaacccggaggctttatcagcccaggctttgaaaggggcgcaaacatgctcgttgtatacacactaggactcggcgattgaaagtcaggaggtttcagatctggtgctttcgcatcgcctggtggcgagatctgtcgttgagagtcattatgcagtgctgtaggctcgtcgactgacttggggccttgggctgaagtaactgatacttcagtaacgccagctctggactggctgacatgcggaacctcgagggaatgactggtggtagaggatctcctgtcatcggcgtcttctctcacctgctgagcaggctgagaaacgagggtcgtctgttgcattgtctgcgtattggcacttgtgtttgaatcgccctcagtcgttgctaagagtgcattgcttttccctgctggcgtgtgaggctcgacagtcgatgtagacgcaggcccatctctgggattgtggtctttcggtgccgtctccatggaatctgctgggctcttcttatctgtgttctcagataccccgtcgtggacatttgaagctcgcttcttcttcacgggcttctcctcgatggtcacgaacttgcccacatgcttcaatttgccgtcaatccattccccaacgccgctccagaatgtgacgacaggtccctcgagggtgcggttgttcaaggcagcgagctttttcttgcgctcttcttcgcgctgtttctcggcttcctcccagcgattcaggcttttggcatttctcttctccactagggctgcttcggcaagacgctcagcttgagtcatgggcggctttttgagggcttccatctttttagccttgcgctccattgcttctatctgctgcagccgcctgacctcacgctcggccatctgtctgtgcagctgctccttgccagccatggtcgtctctcgctttgaagctctggttggcatgtcggcggcagtgggcaaccagctgaggcgctctgatttcttcttgggtcttggcttgggggcggtgggcgtggcactcatgctcgaggttcgggatgtgtcgatcttgaccttcttccgaaatttgatgggtatcgcctcttgagctttgcgctttcgggcagcctggcggctctcgcgtgcctgcttctcaagctccttctcgccttccaagtcatcaccattttcttggccatcttcatcgtctgacgatgagtccatctgcacatccgacacgttgccatcaacatcagtgaagccggcgtcgtcttcatcttcagcaaagagaagctcgaggtcgtcgtcaggctcttgtgctgcgatcacggatttcatacggtttccggcggtcgaacgcttctctcggcccatggccagccattccaccttggggatttcttcattgcctgatatctcgtcatcgctatcactatcgctcagttcggatgtgttgccatttgtctcattttcgtcagcatgggccgtctgcgcccgctcttcattttcggaagtcgccatcgtgaaattactgggagagcggcaaattcatcaatatcttcctgaagtagaaacaaatgcggccatgatttgcacctagagactacatcaccaagcgcgactatggaaaaaccgttgcgcgctgtcagtattgtgtctgcag

SEQ ID NO: 6815 - DNA, 2676 bp, Muscodor strobelii
  misc_feature: SGI cDNA ID NO. 562023
  misc_feature: Reduced expression when VOC is produced
  misc_feature: Encodes the peptide sequence at SEQ ID NO 6816
atggcgacttccgaaaatgaagagcgggcgcagacggcccatgctgacgaaaatgagacaaatggcaacacatccgaactgagcgatagtgatagcgatgacgagatatcaggcaatgaagaaatccccaaggtggaatggctggccatgggccgagagaagcgttcgaccgccggaaaccgtatgaaatccgtgatcgcagcacaagagcctgacgacgacctcgagcttctctttgctgaagatgaagacgacgccggcttcactgatgttgatggcaacgtgtcggatgtgcagatggactcatcgtcagacgatgaagatggccaagaaaatggtgatgacttggaaggcgagaaggagcttgagaagcaggcacgcgagagccgccaggctgcccgaaagcgcaaagctcaagaggcgatacccatcaaatttcggaagaaggtcaagatcgacacatcccgaacctcgagcatgagtgccacgcccaccgcccccaagccaagacccaagaagaaatcagagcgcctcagctggttgcccactgccgccgacatgccaaccagagcttcaaagcgagagacgaccatggctggcaaggagcagctgcacagacagatggccgagcgtgaggtcaggcggctgcagcagatagaagcaatggagcgcaaggctaaaaagatggaagccctcaaaaagccgcccatgactcaagctgagcgtcttgccgaagcagccctagtggagaagagaaatgccaaaagcctgaatcgctgggaggaagccgagaaacagcgcgaagaagagcgcaagaaaaagctcgctgccttgaacaaccgcaccctcgagggacctgtcgtcacattctggagcggcgttggggaatggattgacggcaaattgaagcatgtgggcaagttcgtgaccatcgaggagaagcccgtgaagaagaagcgagcttcaaatgtccacgacggggtatctgagaacacagataagaagagcccagcagattccatggagacggcaccgaaagaccacaatcccagagatgggcctgcgtctacatcgactgtcgagcctcacacgccagcagggaaaagcaatgcactcttagcaacgactgagggcgattcaaacacaagtgccaatacgcagacaatgcaacagacgaccctcgtttctcagcctgctcagcaggtgagagaagacgccgatgacaggagatcctctaccaccagtcattccctcgaggttccgcatgtcagccagtccagagctggcgttactgaagtatcagttacttcagcccaaggccccaagtcagtcgacgagcctacagcactgcataatgactctcaacgacagatctcgccaccaggcgatgcgaaagcaccagatctgaaacctcctgactttcaatcgccgagtcctagtgtgtatacaacgagcatgtttgcgcccctttcaaagcctgggctgataaagcctccgggtttgaaacctccaaatagctgcttagctcctccagccggcatctcaaagagtggcttatctatgccggtgatcggctatcactcttcacctagcacgagtaatacttctaatgtccttgctccgcccactccgcagcaaaggcagtcgcctctatcaatccctcaacttgatagtcgcccttctctcccaccaccgcctccatctccagcaacgacgccatcccagcccgccacaatttcatacacgcctaaacccacaccatcatccgccgcagccgcttcacaagcacgtcggccgtctaagactcctcttaattctgcaagacctaccaaggtgaatcttcaaaagcatcagaccaaagaggcttcgccacctccctcaccttcgccgccagccaatggcagagcgacccggaactgtatcattatgcagaacttcgacgaaaacgcaatcaaagagaagtctgtgcaaactcggattctattcaacaaggagatgaataagcttcccaaaccgagtccagcgcctcgttgtgtcatcacaaaccatccggcgaagtatagagatccgaaaacgggccttccgtactacaacacgtatgctttcaaggaaattcgaaagctttgtgatggagaatataaatggagcagtatgttaggagcttgggtcggtactggcacacaagccgcccaaggtgtcccagccagattcttagatccggatgccccggcccccgtccatgagaaagatgatctgcctcctcccgcgcctgaagtgacaaatgatgcagatgatctccagacgacggattcaatagcaccaatcgagacccagagctcgagcgtgccaaatatggcaacatcacagccaaagtcggttcctgtttcgcgccaaccagctcagcagagcaataaagtgccggcctctaatgctcatgcacctgttgcgcccagctcgataaaggctgggatgattgcaatgcaggccaagacaccggcgaagagtacccagttacagtcgaccacgactcctgcagcttctacgcctgccgagaagtcgaccccatccaaaactacacaagaacctcttccaacaatgggacaagtcaggactgccgatagcactgcgccaccggaaccggcagtcgagtccaaacctgtcgcttcgctgatctag

SEQ ID NO: 6816 - protein, 891 aa, Muscodor strobelii
  misc_feature: SGI Peptide ID NO. 562023
  misc_feature (49)..(294): Pfam Id: PF05764 Pfam Desc: YL1 nuclear protein
  misc_feature (676)..(705): Pfam Id: PF08265 Pfam Desc: YL1 nuclear protein C-terminal domain
  misc_feature (28)..(320): NCBI GI: 46111277 Blast Desc: FG02520.1 [Gibberella zeae PH-1]
  misc_feature (19)..(320): NCBI GI: 256726203 Blast Desc: NECHADRAFT_81881 [Nectria haematococca mpVI 77-13-4]
  misc_feature (44)..(322): NCBI GI: 171686822 Blast Desc: protein product [Podospora anserina] gi|170943372|emb|CAP69025.1| protein product [Podospora anserina]
  misc_feature (44)..(322): NCBI GI: 85084604 Blast Desc: NCU06453 [Neurospora crassa OR74A] gi|28918434|gb|EAA28108.1| [Neurospora crassa OR74A]
  misc_feature (15)..(322): NCBI GI: 116191987 Blast Desc: CHGG_05711 [Chaetomium globosum CBS 148.51] gi|88181624|gb|EAQ89092.1| CHGG_05711 [Chaetomium globosum CBS 148.51]
  misc_feature (44)..(320): NCBI GI: 156033175 Blast Desc: SS1G_13663 [Sclerotinia sclerotiorum 1980] gi|154699066|gb|EDN98804.1| SS1G_13663 [Sclerotinia sclerotiorum 1980]
  misc_feature (44)..(320): NCBI GI: 145608654 Blast Desc: MGG_12827 [Magnaporthe grisea 70-15] gi|145016101|gb|EDK00591.1| MGG_12827 [Magnaporthe grisea 70-15]
  misc_feature (32)..(319): NCBI GI: 121710052 Blast Desc: signal transducer, [Aspergillus clavatus NRRL 1] gi|119400792|gb|EAW11216.1| signal transducer, [Aspergillus clavatus NRRL 1]
  misc_feature (45)..(327): NCBI GI: 240105965 Blast Desc: CPC735_055280 [Coccidioides posadasii C735 delta SOWgp]
  misc_feature (45)..(327): NCBI GI: 119192782 Blast Desc: CIMG_00768 [Coccidioides immitis RS]
  misc_feature: Useful for introducing or modulating the production of volatile compounds
MATSENEERAQTAHADENETNGNTSELSDSDSDDEISGNEEIPKVEWLAMGREKRSTAGNRMKSVIAAQEPDDDLELLFAEDEDDAGFTDVDGNVSDVQMDSSSDDEDGQENGDDLEGEKELEKQARESRQAARKRKAQEAIPIKFRKKVKIDTSRTSSMSATPTAPKPRPKKKSERLSWLPTAADMPTRASKRETTMAGKEQLHRQMAEREVRRLQQIEAMERKAKKMEALKKPPMTQAERLAEAALVEKRNAKSLNRWEEAEKQREEERKKKLAALNNRTLEGPVVTFWSGVGEWIDGKLKHVGKFVTIEEKPVKKKRASNVHDGVSENTDKKSPADSMETAPKDHNPRDGPASTSTVEPHTPAGKSNALLATTEGDSNTSANTQTMQQTTLVSQPAQQVREDADDRRSSTTSHSLEVPHVSQSRAGVTEVSVTSAQGPKSVDEPTALHNDSQRQISPPGDAKAPDLKPPDFQSPSPSVYTTSMFAPLSKPGLIKPPGLKPPNSCLAPPAGISKSGLSMPVIGYHSSPSTSNTSNVLAPPTPQQRQSPLSIPQLDSRPSLPPPPPSPATTPSQPATISYTPKPTPSSAAAASQARRPSKTPLNSARPTKVNLQKHQTKEASPPPSPSPPANGRATRNCIIMQNFDENAIKEKSVQTRILFNKEMNKLPKPSPAPRCVITNHPAKYRDPKTGLPYYNTYAFKEIRKLCDGEYKWSSMLGAWVGTGTQAAQGVPARFLDPDAPAPVHEKDDLPPPAPEVTNDADDLQTTDSIAPIETQSSSVPNMATSQPKSVPVSRQPAQQSNKVPASNAHAPVAPSSIKAGMIAMQAKTPAKSTQLQSTTTPAASTPAEKSTPSKTTQEPLPTMGQVRTADSTAPPEPAVESKPVASLI

SEQ ID NO: 6817 - DNA, 3806 bp, Muscodor strobelii
  misc_feature: SGI EST ID NO. CUFF.17021.1
  misc_feature: Variant of the nucleotide sequence at SEQ ID NO 6815
ctgcagacacaatactgacagcgcgcaacggtttttccatagtcgcgcttggtgatgtagtctctaggtgcaaatcatggccgcatttgtttctacttcaggaagatattgatgaatttgccgctctcccagtaatttcacgatggcgacttccgaaaatgaagagcgggcgcagacggcccatgctgacgaaaatgagacaaatggcaacacatccgaactgagcgatagtgatagcgatgacgagatatcaggcaatgaagaaatccccaaggtggaatggctggccatgggccgagagaagcgttcgaccgccggaaaccgtatgaaatccgtgatcgcagcacaagagcctgacgacgacctcgagcttctctttgctgaagatgaagacgacgccggcttcactgatgttgatggcaacgtgtcggatgtgcagatggactcatcgtcagacgatgaagatggccaagaaaatggtgatgacttggaaggcgagaaggagcttgagaagcaggcacgcgagagccgccaggctgcccgaaagcgcaaagctcaagaggcgatacccatcaaatttcggaagaaggtcaagatcgacacatcccgaacctcgagcatgagtgccacgcccaccgcccccaagccaagacccaagaagaaatcagagcgcctcagctggttgcccactgccgccgacatgccaaccagagcttcaaagcgagagacgaccatggctggcaaggagcagctgcacagacagatggccgagcgtgaggtcaggcggctgcagcagatagaagcaatggagcgcaaggctaaaaagatggaagccctcaaaaagccgcccatgactcaagctgagcgtcttgccgaagcagccctagtggagaagagaaatgccaaaagcctgaatcgctgggaggaagccgagaaacagcgcgaagaagagcgcaagaaaaagctcgctgccttgaacaaccgcaccctcgagggacctgtcgtcacattctggagcggcgttggggaatggattgacggcaaattgaagcatgtgggcaagttcgtgaccatcgaggagaagcccgtgaagaagaagcgagcttcaaatgtccacgacggggtatctgagaacacagataagaagagcccagcagattccatggagacggcaccgaaagaccacaatcccagagatgggcctgcgtctacatcgactgtcgagcctcacacgccagcagggaaaagcaatgcactcttagcaacgactgagggcgattcaaacacaagtgccaatacgcagacaatgcaacagacgaccctcgtttctcagcctgctcagcaggtgagagaagacgccgatgacaggagatcctctaccaccagtcattccctcgaggttccgcatgtcagccagtccagagctggcgttactgaagtatcagttacttcagcccaaggccccaagtcagtcgacgagcctacagcactgcataatgactctcaacgacagatctcgccaccaggcgatgcgaaagcaccagatctgaaacctcctgactttcaatcgccgagtcctagtgtgtatacaacgagcatgtttgcgcccctttcaaagcctgggctgataaagcctccgggtttgaaacctccaaatagctgcttagctcctccagccggcatctcaaagagtggcttatctatgccggtgatcggctatcactcttcacctagcacgagtaatacttctaatgtccttgctccgcccactccgcagcaaaggcagtcgcctctatcaatccctcaacttgatagtcgcccttctctcccaccaccgcctccatctccagcaacgacgccatcccagcccgccacaatttcatacacgcctaaacccacaccatcatccgccgcagccgcttcacaagcacgtcggccgtctaagactcctcttaattctgcaagacctaccaaggtgaatcttcaaaagcatcagaccaaagaggcttcgccacctccctcaccttcgccgccagccaatggcagagcgacccggaactgtatcattatgcagaacttcgacgaaaacgcaatcaaagagaagtctgtgcaaactcggattctattcaacaaggagatgaataagcttcccaaaccgagtccagcgcctcgttgtgtcatcacaaaccatccggcgaagtatagagatccgaaaacgggccttccgtactacaacacgtatgctttcaaggaaattcgaaagctttgtgatggagaatataaatggagcagtatgttaggagcttgggtcggtactggcacacaagccgcccaaggtgtcccagccagattcttagatccggatgccccggcccccgtccatgagaaagatgatctgcctcctcccgcgcctgaagtgacaaatgatgcagatgatctccagacgacggattcaatagcaccaatcgagacccagagctcgagcgtgccaaatatggcaacatcacagccaaagtcggttcctgtttcgcgccaaccagctcagcagagcaataaagtgccggcctctaatgctcatgcacctgttgcgcccagctcgataaaggctgggatgattgcaatgcaggccaagacaccggcgaagagtacccagttacagtcgaccacgactcctgcagcttctacgcctgccgagaagtcgaccccatccaaaactacacaagaacctcttccaacaatgggacaagtcaggactgccgatagcactgcgccaccggaaccggcagtcgagtccaaacctgtcgcttcgctgatctagcagtctgtagacgaagttgccttgtctacactgctcacagtaaccatttcacctatgaccagaaaaggcactcccaggaagaattacactgaaaattgagataaccgtgaatcagtaggcttgatggagccggttatctgttaccagtcgctttgtactgcattcgatcaatatttgaacactcagctgtcctcagagatcttgagaggaggcaagaagcgaggtaccgagatactgggtatcattgtatgacattttaatgtagaactagatgtaccaacacatcagaacgaagaaaggggcaacccgaacgccagcgcaatgctttgtcactctgacagaaaagaaatatataggtttacgatatcttccccgactgtctagtgcttcctctttttcttgttcttatctccgtatttggggaacaccattttgctcgtcttcttccgcttttcgatgcgacctttcttgcttgcactcagtttgctcgatgtagaggttgtcttgggagcgtctacgtccattgccgctgttcgaagtagtattagtagctggctgcatgcaatagtcgataattcgccatatacgcaccatcatcagctacggctgcggctgcggtctcgtctttcctctcttcgctcgcgtcctctacaatgttcatggtttctgattcggggcgctcgggtttcggctgggcggcaagctcgaggagacgggcggatagtcgttcggcgcgcgctgattcgacggggccgaagactttggctttcaggcgctggttgttcgctttgcgcgagctggcgcgggagcttttggccattgtgaagagggatggagggtagttgcgtgggagtgtggagggttcttggtggttggaatgtctaattagcttttttgtagccaaacggtgtgcggagtcttaggattatatgagttaaggtcgtataataaacaagataggtacttacagatcgttgcagtgtatttc

SEQ ID NO: 6818 - DNA, 783 bp, Muscodor strobelii
  misc_feature: SGI cDNA ID NO. 562024
  misc_feature: Reduced expression when VOC is produced
  misc_feature: Encodes the peptide sequence at SEQ ID NO 6819
atgcatcacagtcgacggaagtcaggtcatttctccaccaactcatctatgaccgatgtccgtaaagcaggaaccaatacagatgcctcccgttccaggcgaccacagactctgtctcggaaacagacgcctcaagtcctgccgaagctaggaaagaacccacgagatcgcgagagagaatgggaggaagaacgatggtacgacgatgagcgcgagagctttcctcaatattgtatgtcctgcgagaagcaattcattgcacaggacgaaagattcctttattgctctgaggcgtgccgtaagcatgaccaaagcggtataagtctgtcacagtcatccatgaagacgcatgacatctatagtggtggcagcttgccattccacgcagctggaaatccagagcctcgagacatcatcccacgtgcctcaccatctcggcctagctccaactatttctcaccaccaacaactcctaccagctctcagtatactagcgcagtctcagccttgcgatcgttaaacaggcgacctccaagcccgccatctccagtggcaagcagtgccagtatttggccctttgcacgaagcgctgcaaacagccccagtacttcatacacaaccccttcgcatttttattcgtcgacatacgatggagcatataccgcctcggcgtacagccacatgggcactggcatgtcgtccacggatcgaccgctaccttcgcgacaccactcggcctatgcaaggcctaaaagcatacagcttattcaacctaccggataa

SEQ ID NO: 6819 - protein, 260 aa, Muscodor strobelii
  misc_feature: SGI Peptide ID NO. 562024
  misc_feature (1)..(258): NCBI GI: 261360387 Blast Desc: conserved [Verticillium albo-atrum VaMs.102]
  misc_feature (1)..(258): NCBI GI: 116207284 Blast Desc: CHGG_02935 [Chaetomium globosum CBS 148.51] gi|88183532|gb|EAQ91000.1| CHGG_02935 [Chaetomium globosum CBS 148.51]
  misc_feature (1)..(258): NCBI GI: 171685804 Blast Desc: protein product [Podospora anserina] gi|170942863|emb|CAP68516.1| protein product [Podospora anserina]
  misc_feature (1)..(258): NCBI GI: 46124729 Blast Desc: FG06742.1 [Gibberella zeae PH-1]
  misc_feature (1)..(258): NCBI GI: 256733200 Blast Desc: [Nectria haematococca mpVI 77-13-4]
  misc_feature (1)..(258): NCBI GI: 85109443 Blast Desc: NCU06203 [Neurospora crassa OR74A] gi|28924563|gb|EAA33683.1| NCU06203 [Neurospora crassa OR74A]
  misc_feature (4)..(258): NCBI GI: 145602113 Blast Desc: [Magnaporthe grisea 70-15] gi|145010553|gb|EDJ95209.1| [Magnaporthe grisea 70-15]
  misc_feature (2)..(258): NCBI GI: 154300708 Blast Desc: [Botryotinia fuckeliana B05.10] gi|150856549|gb|EDN31741.1| [Botryotinia fuckeliana B05.10]
  misc_feature (2)..(258): NCBI GI: 156048356 Blast Desc: [Sclerotinia sclerotiorum 1980] gi|154693306|gb|EDN93044.1| [Sclerotinia sclerotiorum 1980]
  misc_feature (13)..(103): NCBI GI: 119480313 Blast Desc: NFIA_082350 [Neosartorya fischeri NRRL 181] gi|119408339|gb|EAW18288.1| conserved [Neosartorya fischeri NRRL 181]
  misc_feature: Useful for introducing or modulating the production of volatile compounds
MHHSRRKSGHFSTNSSMTDVRKAGTNTDASRSRRPQTLSRKQTPQVLPKLGKNPRDREREWEEERWYDDERESFPQYCMSCEKQFIAQDERFLYCSEACRKHDQSGISLSQSSMKTHDIYSGGSLPFHAAGNPEPRDIIPRASPSRPSSNYFSPPTTPTSSQYTSAVSALRSLNRRPPSPPSPVASSASIWPFARSAANSPSTSYTTPSHFYSSTYDGAYTASAYSHMGTGMSSTDRPLPSRHHSAYARPKSIQLIQPTG

SEQ ID NO: 6820 - DNA, 2618 bp, Muscodor strobelii
  misc_feature: SGI EST ID NO. CUFF.17390.0
  misc_feature: Variant of the nucleotide sequence at SEQ ID NO 6818
caccaccccacggcaaagggcggcagggtaccacccttttggcgtaggggtccaaatatattatcgtcttgttcggttctgcccttccccctcgatcacttatgacttgactactgccagatcagctctcttgctcaactatcaatactgctcaaggacaccatcagcctacgaatgatattgacaaccacgaaatcctcaatttgctgctaaaccagtcgacaattgtcgtgctctcgtctcttgtgctccctgaccggctccattaccccggattgttaccagtcccagggccccaattctcgaagctctgactagacagcgtcggcgttaaccaacacaacaaattgactttaggtcaggcttggtagatagaggcctcgtctctggacccggataatcgcacgccgtgattgtgccatcgcacgaaactgttgtcaacagagagactcattcgaggtgtcactctgaacactgatttggtttattgcgggcccactggtgtggtcaatatcgtcatatcacggaatatcagtgccgtctgtcattccacggcattggaccagttgatcaactacccgagacttacgtcctaaatataagacttgctccgtctcatgtcttatctctcacactagtattgaaatacgaaacaaggacttcttagtcatcttcaagtttgaacctctatatactacacctcgaaactccaactttcacgttcggcctgggcactctgatccaactcaacgagacctcaaggagattcatattgattacgagttgccgatagctataatgcatcacagtcgacggaagtcaggtcatttctccaccaactcatctatgaccgatgtccgtaaagcaggaaccaatacagatgcctcccgttccaggcgaccacagactctgtctcggaaacagacgcctcaagtcctgccgaagctaggaaagaacccacgagatcgcgagagagaatgggaggaagaacgatggtacgacgatgagcgcgagagctttcctcaatattgtatgtcctgcgagaagcaattcattgcacaggacgaaagattcctttattgctctgaggcgtaagccgttgctcaacccaccaatgagattgccaagtcactcacatcattattcaggtgccgtaagcatgaccaaagcggtataagtctgtcacagtcatccatgaagacgcatgacatctatagtggtggcagcttgccattccacgcagctggaaatccagagcctcgagacatcatcccacgtgcctcaccatctcggcctagctccaactatttctcaccaccaacaactcctaccagctctcagtatactagcgcagtctcagccttgcgatcgttaaacaggcgacctccaagcccgccatctccagtggcaagcagtgccagtatttggccctttgcacgaagcgctgcaaacagccccagtacttcatacacaaccccttcgcatttttattcgtcgacatacgatggagcatataccgcctcggcgtacagccacatgggcactggcatgtcgtccacggatcgaccgctaccttcgcgacaccactcggcctatgcaaggcctaaaagcatacagcttattcaacctaccggataaagcgtcccgattgagtcttctggatctgcctcatactgaagaccgccaacggagcgtgtgtcggcgcgctccgtaaatacagtatttatcttgagatactagtcggatgctgtggtctgctcgttgcggcgtgctgatttccaaatcatcccggaacagggtatgctatttctcgctttggggctgtttaggggtcgggctgcttgccctgaaacaggttgacgagacgttataatacgggatgagggatagatgcagggtctaatggctgaacacgaccacctatgctcaggatcctcgtctcgacttcatttcacgccacgatttttccacgaactgagaatatgacatgtcacactccgcaaaacgaggttgatagtggttgtacacgaccatcgcaccccttattcaattggaccagctgttatcagctcttgaacacattctcaccgacgtttatcagacttactgtgtcgcaattgcgacatctcatggagtctatcaagataatgttgaacatacgatctcgcgactgtcagtgtggacgcgataggatatgacgacttcatggatatacgaagatgcatacacttctcacctcagcatatggattccactttatttttgtgcaatagagatacctcggcagcttatttggagttttggtgaatagagagcgcgagacgggattaagcaccattggcgtaaccggatgggccagacttgccatgcgagtgatggaacatattatggatttattggataagggtgcctgctatatcagtcttaaggacaccaatcatttgtatgatcacagcttaaagaattaaatcagtactcctcacattattatctgttgttcttctctacgtatggactatattattttgatattgatcatgtctagcatcataggttatcattggctttcatactgtcgctcagtattatggcacggtcatcaacagcaagcatcgtag

SEQ ID NO: 6821 - DNA, 1542 bp, Muscodor strobelii
  misc_feature: SGI cDNA ID NO. 562025
  misc_feature: Encodes the peptide sequence at SEQ ID NO 6822
atgccgactacattcggcaccctcatcgttcaacagcgtatcatccgtctatctattattactcctgttttcaaggacgtcgaatgctcaacgagaccctgttaccaatttctgccgccggttcggccatcaaacagcagtcatcgatcgacatctctacatcgatggtggcttcgtgaactggaaccctttatctatcaacccgacgaactacacgagtacgaagtgaacccaattgcagcacgagccaagtacacctacggaatactgacgagatatctatcagatacgtggctcttatatcaagacctagaccacctaggcatagcgggcatgccgcagctctacgcaaacctatccaaaaatgcgactctaccctcagtcaacggcggcatactctgggccgacgacgtgaataagaagatatacctattcggaggtgagtattacaacgagccgcccgaagactacattccctacgcctacgatgttctcgagaatacctgggacgaagtcggtgatcttcctgatgatataaactccgtatcgtacggcgccggcgtctctgtatcgtccatcggagaggcgttctactacggcggatggttaagcaataattcagtgcaagggtggaatggcgataggaaagctgtggatacgcttattcggtattcatttgatacgcaaacatggacgaatacctcgggtccagatgccatcggacgcgcggagggcgcaatggtctacatacccgccagcgacggcggcatgctcgtctactttggcggacttcaggacgccggaaatggcacggtggtcggtcaatcgatgggacagattttcgtctacgatgtgctgagcgcgcggtggtacgagcagacggcgaccggtgacgtcccggagatgcggacgagattctgcgctggtgttacgtgggcggctgatcagtcgagttacaatatttacatttacggtggcgccggtttgccgccttctactgggggctttgacgatgtttatgttctgtcgatcccgtcgttcacgtggattaacttctggccccagagcggtgatgcgcatccgaggaatagcttgagttgtgatgttattgatggcgcacagatgataattatcggcgggtcgttcccgttggataattcgtcttgtgatgctgctgagcagtttggtagtcataatttggaccttgggaagcagaaccctcaaggtgttgcttggcatctttaccagcccactgtgactagctacgtcgtaccgactgatatctcagaagtcataggaggtggcctcaagggtggcgctacgaaaactgttccagatggtggttttagtgacgaggacttgggtgctcaacgtgagtatgattccaatactctcgccgcaatcaagagtcaaataggtttcggccagcgtttaggagtaagcatcgtttctcacaaatgtcctaaccagtatctgaacagtcgaacgcaaattcacacccgcagagcgaaaaccaacgagacgtatttcaagggcgactga

SEQ ID NO: 6822 - protein, 513 aa, Muscodor strobelii
  misc_feature: SGI Peptide ID NO. 562025
  misc_feature (87)..(454): NCBI GI: 116207286 Blast Desc: CHGG_02936 [Chaetomium globosum CBS 148.51] gi|88183533|gb|EAQ91001.1| CHGG_02936 [Chaetomium globosum CBS 148.51]
  misc_feature (95)..(454): NCBI GI: 261360385 Blast Desc: conserved [Verticillium albo-atrum VaMs.102]
  misc_feature (97)..(454): NCBI GI: 156059814 Blast Desc: SS1G_03920 [Sclerotinia sclerotiorum 1980] gi|154701706|gb|EDO01445.1| SS1G_03920 [Sclerotinia sclerotiorum 1980]
  misc_feature (94)..(456): NCBI GI: 256733201 Blast Desc: NECHADRAFT_38610 [Nectria haematococca mpVI 77-13-4]
  misc_feature (94)..(473): NCBI GI: 46124727 Blast Desc: FG06741.1 [Gibberella zeae PH-1]
  misc_feature (112)..(454): NCBI GI: 154315948 Blast Desc: BC1G_04546 [Botryotinia fuckeliana B05.10] gi|150846942|gb|EDN22135.1| BC1G_04546 [Botryotinia fuckeliana B05.10]
  misc_feature (94)..(470): NCBI GI: 46112787 Blast Desc: FG02895.1 [Gibberella zeae PH-1]
  misc_feature (87)..(470): NCBI GI: 169776778 Blast Desc: [Aspergillus oryzae RIB40] gi|238502135|ref|XP_002382301.1| conserved [Aspergillus flavus NRRL3357] gi|83771591|dbj|BAE61722.1| protein product oryzae]
  misc_feature (95)..(454): NCBI GI: 85087122 Blast Desc: NCU00363 [Neurospora crassa OR74A] gi|28918929|gb|EAA28598.1| conserved [Neurospora crassa OR74A]
  misc_feature (112)..(454): NCBI GI: 171680964 Blast Desc: protein product [Podospora anserina] gi|170940440|emb|CAP65667.1| protein product [Podospora anserina]
MPTTFGTLIVQQRIIRLSIITPVFKDVECSTRPCYQFLPPVRPSNSSHRSTSLHRWWLRELEPFIYQPDELHEYEVNPIAARAKYTYGILTRYLSDTWLLYQDLDHLGIAGMPQLYANLSKNATLPSVNGGILWADDVNKKIYLFGGEYYNEPPEDYIPYAYDVLENTWDEVGDLPDDINSVSYGAGVSVSSIGEAFYYGGWLSNNSVQGWNGDRKAVDTLIRYSFDTQTWTNTSGPDAIGRAEGAMVYIPASDGGMLVYFGGLQDAGNGTVVGQSMGQIFVYDVLSARWYEQTATGDVPEMRTRFCAGVTWAADQSSYNIYIYGGAGLPPSTGGFDDVYVLSIPSFTWINFWPQSGDAHPRNSLSCDVIDGAQMIIIGGSFPLDNSSCDAAEQFGSHNLDLGKQNPQGVAWHLYQPTVTSYVVPTDISEVIGGGLKGGATKTVPDGGFSDEDLGAQREYDSNTLAAIKSQIGFGQRLGVSIVSHKCPNQYLNSRTQIHTRRAKTNETYFKGD

SEQ ID NO: 6823 - DNA, 855 bp, Muscodor strobelii
  misc_feature: SGI cDNA ID NO. 562026
  misc_feature: Reduced expression when VOC is produced
  misc_feature: Encodes the peptide sequence at SEQ ID NO 6824
atgggcgccgaccctatcgcagaagcggtcccaaccgcggctggcgaagacgcaccgacagcaacctctgaagtcgcatcagaagcagctcctgatgcagttccagatgccgcgaccaagtcccaggataggctggcccggttccgcgctctgcaagctcgcgcaaagacatcgtccgaccagaacctcaaggaggccacaaaggagtcccagcgactcgccacagacccctccgcccttaccgcattgcaccgccgccgcgacatagccgcacacaagctcctcaaggccgagaccgaggaaggcggccaggacttcgagaggaagagagcgtgggactggaccatcgaagagagcgagcgctgggacaaacgcctgaagaaacgcgccgcgaaccgcgacaacaacgcattccaagactaccgcgccgagagcaacaaggtgtacaagcgacaagttcagaacctcgcccccgatctcgagggctacgagaaggagaagatgaaggctatcgaaaaggcggcagcgtccggcggactggaaattatcgagatggaagacggagagctcgtcgccgtcgacaaggacggcaccttctactccaccgccgactctaccaacttcaccgacaacaagccagacaaggcggccgtcgatcggctcgttgccgacctgcagaaagcagaagacgtacgcatgcgcaagcggagggagcgcatggcaaaggatggcgaggatggcgacatcagctatatcaacgagaagaacaagcagttcaacatgaagctcaaccgtttctacaacaaatacacggccgagataagggacagcttcgagcgtggcacgaggatataa

SEQ ID NO: 6824 - protein, 284 aa, Muscodor strobelii
  misc_feature: SGI Peptide ID NO. 562026
  misc_feature (84)..(279): Pfam Id: PF08231 Pfam Desc: SYF2 splicing factor
  misc_feature (195)..(279): Pfam Id: PF08231 Pfam Desc: SYF2 splicing factor
  misc_feature (84)..(167): Pfam Id: PF08231 Pfam Desc: SYF2 splicing factor
  misc_feature (11)..(284): NCBI GI: 46124723 Blast Desc: FG06739.1 [Gibberella zeae PH-1]
  misc_feature (30)..(284): NCBI GI: 256732749 Blast Desc: [Nectria haematococca mpVI 77-13-4]
  misc_feature (8)..(284): NCBI GI: 171685856 Blast Desc: protein product [Podospora anserina] gi|170942889|emb|CAP68542.1| protein product [Podospora anserina]
  misc_feature (37)..(284): NCBI GI: 145602119 Blast Desc: MGG_05180 [Magnaporthe grisea 70-15] gi|148887441|sp|Q521C0.2|SYF2_MAGGR RecName: Full=Pre-mRNA-splicing factor SYF2 gi|145010556|gb|EDJ95212.1|
  misc_feature (3)..(284): NCBI GI: 242807506 Blast Desc: SYF2 splicing factor family protein [Talaromyces stipitatus ATCC 10500] gi|218715595|gb|EED15017.1| SYF2 splicing factor family protein [Talaromyces stipitatus ATCC 10500]
  misc_feature (3)..(284): NCBI GI: 212538119 Blast Desc: SYF2 splicing factor family protein [Penicillium marneffei ATCC 18224] gi|210068957|gb|EEA23048.1| SYF2 splicing factor family protein [Penicillium marneffei ATCC 18224]
  misc_feature (5)..(284): NCBI GI: 255948724 Blast Desc: Pc22g11830 [Penicillium chrysogenum Wisconsin 54-1255] gi|211592146|emb|CAP98471.1| Pc22g11830 [Penicillium chrysogenum Wisconsin 54-1255]
  misc_feature (28)..(284): NCBI GI: 67522809 Blast Desc: AN1861.2 [Aspergillus nidulans FGSC A4] gi|74597866|sp|Q5BC69.1|SYF2_EMENI RecName: Full=Pre-mRNA-splicing factor syf2 gi|40745870|gb|EAA65026.1| A4]
  misc_feature (48)..(284): NCBI GI: 85087115 Blast Desc: pre-mRNA splicing factor syf2 [Neurospora crassa OR74A] gi|74614352|sp|Q7RZK5.1|SYF2_NEUCR RecName: Full=Pre-mRNA-splicing factor syf-2 gi|28918927|gb|EAA28596.1|
  misc_feature (2)..(284): NCBI GI: 225555437 Blast Desc: pre-mRNA-splicing factor syf2 [Ajellomyces capsulatus G186AR]
  misc_feature: Useful for introducing or modulating the production of volatile compounds
MGADPIAEAVPTAAGEDAPTATSEVASEAAPDAVPDAATKSQDRLARFRALQARAKTSSDQNLKEATKESQRLATDPSALTALHRRRDIAAHKLLKAETEEGGQDFERKRAWDWTIEESERWDKRLKKRAANRDNNAFQDYRAESNKVYKRQVQNLAPDLEGYEKEKMKAIEKAAASGGLEIIEMEDGELVAVDKDGTFYSTADSTNFTDNKPDKAAVDRLVADLQKAEDVRMRKRRERMAKDGEDGDISYINEKNKQFNMKLNRFYNKYTAEIRDSFERGTRI

SEQ ID NO: 6825 - DNA, 783 bp, Muscodor strobelii
  misc_feature: SGI cDNA ID NO. 562027
  misc_feature: Reduced expression when VOC is produced
  misc_feature: Encodes the peptide sequence at SEQ ID NO 6826
atgtcagcagccaagaagctggtggtatgcggaggaaatgggtttctaggctcaaggatatgtaaatacgccatacagcgaggatgggatgtaacatcaatcagccgctcaggagtcccaaaatgggaagcagtaaccgcctcctcaacaccacccccctggtcccacaaagtgacctgggagcgcggcgacatcctgcgcccagcgacctacgcccccttactcaagggcgcagacttcgttgttcactccatggggatcctcctagaagcagactacaaaaaagtcgtctccggacaagaatcgcccatctcgggtctacgcaaagccttcacatccgcaccacaaccaggaaaccctctcgagcgcggcgtcaagagcgacggcgacctaaacgcagatatccggcccccggagacgaaggaacagcttacgtacgagaacatgaaccgcgatagcgccatcatgctcgccaaggaggctgcgagcgagaatacgtcggcgttcgtgtatatctccgctgcgggcggtgcgccggtcttgcccgcgcggtatatcaccacgaagcgggaggctgaaagcacgatcgcgagtgagttccccaggatgcgggggatcttcgttagacctcctttcttgtacgatagctcgcggcccatcaccaccgtcatggcgggcatgacgggtgttggcgcgctcttcaatggcgtcacgggagggatattgggaaatttttatgggtgccgctggtgtcaagcctctgaaggtcgatatagtggctga

SEQ ID NO: 6826 - protein, 260 aa, Muscodor strobelii
  misc_feature: SGI Peptide ID NO. 562027
  misc_feature (8)..(31): Pfam Id: PF01073 Pfam Desc: 3-beta hydroxysteroid dehydrogenase/isomerase family
  misc_feature (7)..(83): Pfam Id: PF01370 Pfam Desc: NAD dependent epimerase/dehydratase family
  misc_feature (2)..(238): NCBI GI: 261360382 Blast Desc: NAD dependent epimerase/dehydratase family protein [Verticillium albo-atrum VaMs.102]
  misc_feature (1)..(248): NCBI GI: 256733203 Blast Desc: [Nectria haematococca mpVI 77-13-4]
  misc_feature (1)..(248): NCBI GI: 46124721 Blast Desc: FG06738.1 [Gibberella zeae PH-1]
  misc_feature (1)..(248): NCBI GI: 156044947 Blast Desc: SS1G_09662 [Sclerotinia sclerotiorum 1980] gi|154694057|gb|EDN93795.1| SS1G_09662 [Sclerotinia sclerotiorum 1980]
  misc_feature (2)..(248): NCBI GI: 85087110 Blast Desc: NCU00360 [Neurospora crassa OR74A] gi|28918926|gb|EAA28595.1| conserved [Neurospora crassa OR74A]
  misc_feature (2)..(248): NCBI GI: 145602121 Blast Desc: MGG_05179 [Magnaporthe grisea 70-15] gi|145010557|gb|EDJ95213.1| MGG_05179 [Magnaporthe grisea 70-15]
  misc_feature (1)..(248): NCBI GI: 154303498 Blast Desc: BC1G_09320 [Botryotinia fuckeliana B05.10] gi|150854631|gb|EDN29823.1| BC1G_09320 [Botryotinia fuckeliana B05.10]
  misc_feature (2)..(248): NCBI GI: 189188650 Blast Desc: NAD dependent epimerase/dehydratase family protein [Pyrenophora tritici-repentis Pt-1C-BFP] gi|187972270|gb|EDU39769.1| NAD dependent epimerase/dehydratase
  misc_feature (1)..(232): NCBI GI: 116207356 Blast Desc: CHGG_02971 [Chaetomium globosum CBS 148.51] gi|88183568|gb|EAQ91036.1| CHGG_02971 [Chaetomium globosum CBS 148.51]
  misc_feature (2)..(248): NCBI GI: 169613124 Blast Desc: SNOG_09692 [Phaeosphaeria nodorum SN15] gi|111061837|gb|EAT82957.1| SNOG_09692 [Phaeosphaeria nodorum SN15]
  misc_feature: Useful for introducing or modulating the production of volatile compounds
MSAAKKLVVCGGNGFLGSRICKYAIQRGWDVTSISRSGVPKWEAVTASSTPPPWSHKVTWERGDILRPATYAPLLKGADFVVHSMGILLEADYKKVVSGQESPISGLRKAFTSAPQPGNPLERGVKSDGDLNADIRPPETKEQLTYENMNRDSAIMLAKEAASENTSAFVYISAAGGAPVLPARYITTKREAESTIASEFPRMRGIFVRPPFLYDSSRPITTVMAGMTGVGALFNGVTGGILGNFYGCRWCQASEGRYSG

SEQ ID NO: 6827 - DNA, 5063 bp, Muscodor strobelii
  misc_feature: SGI EST ID NO. CUFF.17059.0
  misc_feature: Variant of the nucleotide sequence at SEQ ID NO 6825
ggtgttttaacattgcctcaaattctttaaatacgaccacaatatggttcacttctgattgtctgtgattcattcaagagtccttgtacaattaggttgacaatcaattgactgagcttgttagttgttgtcagtgtgcaacgagatatttatcaacctcagcaaacatcatactcaaatctagtctttaccactacacattaatcctttgatatatcaagatgtcagcagccaagaagctggtggtatgcggaggaaatgggtttctaggctcaaggatatgtaaatacgccatacagcgaggatgggatgtaacatcaatcagccgctcaggagtcccaaaatgggaagcagtaaccgcctcctcaacaccacccccctggtcccacaaagtgacctgggagcgcggcgacatcctgcgcccagcgacctacgcccccttactcaagggcgcagacttcgttgttcactccatggggatcctcctagaagcagactacaaaaaagtcgtctccggacaagaatcgcccatctcgggtctacgcaaagccttcacatccgcaccacaaccaggaaaccctctcgagcgcggcgtcaagagcgacggcgacctaaacgcagatatccggcccccggagacgaaggaacagcttacgtacgagaacatgaaccgcgatagcgccatcatgctcgccaaggaggctgcgagcgagaatacgtcggcgttcgtgtatatctccgctgcgggcggtgcgccggtcttgcccgcgcggtatatcaccacgaagcgggaggctgaaagcacgatcgcgagtgagttccccaggatgcgggggatcttcgttagacctcctttcttgtacgatagctcgcggcccatcaccaccgtcatggcgggcatgacgggtgttggcgcgctcttcaatggcgtcacgggagggatattgggaaatttttatgggtgccgctggtgtcaagcctctgaaggtcgatatagtggctgaagctgtggttcaggcgctcagtgatgaatcggtcaagggacctgtcgaagtacctgagattgaggaactagcgactaagggttggagaaacacgatgctatgaatgctgtgggaatgatcatagccaagctggcttgtattaatgatatctagactgtacaatagctcccccatgcgccacctgtatgcaatagtttgaagtcgggagaaaaaaatgctatcgtttcatgatctcgtgcctttccgattgtgataaaaacagtctctgtacattttatatcctcgtgccacgctcgaagctgtcccttatctcggccgtgtatttgttgtagaaacggttgagcttcatgttgaactgcttgttcttctcgttgatatagctgatgtcgccatcctcgccatcctttgccatgcgctccctccgcttgcgcatgcgtacgtcttctgctttctgcaggtcggcaacgagccgatcgacggccgccttgtctggcttgttgtcggtgaagttggtagagtcggcggtggagtagaaggtgccgtccttgtcgacggcgacgagctctccgtcttccatctcgataatttccagtccgccggacgctgccgccttttcgatagccttcatcttctccttctcgtagccctcgagatcgggggcgaggttctgaacttgtcgcttgtacaccttgttgctctcggcgcggtagtcttggaatgcgttgttgtcgcggttcgcggcgcgtttcttcaggcgtttgtcccagcgctcgctctcttcgatggtccagtcccacgctctcttcctctcgaagtcctggccgccttcctcggtctcggccttgaggagcttgtgtgcggctatgtcgcggcggcggtgcaatgcggtaagggcggaggggtctgtggcgagtcgctgggactcctttgtggcctccttgaggttctggtcggacgatgtctttgcgcgagcttgcagagcgcggaaccgggccagcctatcctgggacttggtcgcggcatctggaactgcatcaggagctgcttctgatgcgacttcagaggttgctgtcggtgcgtcttcgccagccgcggttgggaccgcttctgcgatagggtcggcgcccatgactgaatcctagcgtcgctgggtctctgttcgaggatgcgggaaacgaagggggctatcggtctcgcgggactacctagagcaacggtctttgacgtggcaagaatgctgttgttgctgttagggggatggttgttggtggtggggcgtcgctgatcgtagaaagtcgccaaatgatgtaagtcttggatgtcggggatagaaatgctggagtttccaccgcgcagtcgttattagccccaagtgcctcccagttgccgccgccgtgtattgcaatttgatcagtcgtcccgtccgataacacgcagcggaaaagcggtcgatgttcagaactggctggatttcaaataatttatcttaataagtgcgtctactacaaatgatagggacaacaattcagaaatacgcaacatctacatctaataccatatatgttggagtgtcgagtgtgtcgatttatgggtatgtgcggtaatcagcgatcgaccacactgtccagggggcgtcatgcaaggatacccaccatgacacttgctagacatcctcgatagcgtctgattataggggctgataggtaggttaggtacggtaatgttcattaccccagacgggagctacctaggtaagctctggcgcactgtctggcgctcttttctgggggtttagcgatcctcgacgttagtaaacactactaaacagcaacccatgtcaagtccacggtgagcttctgcaacgagtctcgtccattgctttccgccttgccaataactacctggtataattgaatagacatgtctgcatccttcccatcgccgtgagcgcattgtctcggccttgcccatggccattcctccacctccatgatgcatcgattgggcagtctggcccagtcatgcttgcagaggctgccgtcatgtacttcgcactcggcttctgtgcgcttcgcccacaacgacgccagcagtagtcggttccgcatcaagggccccatcaagtatgaggaagacagctggtttggctggaaggacagctatccagagcccagtcggcctttccagctcgaccgtcctgcgcgccagcggccgtacaggaagccgaagggcatgcacaagtatctagcaccacgcgactctgaatctcggtctgagacacccttcccgcctgccctcggcgaccctttcgagctctccaccaccctcctcgacctcgacgccgaagatgcccccggtgtgcgctccttcgacgagaggatcgacggcgtgcccgagtctgaggctgcctccaagcaccgccaattgctgcccgtcaagcgccgtgttgccgagttcgaagcgcaatcccgccaataccagtccgacttcgagctttcgtcctcctccggtctgagtcctttccaagtcacagacctagatcttctttctcttgccattctgccacgacaacagaccgcacagcagacatctccttccgagctgagccccgagctcggcccgagcccaagcccaagtccaccaagcaccggcagtcttgctcacttcacaacatccctccagcgtgtttttgatgccaatggcatcccacataatgcgcgcgaggatcgcgcccaagccactgcgtatctgctgcgtcgccagtcgcaatacgctcgcctacaccccgttcctcgccaacacgaagacaggttggttcaggacaggatgcacgaaattggtttgtcaaaagactttctgagcttccggcgcgtcgtcacgcacacgttgcaaaccaagacgggtgttcagcatttgtcccgcgagggctccgagttttaccaaacttgcaccctgctgagggcagtacccagaccagtggatattcttgctttgctcaacagcgtgattatggctatgagaagccataaactccctatgcataaggaaatatatacagcggtcttttgggcatcgatacgttgcagtgcttacgaatcaagtcaacactatttagacgagatgatcaagcttggatacagattatcgcctgcgcatgctggaagtattttgtccgcggtggatcgctcgttttcgtacccagacctttcagaccctgacaactacgcagatgcagccaagcagcgggtagccatgttccgcttcctcaccggttatctatcgactgttgatagagagcctgtttcacatctattccacacatcagtcattgctatagataccgcgaccacccgggccctcggcgaaaaactgttctcttcctttatccagtgtttaatccgactgggagcgtttcggtacatctggtatttgttccacgcagaagtcgatcgcagaagattaaagaataaagggggaggagtaaagcggccgcaattcttattacatgagtcatgtgagatggcaataatcattgacgaattatgtcggcttcgggttcggaacagcgaagtatccaagttggacagtatgccggagtttggagcggccagtggcagttctctcaaagatatgcaatatgatgcagtcgccgttctgaagttggcaggtgttcttgatatactcgagaagccgcctggaggaatcctgccagaaacaagagatggtgtggcagctatattatacgctcgcgatataaaggaatcgttggattcattacgagcatatctaatacaaaatactgtgtcttcatgaaccaatcaactatatttcacgttcatccgggcatggactatctcgccgctagtcaattaggttcatgaacaagctgactcgattcaagccattagccaagtttgtacatgtgggagccgtaacgcacattccttcgtcaatcaggcctggctggccttagacatctgtcaaatcactccggcttctacgtattagacattgaacttttccacatccccttaagaagttcacgaacatgaagccgca

SEQ ID NO: 6828 - DNA, 1422 bp, Muscodor strobelii
  misc_feature: SGI cDNA ID NO. 562028
  misc_feature: Encodes the peptide sequence at SEQ ID NO 6829
atggcgccgcctgccggaaagcgcgttaagggcgtgcagatcttccgtccttttcagtacggaaccacagctcgcgccttcaacgacactgacaaccctcgccctgctggtgtgcctgccgaccacacccactcgtggaaggtcttcgtaaagggccccgaggatactgatgttttttactggctgcgtcgtgtccaatttaagcttcacgagtcgatcccgaaccacctacgcactatcgacgctgagacaattgtcaaggagaacgaagctcttgtcaaatcaggcaagaagccacagaaggaattcgctgtccatgagaccggctggggcgaattcgagatcactatcaagctgtattatgacagcaagagcggtgagaagccccagaccctctaccatcacctgcgccttcacccctatggtcgcaccgaagccgagagagaggccatgcgcagcaccggcgaagtcactgcccacacctatgaagagcagattttcaacgagccttttgaggacttccacaagatcctgacctctggcgctcgtgataagggcacgactggcggcaagggaaagggcaagggtaagaccgcccaggctcctgccgcacctggtgatgtcaaggagcgtagcgccatgatccctctgaccacacgccctggcgagccattcagtcgtgagactgaggccgccgagatcaagaagctggtcgaagctcgtgagatgatcgacaagcagattgcagagctgaataaggttgtgaagtccaaggagtcgcagcttgctgagttcaaggccgagaacaaggcagccgttgcacctgccgcaagcgctcccgccgcttacccatctccggttgcttctcgttgtgccaaacgcgttaagagacgccaagtgtcatcgtctagtgtctctcacagcgagccaattggctcctacacctcttacaccacttctgtcggcgccccaactcgtgtcaacatcgtctctattcctccccgcgacttgccatcacgatcaccattgggcgaactcgaatgggccgctttcagagttttatgtgttcttcaagagcgggagcgtgctcaagtacgagcacgagcacgagcactccttgcacctcgccaacaggaaggacatgtcaatgctaatggccatcccgatactggtgtggatgctgaagacactgtcatccgcgttgctagccctgtgccttctctcacggcaattaacgcagacacggacggctcagaacagactttacccccgcccacatctgtgtcgacaagaaccccgtcacccgtctctagcactcgttctgtccccactccccccagcccccgggatcttgatccgcagagcagccgatacgatgccatactcttgagcatctataactcagacaatagcaatgcctga

SEQ ID NO: 6829 - protein, 473 aa, Muscodor strobelii
  misc_feature: SGI Peptide ID NO. 562028
  misc_feature (43)..(144): Pfam Id: PF03366 Pfam Desc: YEATS family
  misc_feature (103)..(144): Pfam Id: PF03366 Pfam Desc: YEATS family
  misc_feature (43)..(80): Pfam Id: PF03366 Pfam Desc: YEATS family
  misc_feature (1)..(272): NCBI GI: 39940124 Blast Desc: MGG_05178 [Magnaporthe grisea 70-15] gi|145010558|gb|EDJ95214.1| MGG_05178 [Magnaporthe grisea 70-15]
  misc_feature (1)..(272): NCBI GI: 85087105 Blast Desc: NCU00359 [Neurospora crassa OR74A] gi|74614354|sp|Q7RZK7.1|AF9_NEUCR RecName: Full=Protein AF-9 homolog gi|28918925|gb|EAA28594.1| NCU00359 [Neurospora crassa
  misc_feature (1)..(269): NCBI GI: 116207358 Blast Desc: CHGG_02972 [Chaetomium globosum CBS 148.51] gi|88183569|gb|EAQ91037.1| CHGG_02972 [Chaetomium globosum CBS 148.51]
  misc_feature (1)..(270): NCBI GI: 256732750 Blast Desc: [Nectria haematococca mpVI 77-13-4]
  misc_feature (1)..(270): NCBI GI: 46124719 Blast Desc: FG06737.1 [Gibberella zeae PH-1] gi|84027754|sp|Q4I7S1.1|AF9_GIBZE RecName: Full=Protein AF-9 homolog
  misc_feature (5)..(240): NCBI GI: 171685860 Blast Desc: protein product [Podospora anserina] gi|170942891|emb|CAP68544.1| protein product [Podospora anserina]
  misc_feature (1)..(186): NCBI GI: 261360381 Blast Desc: YEATS domain-containing protein [Verticillium albo-atrum VaMs.102]
  misc_feature (1)..(268): NCBI GI: 154303500 Blast Desc: BC1G_09321 [Botryotinia fuckeliana B05.10] gi|150854632|gb|EDN29824.1| BC1G_09321 [Botryotinia fuckeliana B05.10]
  misc_feature (1)..(245): NCBI GI: 156044949 Blast Desc: SS1G_09663 [Sclerotinia sclerotiorum 1980] gi|154694058|gb|EDN93796.1| SS1G_09663 [Sclerotinia sclerotiorum 1980]
  misc_feature (1)..(266): NCBI GI: 119196121 Blast Desc: CIMG_02435 [Coccidioides immitis RS]
MAPPAGKRVKGVQIFRPFQYGTTARAFNDTDNPRPAGVPADHTHSWKVFVKGPEDTDVFYWLRRVQFKLHESIPNHLRTIDAETIVKENEALVKSGKKPQKEFAVHETGWGEFEITIKLYYDSKSGEKPQTLYHHLRLHPYGRTEAEREAMRSTGEVTAHTYEEQIFNEPFEDFHKILTSGARDKGTTGGKGKGKGKTAQAPAAPGDVKERSAMIPLTTRPGEPFSRETEAAEIKKLVEAREMIDKQIAELNKVVKSKESQLAEFKAENKAAVAPAASAPAAYPSPVASRCAKRVKRRQVSSSSVSHSEPIGSYTSYTTSVGAPTRVNIVSIPPRDLPSRSPLGELEWAAFRVLCVLQERERAQVRARARALLAPRQQEGHVNANGHPDTGVDAEDTVIRVASPVPSLTAINADTDGSEQTLPPPTSVSTRTPSPVSSTRSVPTPPSPRDLDPQSSRYDAILLSIYNSDNSNA

SEQ ID NO: 6830 - DNA, 1227 bp, Muscodor strobelii
  misc_feature: SGI cDNA ID NO. 562029
  misc_feature: Encodes the peptide sequence at SEQ ID NO 6831
atgctttgcgcacaacacagccgacaccgtcaacgaattctgctaaatattgtcttcagcataacttttctggtttcatttactacacttggcggcttctcatctcgaattgccatcaacaatgatgaagttctcatcgatagtgccaagtgtggatatatctacgggccaaatgctgtcgatagtcacgatttcttcgtaatcaactcttataacgcggcacggacgaacaatgccgcaaattatgcacaacaatgttactccgacaccgcaagtcggtttgagtgtaacacttatgcgactcaacggattacaggccatatcgacacgaacgcgtcatgtccgtttgatgataacatctgcctgagtagcaatgccaacatccgtatcgacagtggctacgtcaaaagcgaagacttcgggttgaacacgccctttgaaaagcaaatcttgtggagaaatgtccttcagtgcgcaccactcgttacagatgggtatactactcaagacggtcaatctcaaacaaacgatactctctatcattacgggtcttatgtcaacgacgcaggggagtatgactacgtgttccgtgcaccggatgtgaaatctcagtacaagagatctaccagtacagatggggggatagagcccaataagtattttgaattaggtgtctacggggcggtgttctatcaaggcgctctttccgaaggtaattcggatttcatgcccattgatgcacttgtacgaaaggacgcagatatctatattgtcacattaagcggtaacggcgtagtgctggctgagcctacagatgacttgtggtataaggtctcaaaaacgcctacaaatgtgttacacgagggacgtggaaaggagtcttcgtccactctgggggtctatctattcgatataccagcttcggtacttgcttgcattgatcagtaccagatctgcaccataaaaggcgatggaagctgcggacaactgggtagtttccgagacgctttcagcagcgctgctcctctcttcgatacgacttttgctcaagtagcaaacgctacggcgaaatccaacgagggcgctcaatgtgcgtacttcacatcaggagctctcaacgcaggcggaatctacagtgcgctcatagcattggggccggatgctttactatcccacgatacactggctggcggccttcaaggaccgttgccggcatatcaatggtaa

SEQ ID NO: 6831 - protein, 408 aa, Muscodor strobelii
  misc_feature: SGI Peptide ID NO. 562029
  misc_feature (8)..(408): NCBI GI: 169615058 Blast Desc: SNOG_10683 [Phaeosphaeria nodorum SN15] gi|111060957|gb|EAT82077.1| SNOG_10683 [Phaeosphaeria nodorum SN15]
  misc_feature (4)..(324): NCBI GI: 70986226 Blast Desc: conserved [Aspergillus fumigatus Af293] gi|66846236|gb|EAL86569.1| conserved [Aspergillus fumigatus Af293]
  misc_feature (4)..(324): NCBI GI: 159128250 Blast Desc: conserved [Aspergillus fumigatus A1163]
  misc_feature (4)..(408): NCBI GI: 119474227 Blast Desc: NFIA_004500 [Neosartorya fischeri NRRL 181] gi|119407142|gb|EAW17092.1| conserved [Neosartorya fischeri NRRL 181]
  misc_feature (1)..(408): NCBI GI: 115399382 Blast Desc: [Aspergillus terreus NIH2624] gi|114192163|gb|EAU33863.1| [Aspergillus terreus NIH2624]
  misc_feature (18)..(351): NCBI GI: 169618215 Blast Desc: SNOG_12297 [Phaeosphaeria nodorum SN15] gi|160703576|gb|EAT80110.2| SNOG_12297 [Phaeosphaeria nodorum SN15]
  misc_feature (67)..(331): NCBI GI: 121699395 Blast Desc: ACLA_082720 [Aspergillus clavatus NRRL 1] gi|119396149|gb|EAW06581.1| ACLA_082720 [Aspergillus clavatus NRRL 1]
  misc_feature (12)..(340): NCBI GI: 115433432 Blast Desc: [Aspergillus terreus NIH2624] gi|114189705|gb|EAU31405.1| [Aspergillus terreus NIH2624]
  misc_feature (27)..(408): NCBI GI: 169772941 Blast Desc: [Aspergillus oryzae RIB40] gi|83768800|dbj|BAE58937.1| protein product [Aspergillus oryzae]
  misc_feature (42)..(408): NCBI GI: 256723662 Blast Desc: NECHADRAFT_86728 [Nectria haematococca mpVI 77-13-4]
MLCAQHSRHRQRILLNIVFSITFLVSFTTLGGFSSRIAINNDEVLIDSAKCGYIYGPNAVDSHDFFVINSYNAARTNNAANYAQQCYSDTASRFECNTYATQRITGHIDTNASCPFDDNICLSSNANIRIDSGYVKSEDFGLNTPFEKQILWRNVLQCAPLVTDGYTTQDGQSQTNDTLYHYGSYVNDAGEYDYVFRAPDVKSQYKRSTSTDGGIEPNKYFELGVYGAVFYQGALSEGNSDFMPIDALVRKDADIYIVTLSGNGVVLAEPTDDLWYKVSKTPTNVLHEGRGKESSSTLGVYLFDIPASVLACIDQYQICTIKGDGSCGQLGSFRDAFSSAAPLFDTTFAQVANATAKSNEGAQCAYFTSGALNAGGIYSALIALGPDALLSHDTLAGGLQGPLPAYQW

SEQ ID NO: 6832 - DNA, 1602 bp, Muscodor strobelii
  misc_feature: SGI cDNA ID NO. 562030
  misc_feature: Reduced expression when VOC is produced
  misc_feature: Encodes the peptide sequence at SEQ ID NO 6833
atggctttcaacttcaactggtcgccgctcacggccgacgctgagttctacaagcgcgcccaggagctcttgacgaacgccctcaacaagtctccgaaacccccgatcatcgtcgatgacatcttcgtcaccgaactcaacctgggctccgtgcccccggacctcgagatcctcgagattggcgacctcgcagaagataggtttcgtggcatattcaagatgtgctactctggcgatgccttcctgacgctgcgcacgcgcgttcaggcaaatccattgaatacttacctttcagcgaaaccgagcttcacgtcgccccagccattagctgctgctgcggggttgacgattcctctctctatcacattatctgagatcaagttgtcagctttcatcatccttgtcttctcaaagcagaagggtctcacccttgtcttccgcaatgacccccttgagtcactcaaggtctcatcgacctttgactcaattcagtttgttcgggactatctccagagaaccatcgaaggtcaattgagaaacttgatgatggatgagttaccagcaataatacacaagctctcacttcgcttatggtgtccagatcagatgccaagagaagaagaggtcacaaaagagacggatgaagacgaagcttatgttgatccatttgcgagtgcgcctgcggaagcggtcgattctaatgggcatcttctggatgccgctgagattgcctcattaacacttgacggcggcgcaggaacccagtcgttattctcacaaaagaatctgttaaggctttctgctctcactgaatctcaccggacattatcactatttacacccggtatccggaatgtcttattccgagcctgggctagtcccatggaacggcacgacacgggttattctactcctattgcaacaccaagcttggcccgcttgccgtctttgactgggacctcaacaacctatgcatttacagatactagcagtatggaccaaggcaacctgccctcaaggccatcgctcgtcagcctcaactcagcaactacaggcttgggcttgggagccgggaaacatccgaggaaccagcgaaagaagaagacccgcgtggtcaatctgcgccgtccgaaggcaactagtgaaacgaacagtgaggtgggcgatatcttgtcagacacagcatcagtagcgggtccaagttcagaacccattttatccacctcaattccggaggaacctgaggcagaaactttgcctcaaccatcgcagagagtacgattcagtaacgataagtcggtactacaacggacgcctctgaatatggaaatcttcgaagagcctatcgcaaccgagaacgcccccgttgcaccgatgacggaggacagcatggccacctcgaaggcgttagaaaaggctatcgaagcagcagcatctcagagaggtccaggttctgacacgtcatcagtgatccttgaacaagcctggattatgaagatggcgggagagatcgcacgtcgcgtctacgacgaaaaacagcgacgagagaaagcatgggaggagcacgacgatgcgcccccagcttaccaaccagcacaataa

SEQ ID NO: 6833 - protein, 533 aa, Muscodor strobelii
  misc_feature: SGI Peptide ID NO. 562030
  misc_feature (1)..(533): NCBI GI: 145602123 Blast Desc: MGG_05176 [Magnaporthe grisea 70-15] gi|259495577|sp|A4QT54.1|MDM34_MAGGR RecName: Full=Mitochondrial distribution and morphology protein 34 MGG_05176 [Magnaporthe
  misc_feature (1)..(531): NCBI GI: 171685862 Blast Desc: protein product [Podospora anserina] gi|170942892|emb|CAP68545.1| protein product [Podospora anserina]
  misc_feature (1)..(532): NCBI GI: 46124717 Blast Desc: FG06736.1 [Gibberella zeae PH-1]
  misc_feature (1)..(530): NCBI GI: 116207360 Blast Desc: CHGG_02973 [Chaetomium globosum CBS 148.51] gi|121788344|sp|Q2H9Y1.1|MDM34_CHAGB RecName: Full=Mitochondrial distribution and morphology protein 34 gi|88183570|gb|EAQ91038.1|
  misc_feature (1)..(531): NCBI GI: 156044951 Blast Desc: SS1G_09664 [Sclerotinia sclerotiorum 1980] gi|259495586|sp|A7EWF5.1|MDM34_SCLS1 RecName: Full=Mitochondrial distribution and morphology protein 34 SS1G_09664 [Sclerotinia
  misc_feature (1)..(531): NCBI GI: 154303502 Blast Desc: BC1G_09322 [Botryotinia fuckeliana B05.10] gi|259495538|sp|A6S9E2.1|MDM34_BOTFB RecName: Full=Mitochondrial distribution and morphology protein 34 BC1G_09322 [Botryotinia
  misc_feature (1)..(428): NCBI GI: 164429025 Blast Desc: NCU00357 [Neurospora crassa OR74A] gi|259495600|sp|Q7RZK9.2|MDM34_NEUCR RecName: Full=Mitochondrial distribution and morphology protein 34 conserved [Neurospora
  misc_feature (1)..(529): NCBI GI: 259495604 Blast Desc: NCU00357 [Neurospora crassa OR74A] gi|259495600|sp|Q7RZK9.2|MDM34_NEUCR RecName: Full=Mitochondrial distribution and morphology protein 34 conserved [Neurospora
  misc_feature (1)..(529): NCBI GI: 259495595 Blast Desc: NCU00357 [Neurospora crassa OR74A] gi|259495600|sp|Q7RZK9.2|MDM34_NEUCR RecName: Full=Mitochondrial distribution and morphology protein 34 conserved [Neurospora
  misc_feature (1)..(529): NCBI GI: 121707553 Blast Desc: conserved [Aspergillus clavatus NRRL 1] gi|259495529|sp|A1CHU1.1|MDM34_ASPCL RecName: Full=Mitochondrial distribution and morphology protein 34 conserved [Aspergillus 1]
  misc_feature: Useful for introducing or modulating the production of volatile compounds
MAFNFNWSPLTADAEFYKRAQELLTNALNKSPKPPIIVDDIFVTELNLGSVPPDLEILEIGDLAEDRFRGIFKMCYSGDAFLTLRTRVQANPLNTYLSAKPSFTSPQPLAAAAGLTIPLSITLSEIKLSAFIILVFSKQKGLTLVFRNDPLESLKVSSTFDSIQFVRDYLQRTIEGQLRNLMMDELPAIIHKLSLRLWCPDQMPREEEVTKETDEDEAYVDPFASAPAEAVDSNGHLLDAAEIASLTLDGGAGTQSLFSQKNLLRLSALTESHRTLSLFTPGIRNVLFRAWASPMERHDTGYSTPIATPSLARLPSLTGTSTTYAFTDTSSMDQGNLPSRPSLVSLNSATTGLGLGAGKHPRNQRKKKTRVVNLRRPKATSETNSEVGDILSDTASVAGPSSEPILSTSIPEEPEAETLPQPSQRVRFSNDKSVLQRTPLNMEIFEEPIATENAPVAPMTEDSMATSKALEKAIEAAASQRGPGSDTSSVILEQAWIMKMAGEIARRVYDEKQRREKAWEEHDDAPPAYQPAQ

SEQ ID NO: 6834 - DNA, 2698 bp, Muscodor strobelii
  misc_feature: SGI EST ID NO. CUFF.17187.1
  misc_feature: Variant of the nucleotide sequence at SEQ ID NO 6832
cgcgggtccctttctctgtgccccttctccatagctctcttccagccagccagcttcgtcccagcttccctggccgaacaccgcatagcgtcatttcatgcaccaaaattaagtacggtttagagcattgttagattgattctgcgcttccccgataatccacatcaaattccacggcgctgttccagtgctttcccgctgcatcgtaccactgatccgagctccttcacatggattgacaatctctcactcaccacccacctacacccgaccacacctccttccctatcatcaacccgaggtatctaatctaccctaataattatacctcctctatcatacgatcgcaacttcataattgtccgggtaatcaactatatctcacgttgtccgaaactgcatcgctagattacatcatccaaaccctaccgtcaccacaagatacggtcgccacggcacagcttcccctacgatgcgcaggtagaattagtaaagccagctccgaataatggctttcaacttcaactggtcgccgctcacggccgacgctgagttctacaagcgcgcccaggagctcttgacgaacgccctcaacaagtctccgaaacccccgatcatcgtcgatgacatcttcgtcaccgaactcaacctgggctccgtgcccccggacctcgagatcctcgagattggcgacctcgcagaagataggtttcgtggcatattcaagatgtgctactctggcgatgccttcctgacgctgcgcacgcgcgttcaggcaaatccattgaatacttacctttcagcgaaaccgagcttcacgtcgccccagccattagctgctgctgcggggttgacgattcctctctctatcacattatctgagatcaagttgtcagctttcatcatccttgtcttctcaaagcagaagggtctcacccttgtcttccgcaatgacccccttgagtcactcaaggtctcatcgacctttgactcaattcagtttgttcgggactatctccagagaaccatcgaaggtcaattgagaaacttgatgatggatgagttaccagcaataatacacaagctctcacttcgcttatggtgtccagatcagatgccaagagaagaagaggtcacaaaagagacggatgaagacgaagcttatgttgatccatttgcgagtgcgcctgcggaagcggtcgattctaatgggcatcttctggatgccgctgagattgcctcattaacacttgacggcggcgcaggaacccagtcgttattctcacaaaagaatctgttaaggctttctgctctcactgaatctcaccggacattatcactatttacacccggtatccggaatgtcttattccgagcctgggctagtcccatggaacggcacgacacgggttattctactcctattgcaacaccaagcttggcccgcttgccgtctttgactgggacctcaacaacctatgcatttacagatactagcagtatggaccaaggcaacctgccctcaaggccatcgctcgtcagcctcaactcagcaactacaggcttgggcttgggagccgggaaacatccgaggaaccagcgaaagaagaagacccgcgtggtcaatctgcgccgtccgaaggcaactagtgaaacgaacagtgaggtgggcgatatcttgtcagacacagcatcagtagcgggtccaagttcagaacccattttatccacctcaattccggaggaacctgaggcagaaactttgcctcaaccatcgcagagagtacgattcagtaacgataagtcggtactacaacggacgcctctgaatatggaaatcttcgaagagcctatcgcaaccgagaacgcccccgttgcaccgatgacggaggacagcatggccacctcgaaggcgttagaaaaggctatcgaagcagcagcatctcagagaggtccaggttctgacacgtcatcagtgatccttgaacaagcctggattatgaagatggcgggagagatcgcacgtcgcgtctacgacgaaaaacagcgacgagagaaagcatgggaggagcacgacgatgcgcccccagcttaccaaccagcacaataaatgtacaaacaaacacaccaatcactcaccagcctctcctttgtctaattatttgttactaaaactgtaccatcccatggcacacaggcgttttgggctgagggaaggcattatatccaaacttgttttaatgtgtatatttcactgtcgtcgcggaagaccaagagactgtacagcagcggcgttttggaggggctatttctgtacgggactaaaaagcaaaagtttggattacgcctttggttgtgtgggaacgaatacggtgcgtttcgagcgatatctactcacatgcaagatgagcccttgcgtcgttccagcatcgattgttttgttaatgaggagaagaaggaaaaggggaaggacacaaccatggcgaataccacgcatcaaaacacacacccggcagtctagccaacctcctggtttgaggatatttgaggatagaaggcgatcataagtgggagacatggcatcacaaagagggcaatgcattgagagaagagagatggcgaaagacaccactccaatctggtatatatacctgtataaaaatgtgaataaaaaacaagatgaagtctgtgaatcacg

SEQ ID NO: 6835 - DNA, 996 bp, Muscodor strobelii
  misc_feature: SGI cDNA ID NO. 562031
  misc_feature: Reduced expression when VOC is produced
  misc_feature: Encodes the peptide sequence at SEQ ID NO 6836
atggcatcgtcatggatgggcacctgggacggcaagagccccacactggcagagtgcgaacaactcatcaacgcttcatctgatgtggactttgagtacgtagctgagggtcgtgcgaatgccgtattctccatctggactatcaaaccgggagcagggcacaagagacaacttgagggcacgctcctccgcgtgccaaaggtgacgccgcatatcacaccatgcgactacaagactctacacgacttccacgagaacgccgttgaaaaggccgtcaacagtcagtttctagtcccacagaaactaatccagatcacggagcacgtggtcgagatcttgaacgcgaagaggacgaaggatggggagcgggataaagatgacggcagtgtgattcactccggctatgcaatgttcatggaggacatgcgagaatcgacgggttactccgtcttggagttcaaacctaaatggctcgctcagtcaccgattgcgcctcaaggcgcgaaacgctgtcgtacttgtgcccgcgaggcataccggaacagtctgaagcgagctgagggcaagaagacgtctatacctatttgccctttaggtctcctatcttcggacgacaagatcgtcgcgcaaaccatcgagcgccttgcgccaaaatggcctgaagtcgaccgagaccgtctagcgcaaaaattcaaagaaaccaagattttggaggaactgcgcaaactacaggaggatggtgaccccgaaacaactttgctggataatccgggtgatccgaaatttggtctggcgatgacgctacgggactgtacttgctttgtacgaatgcctgacgataccgcgaagtccatcgagatcaagctcgcagatgtcgacaagaagaattgggaagagaaacaaaactactggaaagaatcccatgagaatctcgttaatgagggttggtatactgatgagatggacggggaaacagattgtcagttgaaccgatga

SEQ ID NO: 6836 - protein, 331 aa, Muscodor strobelii
  misc_feature: SGI Peptide ID NO. 562031
  misc_feature (27)..(329): NCBI GI: 119196119 Blast Desc: CIMG_02434 [Coccidioides immitis RS]
  misc_feature (27)..(317): NCBI GI: 240110639 Blast Desc: CPC735_040610 [Coccidioides posadasii C735 delta SOWgp]
  misc_feature (32)..(330): NCBI GI: 39940126 Blast Desc: MGG_05177 [Magnaporthe grisea 70-15] gi|145010559|gb|EDJ95215.1| MGG_05177 [Magnaporthe grisea 70-15]
  misc_feature (62)..(317): NCBI GI: 85087101 Blast Desc: NCU00358 [Neurospora crassa OR74A] gi|28918924|gb|EAA28593.1| [Neurospora crassa OR74A]
  misc_feature (32)..(318): NCBI GI: 46124715 Blast Desc: FG06735.1 [Gibberella zeae PH-1]
  misc_feature (22)..(317): NCBI GI: 255948744 Blast Desc: Pc22g11930 [Penicillium chrysogenum Wisconsin 54-1255] gi|211592156|emb|CAP98481.1| Pc22g11930 [Penicillium chrysogenum Wisconsin 54-1255]
  misc_feature (33)..(329): NCBI GI: 225682962 Blast Desc: conserved [Paracoccidioides brasiliensis Pb03]
  misc_feature (33)..(329): NCBI GI: 226290412 Blast Desc: conserved [Paracoccidioides brasiliensis Pb18]
  misc_feature (33)..(329): NCBI GI: 226282981 Blast Desc: conserved [Paracoccidioides brasiliensis Pb01]
  misc_feature (31)..(318): NCBI GI: 256732751 Blast Desc: NECHADRAFT_68556 [Nectria haematococca mpVI 77-13-4]
  misc_feature (148)..(329): SWISSPROT Homolog: EC 2.7.1.158 Inositol-pentakisphosphate 2-kinase
  misc_feature: Useful for introducing or modulating the production of volatile compounds
MASSWMGTWDGKSPTLAECEQLINASSDVDFEYVAEGRANAVFSIWTIKPGAGHKRQLEGTLLRVPKVTPHITPCDYKTLHDFHENAVEKAVNSQFLVPQKLIQITEHVVEILNAKRTKDGERDKDDGSVIHSGYAMFMEDMRESTGYSVLEFKPKWLAQSPIAPQGAKRCRTCAREAYRNSLKRAEGKKTSIPICPLGLLSSDDKIVAQTIERLAPKWPEVDRDRLAQKFKETKILEELRKLQEDGDPETTLLDNPGDPKFGLAMTLRDCTCFVRMPDDTAKSIEIKLADVDKKNWEEKQNYWKESHENLVNEGWYTDEMDGETDCQLNR

SEQ ID NO: 6837 - DNA, 4104 bp, Muscodor strobelii
  misc_feature: SGI EST ID NO. CUFF.17091.0
  misc_feature: Variant of the nucleotide sequence at SEQ ID NO 6835
gcacgacagatttgaagggtgccagggctattcagggctgaccgcccagtggccagtgacaatggatagcctggtgacccacgtcagaacgtgccgctggcagcgcattgccaggccacgtccgtgatcgctacagggcacccgcaccttactgtatcttgcatgccgcgctgtcgtgtcttggccctttatctgccttgtgacgatcgcgaatgaccgtttcttatttccattcctaaatagattcccatccgaaaccctttcttgcacttatctcacctagatcatgatttagtcatccgtcctgcctgtctgtttgcgggcgcattttgtttcgtcgttctcaaccctgtcctcatagacaatcgccaccactaggccaggtatcattgtaaatatacggccttcacacaactacatgggcttccggtgaagccatctcttttcattccgacttggacagtgactatggatcgtctacgggcattcctttcgagtaaggatgagttggacgagcaggagtatcagcctttaaatgaagagggcgggcccctagacggtgaaggtgacggccatgacgtgcccttctcgtggtttgagtatggcatctttgccgtgctcggcgtcgcaatgctctgggcgtggtatgtattattgcgtggtggaacgatttaatagaactggcaggctgactgaagtaggaatatgttcctcgctgccgcatcgtatttccagcttcgcttccaggatgacgaattcagcctccagaacttccagcctgcgatcctgtccatctccaccctaacgaatctgggtaccatggctatcttggccaaaaaacaacattcggcgtcgtatccctttcgcatcaatctcgccctctatatcaacgtcttcacctttgccctgctgacagcttcggccaagttgtttctcgatgcgcctcccaagctatacctcgcctttatgttaaccatggttgctctgacggcatgggcttctggacttatacaaaacggtgcttttgcctttgcctcaagttttgggagaccagagtacatgcaggctatcatggcgggacagggtgtggctggtgttcttccctcgtttgtccaggtcgcctcggttcttgttgcgcctccaccagaggcgatttcgggcgcgacggcggccgactcggatgagggcacggcagccttcatttacttcctgactgccgtcatcatatccgtggccgtattattcgccttcattccgctcatccgacgacacgatagaatcatcgaaaaccgaatgatggagcatatggcagcatccatgaacagcatcgaagaggcagagcgcgcagcgcgaaaaactgttagcatgaccacgttgttcaagaaattgaagtggttcgttggcgccatcttcgtatgcttctcgttgaccatgttcttcccggtcttcactgccaaggttctgtctgtgacaccggtggacaaggcgcccgctcttctcaagcccgctgcgttcatccctctaggtttcttgttctggaacattggtgatctggtgggacgttccgcctcactgagattttcgctacgacaccgacctatggttctattcgcaatctctgtgacccgctcggttttcttgcccatgtaccttctgtgcaatatcaacgggcgcggtgctgcagttgacagcgatctgttctacctgttgcttgtccaactaccgtttggtatcacgaatgggtggctggggtccaactgcatgatggcagccggcgaatgggtcaccgagggggagagagaggcttcaggaggttttatggggctttgcatggtagcagggctgtcttttggaagcttactgagtttttctgctgctggcatttagtgagcgatgattgcattatacctgcacatactagggagatcttgggttggcattggtgttgtggcgtttacatcatataccattggggactagattcagtcatttgtgttacgctttgtgcgcagttggacaacagtgcagcagtgacacacgcaaatacctatatacatagaccaccattcgtgagattagatcaatccaaacggtctcgaactatacagcctttaatttcggtactgagggtgggaaacttagaagttgtcgagctggctcgatttggacattgaacttgcttcgccacactcgaactgccgcgcgccatcttatatccactacattggctcgaggccacgaatcgtacagggcaacttcgtttctctcctgatgctatggctgcctgtagctgtatatactgcactgttctttcgctgttcgccttggccgaagcagggcgagtgagcctcatcggcatcgagtaatctacagagtcgcttaagcgactagtcacattccatcgccaccgggcgcgagggaatagcgtttcaagcctgcaagtttaccagtccagggcacagaaatgagataaccgccggcttctcatcacatccatctcttcacgctttttgttctacaactatataaggctgcgcaagctgtccatgcgagctatacgggctagacctctgcttcaatttccttgaatcgagattcaactgtaccatcactttacaacaccaaatttcttcgtggcttgtaaagccaatcatactgtataatcactaattcgtttcggatcttgatcttgcttcgtcgctatattacgattcaacattttttatctttaaagaatggcatcgtcatggatgggcacctgggacggcaagagccccacactggcagagtgcgaacaactcatcaacgcttcatctgatgtggactttgagtacgtagctgagggtcgtgcgaatgccgtattctccatctggactatcaaaccgggagcagggcacaagagacaacttgagggcacgctcctccgcgtgccaaaggtgacgccgcatatcacaccatgcgactacaagactctacacgacttccacgagaacgccgttgaaaaggccgtcaacagtcagtttctagtcccacagaaactaatccagatcacggagcacgtggtcgagatcttgaacgcgaagaggacgaaggatggggagcgggataaagatgacggcagtgtgattcactccggctatgcaatgttcatggaggacatgcgagaatcgacgggttactccgtcttggagttcaaacctaaatggctcgctcagtcaccgattgcgcctcaaggcgcgaaacgctgtcgtacttgtgcccgcgaggcataccggaacagtctgaagcgagctgagggcaagaagacgtctatacctatttgccctttaggtctcctatcttcggacgacaagatcgtcgcgcaaaccatcgagcgccttgcgccaaaatggcctgaagtcgaccgagaccgtctagcgcaaaaattcaaagaaaccaagattttggaggaactgcgcaaactacaggaggatggtgaccccgaaacaactttgctggataatccgggtgatccgaaatttggtctggcgatgacgctacgggactgtacttgctttgtacgaatgcctgacgataccgcgaagtccatcgagatcaagctcgcagatgtcgacaagaagaattgggaagagaaacaaaactactggaaagaatcccatgagaatctcgttaatgagggttggtatactgatgagatggacggggaaacagattgtcagttgaaccgatgattcatctgcaaggcaaatttcgcttttgaagagttgcttctactcttctctcttacgttttaaacactgtaatatgacttcacaagactgaagtctgtatacgttttgttggaccatctcaatgatgggatttgggtccatcctgtatcgtggatatactggcaatggtggaggacttgctgaatacgtttcattcgggcggttggaggataggcggtaatttgtttgacttgcgttatttcatattcggccattcaaacttgtaataatgaactatgggaccgagatacacgatagttgttttagataatgagtactaatattattgaagacaagcacagacttaacttgctttactgaggtttacattttg

SEQ ID NO: 6838 - DNA, 1362 bp, Muscodor strobelii
  misc_feature: SGI cDNA ID NO. 562032
  misc_feature: Encodes the peptide sequence at SEQ ID NO 6839
atggatcgtctacgggcattcctttcgagtaaggatgagttggacgagcaggagtatcagcctttaaatgaagagggcgggcccctagacggtgaaggtgacggccatgacgtgcccttctcgtggtttgagtatggcatctttgccgtgctcggcgtcgcaatgctctgggcgtggaatatgttcctcgctgccgcatcgtatttccagcttcgcttccaggatgacgaattcagcctccagaacttccagcctgcgatcctgtccatctccaccctaacgaatctgggtaccatggctatcttggccaaaaaacaacattcggcgtcgtatccctttcgcatcaatctcgccctctatatcaacgtcttcacctttgccctgctgacagcttcggccaagttgtttctcgatgcgcctcccaagctatacctcgcctttatgttaaccatggttgctctgacggcatgggcttctggacttatacaaaacggtgcttttgcctttgcctcaagttttgggagaccagagtacatgcaggctatcatggcgggacagggtgtggctggtgttcttccctcgtttgtccaggtcgcctcggttcttgttgcgcctccaccagaggcgatttcgggcgcgacggcggccgactcggatgagggcacggcagccttcatttacttcctgactgccgtcatcatatccgtggccgtattattcgccttcattccgctcatccgacgacacgatagaatcatcgaaaaccgaatgatggagcatatggcagcatccatgaacagcatcgaagaggcagagcgcgcagcgcgaaaaactgttagcatgaccacgttgttcaagaaattgaagtggttcgttggcgccatcttcgtatgcttctcgttgaccatgttcttcccggtcttcactgccaaggttctgtctgtgacaccggtggacaaggcgcccgctcttctcaagcccgctgcgttcatccctctaggtttcttgttctggaacattggtgatctggtgggacgttccgcctcactgagattttcgctacgacaccgacctatggttctattcgcaatctctgtgacccgctcggttttcttgcccatgtaccttctgtgcaatatcaacgggcgcggtgctgcagttgacagcgatctgttctacctgttgcttgtccaactaccgtttggtatcacgaatgggtggctggggtccaactgcatgatggcagccggcgaatgggtcaccgagggggagagagaggcttcaggaggttttatggggctttgcatggtagcagggctgtcttttggaagcttactgagtttttctgctgctggcatttag

SEQ ID NO: 6839 - protein, 453 aa, Muscodor strobelii
  misc_feature: SGI Peptide ID NO. 562032
  misc_feature (149)..(452): Pfam Id: PF01733 Pfam Desc: Nucleoside transporter
  misc_feature (149)..(243): Pfam Id: PF01733 Pfam Desc: Nucleoside transporter
  misc_feature (279)..(448): Pfam Id: PF01733 Pfam Desc: Nucleoside transporter
  misc_feature (1)..(453): NCBI GI: 39940112 Blast Desc: MGG_05184 [Magnaporthe grisea 70-15] gi|145010550|gb|EDJ95206.1| MGG_05184 [Magnaporthe grisea 70-15]
  misc_feature (1)..(453): NCBI GI: 171685840 Blast Desc: protein product [Podospora anserina] gi|170942881|emb|CAP68534.1| protein product [Podospora anserina]
  misc_feature (1)..(453): NCBI GI: 154303440 Blast Desc: BC1G_09291 [Botryotinia fuckeliana B05.10] gi|150854602|gb|EDN29794.1| BC1G_09291 [Botryotinia fuckeliana B05.10]
  misc_feature (1)..(432): NCBI GI: 85087093 Blast Desc: NCU00356 [Neurospora crassa OR74A] gi|28918922|gb|EAA28591.1| conserved [Neurospora crassa OR74A]
  misc_feature (1)..(453): NCBI GI: 156044957 Blast Desc: SS1G_09667 [Sclerotinia sclerotiorum 1980] gi|154694062|gb|EDN93800.1| SS1G_09667 [Sclerotinia sclerotiorum 1980]
  misc_feature (1)..(449): NCBI GI: 116207364 Blast Desc: CHGG_02975 [Chaetomium globosum CBS 148.51] gi|88183572|gb|EAQ91040.1| CHGG_02975 [Chaetomium globosum CBS 148.51]
  misc_feature (1)..(451): NCBI GI: 189206770 Blast Desc: nucleoside transporter family [Pyrenophora tritici-repentis Pt-1C-BFP] gi|187975812|gb|EDU42438.1| nucleoside transporter family [Pyrenophora tritici-repentis
  misc_feature (1)..(453): NCBI GI: 169771677 Blast Desc: [Aspergillus oryzae RIB40] gi|83768167|dbj|BAE58306.1| protein product [Aspergillus oryzae]
  misc_feature (1)..(451): NCBI GI: 169621331 Blast Desc: SNOG_13875 [Phaeosphaeria nodorum SN15] gi|160704234|gb|EAT78899.2| SNOG_13875 [Phaeosphaeria nodorum SN15]
  misc_feature (1)..(453): NCBI GI: 70993960 Blast Desc: Nucleoside transporter family [Aspergillus fumigatus Af293] gi|66849461|gb|EAL89789.1| Nucleoside transporter family [Aspergillus fumigatus Af293]
MDRLRAFLSSKDELDEQEYQPLNEEGGPLDGEGDGHDVPFSWFEYGIFAVLGVAMLWAWNMFLAAASYFQLRFQDDEFSLQNFQPAILSISTLTNLGTMAILAKKQHSASYPFRINLALYINVFTFALLTASAKLFLDAPPKLYLAFMLTMVALTAWASGLIQNGAFAFASSFGRPEYMQAIMAGQGVAGVLPSFVQVASVLVAPPPEAISGATAADSDEGTAAFIYFLTAVIISVAVLFAFIPLIRRHDRIIENRMMEHMAASMNSIEEAERAARKTVSMTTLFKKLKWFVGAIFVCFSLTMFFPVFTAKVLSVTPVDKAPALLKPAAFIPLGFLFWNIGDLVGRSASLRFSLRHRPMVLFAISVTRSVFLPMYLLCNINGRGAAVDSDLFYLLLVQLPFGITNGWLGSNCMMAAGEWVTEGEREASGGFMGLCMVAGLSFGSLLSFSAAGI

SEQ ID NO: 6840 - DNA, 4047 bp, Muscodor strobelii
  misc_feature: SGI EST ID NO. CUFF.17092.1
  misc_feature: Variant of the nucleotide sequence at SEQ ID NO 6838
gcacgacagatttgaagggtgccagggctattcagggctgaccgcccagtggccagtgacaatggatagcctggtgacccacgtcagaacgtgccgctggcagcgcattgccaggccacgtccgtgatcgctacagggcacccgcaccttactgtatcttgcatgccgcgctgtcgtgtcttggccctttatctgccttgtgacgatcgcgaatgaccgtttcttatttccattcctaaatagattcccatccgaaaccctttcttgcacttatctcacctagatcatgatttagtcatccgtcctgcctgtctgtttgcgggcgcattttgtttcgtcgttctcaaccctgtcctcatagacaatcgccaccactaggccaggtatcattgtaaatatacggccttcacacaactacatgggcttccggtgaagccatctcttttcattccgacttggacagtgactatggatcgtctacgggcattcctttcgagtaaggatgagttggacgagcaggagtatcagcctttaaatgaagagggcgggcccctagacggtgaaggtgacggccatgacgtgcccttctcgtggtttgagtatggcatctttgccgtgctcggcgtcgcaatgctctgggcgtggaatatgttcctcgctgccgcatcgtatttccagcttcgcttccaggatgacgaattcagcctccagaacttccagcctgcgatcctgtccatctccaccctaacgaatctgggtaccatggctatcttggccaaaaaacaacattcggcgtcgtatccctttcgcatcaatctcgccctctatatcaacgtcttcacctttgccctgctgacagcttcggccaagttgtttctcgatgcgcctcccaagctatacctcgcctttatgttaaccatggttgctctgacggcatgggcttctggacttatacaaaacggtgcttttgcctttgcctcaagttttgggagaccagagtacatgcaggctatcatggcgggacagggtgtggctggtgttcttccctcgtttgtccaggtcgcctcggttcttgttgcgcctccaccagaggcgatttcgggcgcgacggcggccgactcggatgagggcacggcagccttcatttacttcctgactgccgtcatcatatccgtggccgtattattcgccttcattccgctcatccgacgacacgatagaatcatcgaaaaccgaatgatggagcatatggcagcatccatgaacagcatcgaagaggcagagcgcgcagcgcgaaaaactgttagcatgaccacgttgttcaagaaattgaagtggttcgttggcgccatcttcgtatgcttctcgttgaccatgttcttcccggtcttcactgccaaggttctgtctgtgacaccggtggacaaggcgcccgctcttctcaagcccgctgcgttcatccctctaggtttcttgttctggaacattggtgatctggtgggacgttccgcctcactgagattttcgctacgacaccgacctatggttctattcgcaatctctgtgacccgctcggttttcttgcccatgtaccttctgtgcaatatcaacgggcgcggtgctgcagttgacagcgatctgttctacctgttgcttgtccaactaccgtttggtatcacgaatgggtggctggggtccaactgcatgatggcagccggcgaatgggtcaccgagggggagagagaggcttcaggaggttttatggggctttgcatggtagcagggctgtcttttggaagcttactgagtttttctgctgctggcatttagtgagcgatgattgcattatacctgcacatactagggagatcttgggttggcattggtgttgtggcgtttacatcatataccattggggactagattcagtcatttgtgttacgctttgtgcgcagttggacaacagtgcagcagtgacacacgcaaatacctatatacatagaccaccattcgtgagattagatcaatccaaacggtctcgaactatacagcctttaatttcggtactgagggtgggaaacttagaagttgtcgagctggctcgatttggacattgaacttgcttcgccacactcgaactgccgcgcgccatcttatatccactacattggctcgaggccacgaatcgtacagggcaacttcgtttctctcctgatgctatggctgcctgtagctgtatatactgcactgttctttcgctgttcgccttggccgaagcagggcgagtgagcctcatcggcatcgagtaatctacagagtcgcttaagcgactagtcacattccatcgccaccgggcgcgagggaatagcgtttcaagcctgcaagtttaccagtccagggcacagaaatgagataaccgccggcttctcatcacatccatctcttcacgctttttgttctacaactatataaggctgcgcaagctgtccatgcgagctatacgggctagacctctgcttcaatttccttgaatcgagattcaactgtaccatcactttacaacaccaaatttcttcgtggcttgtaaagccaatcatactgtataatcactaattcgtttcggatcttgatcttgcttcgtcgctatattacgattcaacattttttatctttaaagaatggcatcgtcatggatgggcacctgggacggcaagagccccacactggcagagtgcgaacaactcatcaacgcttcatctgatgtggactttgagtacgtagctgagggtcgtgcgaatgccgtattctccatctggactatcaaaccgggagcagggcacaagagacaacttgagggcacgctcctccgcgtgccaaaggtgacgccgcatatcacaccatgcgactacaagactctacacgacttccacgagaacgccgttgaaaaggccgtcaacagtcagtttctagtcccacagaaactaatccagatcacggagcacgtggtcgagatcttgaacgcgaagaggacgaaggatggggagcgggataaagatgacggcagtgtgattcactccggctatgcaatgttcatggaggacatgcgagaatcgacgggttactccgtcttggagttcaaacctaaatggctcgctcagtcaccgattgcgcctcaaggcgcgaaacgctgtcgtacttgtgcccgcgaggcataccggaacagtctgaagcgagctgagggcaagaagacgtctatacctatttgccctttaggtctcctatcttcggacgacaagatcgtcgcgcaaaccatcgagcgccttgcgccaaaatggcctgaagtcgaccgagaccgtctagcgcaaaaattcaaagaaaccaagattttggaggaactgcgcaaactacaggaggatggtgaccccgaaacaactttgctggataatccgggtgatccgaaatttggtctggcgatgacgctacgggactgtacttgctttgtacgaatgcctgacgataccgcgaagtccatcgagatcaagctcgcagatgtcgacaagaagaattgggaagagaaacaaaactactggaaagaatcccatgagaatctcgttaatgagggttggtatactgatgagatggacggggaaacagattgtcagttgaaccgatgattcatctgcaaggcaaatttcgcttttgaagagttgcttctactcttctctcttacgttttaaacactgtaatatgacttcacaagactgaagtctgtatacgttttgttggaccatctcaatgatgggatttgggtccatcctgtatcgtggatatactggcaatggtggaggacttgctgaatacgtttcattcgggcggttggaggataggcggtaatttgtttgacttgcgttatttcatattcggccattcaaacttgtaataatgaactatgggaccgagatacacgatagttgttttagataatgagtactaatattattgaagacaagcacagacttaacttgctttactgaggtttacattttg

SEQ ID NO: 6841 - DNA, 1491 bp, Muscodor strobelii
  misc_feature: SGI cDNA ID NO. 562033
  misc_feature: Encodes the peptide sequence at SEQ ID NO 6842
atgcctaaaatctactctcgcgcgaagggcgtcgtgatttacattggtgagccagcaaacaacagcgatctctgtcttgatgtgctgcagtctggtttcgtcacgagtgaccgatccaacgattttgctatcgcagcagatcacttgttgagaagagattacttttcgagggtatgggttctgcaagaggtagcgctggctcgcaaagccacccttctctgcggtgaaaaggatattaattggactcgactatcaaaatgccagatcaaaccggatctaaggagattttcttctacacccctcctgagggtcaagggatttgagctatacacaacacccgagcagctactcacactactggatattgcccgtggatgtaaatcccaggacccgcgtgacaaagtttattcggttcttgggcttgctcttgacgagcacaaggttgccgcagattacaacttgagtgttcgagacctttatataaaagtcgctctaagtttggcccagcaatacggctggggcaaggtcctgcgccgggccggacggtggcgacgatcgattgaatcactgccctcctgggtgccggattggagttgcactagatctgttgtttccggatccaatattatgggcgcggagattcaggcgagacgggctggcgttgaagtctctgaaataggcctccagatgccctacgactcggtactatacaatcctgacacttcgtcattgacgctctcaacaggaaccactgggtatgtgggttacaaagataagagactgagccatatccacgatggggaattgaacaacatttatgtctttggtgcgcctggagacttaccaagctctgtcgagcttcttgaaagttcacactatctctgtctaagccagaattcgtattccaggccacggccaaatcttaccgcgttcaacacggtcttcactctgggtacgcctctttctgttctgcaatttaatgaaactgatgcaacttacacgtcgacttcgtggtcgaacgggaaggatcatattacgttggcctttgaatgttcagtattattgtcagggcaagcagctctcattcctatccgccaagtttcaaatgatcttagcatacggacaaaagaagagctacttgaatggctggaatggatcatgaatgatgtcgaatgggacgaggtcggaggtgggccgtggacggcgctttcataccatcttcgaaagtcaattgagagtgtatacgatactagcatttgtctggacgaagtcgataaacgtctgttccacgctgcggcacacactgagccacctgcactagatgatattgacaatctgtggttgcaagatgtcattcaagatcgaacaaggcacgacaaattcagaaccatgggtgacgactgtgatgattttatgaaaatcaatggcgccgtctggagactgttagtgaggcgattcctgtggagggaggtttccttgacaattcgttga

SEQ ID NO: 6842 - protein, 496 aa, Muscodor strobelii
  misc_feature: SGI Peptide ID NO. 562033
  misc_feature (1)..(63): Pfam Id: PF06985 Pfam Desc: Heterokaryon incompatibility protein (HET)
  misc_feature (1)..(198): NCBI GI: 116200494 Blast Desc: CHGG_10792 [Chaetomium globosum CBS 148.51] gi|88175506|gb|EAQ82974.1| CHGG_10792 [Chaetomium globosum CBS 148.51]
  misc_feature (1)..(197): NCBI GI: 256722966 Blast Desc: NECHADRAFT_86875 [Nectria haematococca mpVI 77-13-4]
  misc_feature (1)..(220): NCBI GI: 189202434 Blast Desc: conserved [Pyrenophora tritici-repentis Pt-1C-BFP] gi|187984652|gb|EDU50140.1| conserved [Pyrenophora tritici-repentis Pt-1C-BFP]
  misc_feature (1)..(198): NCBI GI: 238842362 Blast Desc: conserved [Microsporum canis CBS 113480]
  misc_feature (1)..(203): NCBI GI: 256724619 Blast Desc: NECHADRAFT_95927 [Nectria haematococca mpVI 77-13-4]
  misc_feature (1)..(361): NCBI GI: 171680414 Blast Desc: protein product [Podospora anserina] gi|170939834|emb|CAP65059.1| protein product [Podospora anserina]
  misc_feature (1)..(198): NCBI GI: 46111023 Blast Desc: FG02393.1 [Gibberella zeae PH-1] gi|82779921|gb|ABB90278.1| heterokaryon incompatibility protein [Gibberella zeae]
  misc_feature (1)..(201): NCBI GI: 171691096 Blast Desc: protein product [Podospora anserina] gi|170945496|emb|CAP71608.1| protein product [Podospora anserina]
  misc_feature (7)..(215): NCBI GI: 145228363 Blast Desc: An01g00430 [Aspergillus niger] gi|134054577|emb|CAK43432.1| protein product [Aspergillus niger]
  misc_feature (1)..(198): NCBI GI: 171688996 Blast Desc: protein product [Podospora anserina] gi|170944460|emb|CAP70571.1| protein product [Podospora anserina]
MPKIYSRAKGVVIYIGEPANNSDLCLDVLQSGFVTSDRSNDFAIAADHLLRRDYFSRVWVLQEVALARKATLLCGEKDINWTRLSKCQIKPDLRRFSSTPLLRVKGFELYTTPEQLLTLLDIARGCKSQDPRDKVYSVLGLALDEHKVAADYNLSVRDLYIKVALSLAQQYGWGKVLRRAGRWRRSIESLPSWVPDWSCTRSVVSGSNIMGAEIQARRAGVEVSEIGLQMPYDSVLYNPDTSSLTLSTGTTGYVGYKDKRLSHIHDGELNNIYVFGAPGDLPSSVELLESSHYLCLSQNSYSRPRPNLTAFNTVFTLGTPLSVLQFNETDATYTSTSWSNGKDHITLAFECSVLLSGQAALIPIRQVSNDLSIRTKEELLEWLEWIMNDVEWDEVGGGPWTALSYHLRKSIESVYDTSICLDEVDKRLFHAAAHTEPPALDDIDNLWLQDVIQDRTRHDKFRTMGDDCDDFMKINGAVWRLLVRRFLWREVSLTIR

SEQ ID NO: 6843 - DNA, 2096 bp, Muscodor strobelii
  misc_feature: SGI EST ID NO. CUFF.17064.0
  misc_feature: Variant of the nucleotide sequence at SEQ ID NO 6841
ttaaaacaccaatgtaactgcgtcgaaagacatgatggattggcacgacaagtcatgcacccgtctcgatcttgcatccttcgacggaattcagagttgtctacgttgtggctcattcgtccaagtagtaaagccatttaagctcccgtcgatcgagaaagaatccgacatcaggctgttacgcctcctacccgccgagtttcatgaagacattcaatgcgaagtctttgttcgagatctctcgtccagaccggaatatgaggctgtttcgtacacatgggctgacgaaacagggaataacgagttgtgtaaatctgtttctgtctctgggcacgacttcaagatcacaagaaattgcgagaacgccctcaaacgtattcggaagcgtaattattcacgaacgatttggatagatgcagtatgcataaaccaagacgatactaacgagcgtggtcatcaagtacggcttatgcctaaaatctactctcgcgcgaagggcgtcgtgatttacattggtgagccagcaaacaacagcgatctctgtcttgatgtgctgcagtctggtttcgtcacgagtgaccgatccaacgattttgctatcgcagcagatcacttgttgagaagagattacttttcgagggtatgggttctgcaagaggtagcgctggctcgcaaagccacccttctctgcggtgaaaaggatattaattggactcgactatcaaaatgccagatcaaaccggatctaaggagattttcttctacacccctcctgagggtcaagggatttgagctatacacaacacccgagcagctactcacactactggatattgcccgtggatgtaaatcccaggacccgcgtgacaaagtttattcggttcttgggcttgctcttgacgagcacaaggttgccgcagattacaacttgagtgttcgagacctttatataaaagtcgctctaagtttggcccagcaatacggctggggcaaggtcctgcgccgggccggacggtggcgacgatcgattgaatcactgccctcctgggtgccggattggagttgcactagatctgttgtttccggatccaatattatgggcgcggagattcaggcgagacgggctggcgttgaagtctctgaaataggcctccagatgccctacgactcggtactatacaatcctgacacttcgtcattgacgctctcaacaggaaccactgggtatgtgggttacaaagataagagactgagccatatccacgatggggaattgaacaacatttatgtctttggtgcgcctggagacttaccaagctctgtcgagcttcttgaaagttcacactatctctgtctaagccagaattcgtattccaggccacggccaaatcttaccgcgttcaacacggtcttcactctgggtacgcctctttctgttctgcaatttaatgaaactgatgcaacttacacgtcgacttcgtggtcgaacgggaaggatcatattacgttggcctttgaatgttcagtattattgtcagggcaagcagctctcattcctatccgccaagtttcaaatgatcttagcatacggacaaaagaagagctacttgaatggctggaatggatcatgaatgatgtcgaatgggacgaggtcggaggtgggccgtggacggcgctttcataccatcttcgaaagtcaattgagagtgtatacgatactagcatttgtctggacgaagtcgataaacgtctgttccacgctgcggcacacactgagccacctgcactagatgatattgacaatctgtggttgcaagatgtcattcaagatcgaacaaggcacgacaaattcagaaccatgggtgacgactgtgatgattttatgaaaatcaatggcgccgtctggagactgttagtgaggcgattcctgtggagggaggtttccttgacaattcgttgatcgggggcctattgaatgtttaaggaaacttacaaatgtagtcacaagctacagtattcgacttccttaccatgcacgccacttagctacaacacctcctcatatctacgtagcctgaagcactgctcaatgttaa

SEQ ID NO: 6844 - DNA, 3291 bp, Muscodor strobelii
  misc_feature: SGI cDNA ID NO. 562034
  misc_feature: Elevated expression when VOC is produced
  misc_feature: Encodes the peptide sequence at SEQ ID NO 6845
atgcgtttctcaacattcatcacagcggcactggccccggtcagcttgcttgcacagagcgcaccacagacagcagcaatcccggagctagacctcgactcaactgctctggatgcgttgctggccaagcacaatctcgcgttggtaccgcggtccgaattaacagacgtattgagtgaacttaccactctgttaaaggaaaacagggaagagaaggccaggaaagccagggctcctgcatacgctggattagctaagggacttctgaaaagacaattaaagaacaataacactgtcctcagcacgctactagcagggacaacctcaacgcctgcaggcaaaaccaccacgccagtagattccacaacacccggctcatcaggctcgacaaaaacaactgccgcgagcacagagtccacgagcattgcctcatcttcgtcatccagcagctcatcctcatccgatcaaacggatggcctggatgacctgattggtgacctcacgggccttttgggcggagatggaggccttggaggcattggcgatcttctaacggcccttcagaacattgcctcagccctggaagatctaccaggccttatcaaggcagcgtcgggtctgctcacaccccaattcctccaagcgttccacgacgcaatcattgatttggatgctacacttcagccaccaactcccaaccaagttcggactctgttgaacactaccgtgccattggttcagtcgctcagcaaattgcctcttgaagagattatcaacgaaatcgctgatattgatattcccggcctgatcaacgctgtcaaacccttgttgaccccgtctactatcaacggtattgtgggattggtcggtagtgcagagagactcctgtcaaacagcaccgtcacaacccttgagtctttgctaaagactctagatggaatagatattcctggcatcctcgatgccgtaagccctctccttacaccggatagtgtcaatggcattgtagggctcttgggtagcgccgaaagattgctctccaatagcactgttaccactctggaatcattgctcagcacccttaacaaggttgacattccaggcattctagatgccgtgagcccacttctcacaccggatagcgttaatggaatcgtcggtttgctcggcagtgcggaaagacttctttcgaacagtaccgtcactaccttggagtcgttgctcaacacgctgaacaaggttgacattcccggcatccttgacgccgtgagcccactcctcacgcctgacagcgtgaatggaattgttggattattgggcagtgctgagaagcttctatccaatagcacagttaccactcttgagtcgctattgaagacattggacggcattgatatcccaggcatcgttgacgctgttaagcccctgctcacaccagactcagtcaatggtatcgtcggtctacttggcagcgccgagtcacttctcactaaccagaccgtgagctcgctcaagaccttgctgaatacagtgaatggtcttgacattcctggcattgtcgacgctgtgcagcctctgctgacctctgactctatcaatggtattgttggcctgcttaacaatgctgaatcactcctcacgaatgcaacggtcagctcgctcaagactcttttggacacagtaaatggcctcgatattcctggtatcgtcgatgctgtcaaacctctgctcacttctgactcgatcaatggcattgttggcttgctgggcaatgcagagtcactactcacgaaggcaactgttgacaacctgaagaccctattgaatacggtcaacggtcttgacattccgggtatcgccactgttgacaacctaaagaccctgttgaacacggttaatggtcttgatattccgggtcttcttgatgcggttaagcctctccttacggcagattccatcaacggcatcgttggcttattaaataacgccgaatcactcctaacgaaggccactgtaaacaacctaaagaccttgttggataccgtcaatggcctcgatatccctggcatcgttaacgccgtgaaacctcttcttacggcggattccgttaatggcatagttggtctccttagcaatgctgaagatcttctcacgaaggacacagtcagctcacttaagacgttgttgacgagcgcccaaccccttatcaacgaaatcggaaagattgatcttaccggtctgattgatgctataagccctctgttgacacccagctccgttgacggtcttattactctggtcggtaatgccgagtcattgttgaccgctagattcgtcaaccaaacccagactttgataggcggtgccgtgccgcttgtatccgagcttggtagcttggacatcggtggtctgctaagtcaaatcacacctattctcaacgaggttggcaagcttgacttggcaggtctgttcaaggccattgagccactgctgacgaccgagtccattggaggcattgttacactccttgataacgccgagggcttactgaccaagaatttcgtcaaccagacccagaccctcattggaggcgctgtaccattgataacagaaattagcaagcttgacttagctggcttgatcgatatggtgtctcctctacttaagtccttaagtaagattgacattcaaggtcttctcgatgaggttgaacccgttttgtccgagattggcaagatcgatttcagcaatctgatcagccaaatcgtgcctatcttaacacaagtcagcaaacttgacattgacggtatctacaatgctatcgcaccgctcttgacggttaactctgtgaagggcttggtgggtctcgttgacaatgctgaagcgttgttgactgacaagtttgtgaacaataccgacaccttgatcaatggtgccgtaccacttgttgaggctcttgacggcgtcgacatcaagggtctcatcacgcagcttaaacccctactcaatgaactcgcctcgatcgatctcactgggttggtgaaggctgttgagcctcttctgaccgcagttgatgatattgatgtaaagggtgttgttaacaagatcaagcctctcctcacgccagaatcggtcggaggcatcgtcaatcttgtggacaatgccgttagtctgctctccaccaacttcgtagaccaaacaacggagctgatcggtgacgctactcctatcgtcgcaacagtgtcagacttgataaatgccgttttacaagcgttgctccagcagagctag

SEQ ID NO: 6845 - protein, 1096 aa, Muscodor strobelii
  misc_feature: SGI Peptide ID NO. 562034
  misc_feature (1)..(1084): NCBI GI: 46139583 Blast Desc: FG11306.1 [Gibberella zeae PH-1]
  misc_feature (180)..(1096): NCBI GI: 46139583 Blast Desc: FG11306.1 [Gibberella zeae PH-1]
  misc_feature (192)..(1096): NCBI GI: 256721230 Blast Desc: NECHADRAFT_34827 [Nectria haematococca mpVI 77-13-4]
  misc_feature (164)..(1093): NCBI GI: 39969321 Blast Desc: MGG_10271 [Magnaporthe grisea 70-15] gi|149211151|ref|XP_001522950.1| MGCH7_ch7g1038 [Magnaporthe grisea 70-15] gi|86196993|gb|EAQ71631.1| MGCH7_ch7g1038 grisea
  misc_feature (176)..(1084): NCBI GI: 39969321 Blast Desc: MGG_10271 [Magnaporthe grisea 70-15] gi|149211151|ref|XP_001522950.1| MGCH7_ch7g1038 [Magnaporthe grisea 70-15] gi|86196993|gb|EAQ71631.1| MGCH7_ch7g1038 grisea
  misc_feature (313)..(1088): NCBI GI: 256721230 Blast Desc: NECHADRAFT_34827 [Nectria haematococca mpVI 77-13-4]
  misc_feature (565)..(1077): NCBI GI: 116200941 Blast Desc: CHGG_08355 [Chaetomium globosum CBS 148.51] gi|88176873|gb|EAQ84341.1| CHGG_08355 [Chaetomium globosum CBS 148.51]
  misc_feature (504)..(867): NCBI GI: 116200941 Blast Desc: CHGG_08355 [Chaetomium globosum CBS 148.51] gi|88176873|gb|EAQ84341.1| CHGG_08355 [Chaetomium globosum CBS 148.51]
  misc_feature (686)..(1081): NCBI GI: 116200941 Blast Desc: CHGG_08355 [Chaetomium globosum CBS 148.51] gi|88176873|gb|EAQ84341.1| CHGG_08355 [Chaetomium globosum CBS 148.51]
  misc_feature (433)..(1088): NCBI GI: 242784960 Blast Desc: conserved [Talaromyces stipitatus ATCC 10500] gi|218720643|gb|EED20062.1| conserved [Talaromyces stipitatus ATCC 10500]
  misc_feature: Useful for introducing or modulating the production of volatile compounds
MRFSTFITAALAPVSLLAQSAPQTAAIPELDLDSTALDALLAKHNLALVPRSELTDVLSELTTLLKENREEKARKARAPAYAGLAKGLLKRQLKNNNTVLSTLLAGTTSTPAGKTTTPVDSTTPGSSGSTKTTAASTESTSIASSSSSSSSSSSDQTDGLDDLIGDLTGLLGGDGGLGGIGDLLTALQNIASALEDLPGLIKAASGLLTPQFLQAFHDAIIDLDATLQPPTPNQVRTLLNTTVPLVQSLSKLPLEEIINEIADIDIPGLINAVKPLLTPSTINGIVGLVGSAERLLSNSTVTTLESLLKTLDGIDIPGILDAVSPLLTPDSVNGIVGLLGSAERLLSNSTVTTLESLLSTLNKVDIPGILDAVSPLLTPDSVNGIVGLLGSAERLLSNSTVTTLESLLNTLNKVDIPGILDAVSPLLTPDSVNGIVGLLGSAEKLLSNSTVTTLESLLKTLDGIDIPGIVDAVKPLLTPDSVNGIVGLLGSAESLLTNQTVSSLKTLLNTVNGLDIPGIVDAVQPLLTSDSINGIVGLLNNAESLLTNATVSSLKTLLDTVNGLDIPGIVDAVKPLLTSDSINGIVGLLGNAESLLTKATVDNLKTLLNTVNGLDIPGIATVDNLKTLLNTVNGLDIPGLLDAVKPLLTADSINGIVGLLNNAESLLTKATVNNLKTLLDTVNGLDIPGIVNAVKPLLTADSVNGIVGLLSNAEDLLTKDTVSSLKTLLTSAQPLINEIGKIDLTGLIDAISPLLTPSSVDGLITLVGNAESLLTARFVNQTQTLIGGAVPLVSELGSLDIGGLLSQITPILNEVGKLDLAGLFKAIEPLLTTESIGGIVTLLDNAEGLLTKNFVNQTQTLIGGAVPLITEISKLDLAGLIDMVSPLLKSLSKIDIQGLLDEVEPVLSEIGKIDFSNLISQIVPILTQVSKLDIDGIYNAIAPLLTVNSVKGLVGLVDNAEALLTDKFVNNTDTLINGAVPLVEALDGVDIKGLITQLKPLLNELASIDLTGLVKAVEPLLTAVDDIDVKGVVNKIKPLLTPESVGGIVNLVDNAVSLLSTNFVDQTTELIGDATPIVATVSDLINAVLQALLQQS

SEQ ID NO: 6846 - DNA, 3848 bp, Muscodor strobelii
  misc_feature: SGI EST ID NO. CUFF.17099.1
  misc_feature: Variant of the nucleotide sequence at SEQ ID NO 6844
caatattccccaataggcaaaggattcgcgatatcctggtttgctgcaggatgcatttgctagtcggcaatctgcgcgaggctctcccccacaagcgcttcgtgtgaaagaacggacagagatggagtagcgtgatgtaccggcgatcaaatcatggaaacacgattaagagatggaagggctgatatcaattcttcatttgtccttcccccatcctcctgcgtctgcctcttttgttcttctgtccttcttgaactacgagttgaacgagctgttaagctaactcggagcttcaagtgttgacgggcagacaacaacacattggcagcggcgctccatagtcaatttgcgccatgcgtttctcaacattcatcacagcggcactggccccggtcagcttgcttgcacagagcgcaccacagacagcagcaatcccggagctagacctcgactcaactgctctggatgcgttgctggccaagcacaatctcgcgttggtaccgcggtccgaattaacagacgtattgagtgaacttaccactctgttaaaggaaaacagggaagagaaggccaggaaagccagggctcctgcatacgctggattagctaagggacttctgaaaagacaattaaagaacaataacactgtcctcagcacgctactagcagggacaacctcaacgcctgcaggcaaaaccaccacgccagtagattccacaacacccggctcatcaggctcgacaaaaacaactgccgcgagcacagagtccacgagcattgcctcatcttcgtcatccagcagctcatcctcatccgatcaaacggatggcctggatgacctgattggtgacctcacgggccttttgggcggagatggaggccttggaggcattggcgatcttctaacggcccttcagaacattgcctcagccctggaagatctaccaggccttatcaaggcagcgtcgggtctgctcacaccccaattcctccaagcgttccacgacgcaatcattgatttggatgctacacttcagccaccaactcccaaccaagttcggactctgttgaacactaccgtgccattggttcagtcgctcagcaaattgcctcttgaagagattatcaacgaaatcgctgatattgatattcccggcctgatcaacgctgtcaaacccttgttgaccccgtctactatcaacggtattgtgggattggtcggtagtgcagagagactcctgtcaaacagcaccgtcacaacccttgagtctttgctaaagactctagatggaatagatattcctggcatcctcgatgccgtaagccctctccttacaccggatagtgtcaatggcattgtagggctcttgggtagcgccgaaagattgctctccaatagcactgttaccactctggaatcattgctcagcacccttaacaaggttgacattccaggcattctagatgccgtgagcccacttctcacaccggatagcgttaatggaatcgtcggtttgctcggcagtgcggaaagacttctttcgaacagtaccgtcactaccttggagtcgttgctcaacacgctgaacaaggttgacattcccggcatccttgacgccgtgagcccactcctcacgcctgacagcgtgaatggaattgttggattattgggcagtgctgagaagcttctatccaatagcacagttaccactcttgagtcgctattgaagacattggacggcattgatatcccaggcatcgttgacgctgttaagcccctgctcacaccagactcagtcaatggtatcgtcggtctacttggcagcgccgagtcacttctcactaaccagaccgtgagctcgctcaagaccttgctgaatacagtgaatggtcttgacattcctggcattgtcgacgctgtgcagcctctgctgacctctgactctatcaatggtattgttggcctgcttaacaatgctgaatcactcctcacgaatgcaacggtcagctcgctcaagactcttttggacacagtaaatggcctcgatattcctggtatcgtcgatgctgtcaaacctctgctcacttctgactcgatcaatggcattgttggcttgctgggcaatgcagagtcactactcacgaaggcaactgttgacaacctgaagaccctattgaatacggtcaacggtcttgacattccgggtatcgttgatgccatcaaccctcctgacttctgactcgataaatggaattgttggcttgctaaacaacgctgagtcattgttgaccaaggccactgttgacaacctaaagaccctgttgaacacggttaatggtcttgatattccgggtcttcttgatgcggttaagcctctccttacggcagattccatcaacggcatcgttggcttattaaataacgccgaatcactcctaacgaaggccactgtaaacaacctaaagaccttgttggataccgtcaatggcctcgatatccctggcatcgttaacgccgtgaaacctcttcttacggcggattccgttaatggcatagttggtctccttagcaatgctgaagatcttctcacgaaggacacagtcagctcacttaagacgttgttgacgagcgcccaaccccttatcaacgaaatcggaaagattgatcttaccggtctgattgatgctataagccctctgttgacacccagctccgttgacggtcttattactctggtcggtaatgccgagtcattgttgaccgctagattcgtcaaccaaacccagactttgataggcggtgccgtgccgcttgtatccgagcttggtagcttggacatcggtggtctgctaagtcaaatcacacctattctcaacgaggttggcaagcttgacttggcaggtctgttcaaggccattgagccactgctgacgaccgagtccattggaggcattgttacactccttgataacgccgagggcttactgaccaagaatttcgtcaaccagacccagaccctcattggaggcgctgtaccattgataacagaaattagcaagcttgacttagctggcttgatcgatatggtgtctcctctacttaagtccttaagtaagattgacattcaaggtcttctcgatgaggttgaacccgttttgtccgagattggcaagatcgatttcagcaatctgatcagccaaatcgtgcctatcttaacacaagtcagcaaacttgacattgacggtatctacaatgctatcgcaccgctcttgacggttaactctgtgaagggcttggtgggtctcgttgacaatgctgaagcgttgttgactgacaagtttgtgaacaataccgacaccttgatcaatggtgccgtaccacttgttgaggctcttgacggcgtcgacatcaagggtctcatcacgcagcttaaacccctactcaatgaactcgcctcgatcgatctcactgggttggtgaaggctgttgagcctcttctgaccgcagttgatgatattgatgtaaagggtgttgttaacaagatcaagcctctcctcacgccagaatcggtcggaggcatcgtcaatcttgtggacaatgccgttagtctgctctccaccaacttcgtagaccaaacaacggagctgatcggtgacgctactcctatcgtcgcaacagtgtcagacttgataaatgccgttttacaagcgttgctccagcagagctagcatagactcgatcgtgcagacgacgacgtaatgatgatatacaaaacgagagatgagtctctataatgtaccttaatgagtaatcatgaatcttaatgataccaacaaatataaagaag

SEQ ID NO: 6847 - DNA, 1356 bp, Muscodor strobelii
  misc_feature: SGI cDNA ID NO. 562035
  misc_feature: Elevated expression when VOC is produced
  misc_feature: Encodes the peptide sequence at SEQ ID NO 6848
atggcgtcaagattccaggaacggtctcacttcgagcacaacagcccgccgagctctgttcatggtgctagggacgagacggccgagcagacggcaaacgcacagccaagagacagtgatgatggatcgtcaattgatcatgtccaagagaaagcaccgccagttgtgcctctcacgaaaaaagagaagttcaagcgacactgtggacggttcaagtggtggtatcttgttgcggccatcatcctagccgccatcttgttgccaattctctttgaggttatcatacctgccatcacccagagtatcgtgaactctcaaggtttgcctgtattgggcgggacatttcaagcgatctcgccaacccagttgaacgtgactctcatgacgcagctcaacactccgttggctgctcaattggatcctacaacactatatctttataataaagacacaccggattattcaccattcatcgacatcactctgcccggcatgcacgtcaaccataaaacacctgttcaggttacggatcagacagtcaccatcaccaatcaatccgaactcgtcaaatggttcgatggcattttcgacaatccacaggtggatatatcagttaaagggaagacgaaggtccacttaggagcactgcactctactgctaaaatcgacaagaccatcaaagccaaagcgttaaattctctctcaggcttcggcatcacagacttgaaactggtctaccctgcattggaaaacggcaccaacatcaagggaacagtcaatttaccgaacgcgggtgttttaactctcggacttggtgatctttatctcaacctcttctcaggggacgtcaaccttggcatagttaccatttataatgctgtgctaccccctgggaataacacgcggtacttctatggtaaactttacctagatcaacttataccaaacctcggtcggatcctggacagtcaatcgcacgcattggcactaggaaatatcgagctcaacgctacgggcaatgctaccatgtatgatggtgtgcacattccctatgttgaacaggttctcaacaagaagactttgacttcatctctctcagtcattacgctcgttggcgatgtcatttccagcttcagtggcggtggtgcttcactcacggatctactgggcgacacttttggcaactcgaccttccttgaggatctcctaggaaacttcaacaaaactggtgcattgaatactacagcattaacacgaagcgcagcacgctttggcggtgaaccgcgtacaatcaaagcacctgctacgaagaatctattgaaattgggactaaagctagcattggcgaagctatga

SEQ ID NO: 6848 - protein, 451 aa, Muscodor strobelii
  misc_feature: SGI Peptide ID NO. 562035
  misc_feature (25)..(445): NCBI GI: 256721231 Blast Desc: NECHADRAFT_34831 [Nectria haematococca mpVI 77-13-4]
  misc_feature (24)..(408): NCBI GI: 46139585 Blast Desc: FG11307.1 [Gibberella zeae PH-1]
  misc_feature (62)..(451): NCBI GI: 116200935 Blast Desc: CHGG_08352 [Chaetomium globosum CBS 148.51] gi|88176870|gb|EAQ84338.1| CHGG_08352 [Chaetomium globosum CBS 148.51]
  misc_feature (15)..(416): NCBI GI: 145603854 Blast Desc: MGG_10273 [Magnaporthe grisea 70-15] gi|145011996|gb|EDJ96652.1| MGG_10273 [Magnaporthe grisea 70-15]
  misc_feature (15)..(416): NCBI GI: 149211157 Blast Desc: MGCH7_ch7g1040 [Magnaporthe grisea 70-15] gi|86196995|gb|EAQ71633.1| MGCH7_ch7g1040 [Magnaporthe grisea 70-15]
  misc_feature (42)..(389): NCBI GI: 67524443 Blast Desc: AN2679.2 [Aspergillus nidulans FGSC A4] gi|40743897|gb|EAA63081.1| AN2679.2 [Aspergillus nidulans FGSC A4] gi|259486410|tpe|CBF84224.1| TPA: conserved [Aspergillus FGSC
  misc_feature (61)..(405): NCBI GI: 238508164 Blast Desc: conserved [Aspergillus flavus NRRL3357] gi|220688802|gb|EED45154.1| conserved [Aspergillus flavus NRRL3357]
  misc_feature (19)..(405): NCBI GI: 115399378 Blast Desc: conserved [Aspergillus terreus NIH2624] gi|114192161|gb|EAU33861.1| conserved [Aspergillus terreus NIH2624]
  misc_feature (36)..(429): NCBI GI: 115390274 Blast Desc: conserved [Aspergillus terreus NIH2624] gi|114195038|gb|EAU36738.1| conserved [Aspergillus terreus NIH2624]
  misc_feature (38)..(392): NCBI GI: 115383722 Blast Desc: conserved [Aspergillus terreus NIH2624] gi|114196100|gb|EAU37800.1| conserved [Aspergillus terreus NIH2624]
  misc_feature: Useful for introducing or modulating the production of volatile compounds
MASRFQERSHFEHNSPPSSVHGARDETAEQTANAQPRDSDDGSSIDHVQEKAPPVVPLTKKEKFKRHCGRFKWWYLVAAIILAAILLPILFEVIIPAITQSIVNSQGLPVLGGTFQAISPTQLNVTLMTQLNTPLAAQLDPTTLYLYNKDTPDYSPFIDITLPGMHVNHKTPVQVTDQTVTITNQSELVKWFDGIFDNPQVDISVKGKTKVHLGALHSTAKIDKTIKAKALNSLSGFGITDLKLVYPALENGTNIKGTVNLPNAGVLTLGLGDLYLNLFSGDVNLGIVTIYNAVLPPGNNTRYFYGKLYLDQLIPNLGRILDSQSHALALGNIELNATGNATMYDGVHIPYVEQVLNKKTLTSSLSVITLVGDVISSFSGGGASLTDLLGDTFGNSTFLEDLLGNFNKTGALNTTALTRSAARFGGEPRTIKAPATKNLLKLGLKLALAKL

SEQ ID NO: 6849 - DNA, 2023 bp, Muscodor strobelii
  misc_feature: SGI EST ID NO. CUFF.17082.0
  misc_feature: Variant of the nucleotide sequence at SEQ ID NO 6847
cggagaacctcatcacgatgcaacttcggaagtctgcaagatgcaaagaacaagggcggcagcgcactcgggctgactagcgcagataggtacgaaggatggcgatccaagcacaccaagtgccagcgcaaaaacatgattgtctagccaaggtagttatcctatgttgtcatgccgcggcgatgctgacactatactgcaccctggccccgttactcgcgatcatactcatgaattagattccccagggctctacttgccttacattgtctgtctgttcgcttgtccgccctcaatcaaccgtcgccatccagtgttttggtgcctcacgacaagttaatcatggcgtcaagattccaggaacggtctcacttcgagcacaacagcccgccgagctctgttcatggtgctagggacgagacggccgagcagacggcaaacgcacagccaagagacagtgatgatggatcgtcaattgatcatgtccaagagaaagcaccgccagttgtgcctctcacgaaaaaagagaagttcaagcgacactgtggacggttcaagtggtggtatcttgttgcggccatcatcctagccgccatcttgttgccaattctctttgaggttatcatacctgccatcacccagagtatcgtgaactctcaaggtttgcctgtattgggcgggacatttcaagcgatctcgccaacccagttgaacgtgactctcatgacgcagctcaacactccgttggctgctcaattggatcctacaacactatatctttataataaagacacaccggattattcaccattcatcgacatcactctgcccggcatgcacgtcaaccataaaacacctgttcaggttacggatcagacagtcaccatcaccaatcaatccgaactcgtcaaatggttcgatggcattttcgacaatccacaggtggatatatcagttaaagggaagacgaaggtccacttaggagcactgcactctactgctaaaatcgacaagaccatcaaagccaaagcgttaaattctctctcaggcttcggcatcacagacttgaaactggtctaccctgcattggaaaacggcaccaacatcaagggaacagtcaatttaccgaacgcgggtgttttaactctcggacttggtgatctttatctcaacctcttctcaggggacgtcaaccttggcatagttaccatttataatgctgtgctaccccctgggaataacacgcggtacttctatggtaaactttacctagatcaacttataccaaacctcggtcggatcctggacagtcaatcgcacgcattggcactaggaaatatcgagctcaacgctacgggcaatgctaccatgtatgatggtgtgcacattccctatgttgaacaggttctcaacaagaagactttgacttcatctctctcagtcattacgctcgttggcgatgtcatttccagcttcagtggcggtggtgcttcactcacggatctactgggcgacacttttggcaactcgaccttccttgaggatctcctaggaaacttcaacaaaactggtgcattgaatactacagcattaacacgaagcgcagcacgctttggcggtgaaccgcgtacaatcaaagcacctgctacgaagaatctattgaaattgggactaaagctagcattggcgaagctatgagagattgaggaataaacgcaatactaatgaaacaaatacgtcgggctgcccagttacgtgggtgaaagcggaagacgctgagataatgactcacggacagggctaatagagcgccagatgaattaatgaataatgttttgatagtaaatgaatacccagtgaagtgagacacagtgccttttccaatcgtacgatatgtggttgtctgtgatgctgtcgcgacgatcttgatccatcattgttgtacgatcatgttgtagtggccaggccctttcgtgcctattcttgtggcttcatgtatcaccgtttcggtatagcttccgac

SEQ ID NO: 6850 - DNA, 996 bp, Muscodor strobelii
  misc_feature: SGI cDNA ID NO. 562036
  misc_feature: Encodes the peptide sequence at SEQ ID NO 6851
atgcagaatccagagatcaagaagatggggactttcctcgaggtcctgtccagggacgagcaacgggaacatcccacattggatcttgaaacgatcgagtacgctcgcctcgacaagctcctcgccgaattcctccaactcgcccaaaagatcctccgaaagcttctaccagaagacgccctgcgtctacgtgtcgacatctcacatggcagaaatctatatgatgcttggcgacgacggtttcgccagcaatggtttatgatggatcaacacagatgtgccgtgctcgtcgctggaggtcgactcaaagacgtctcttttgataattctcttggctatgaccttgggaagtggcagacgagtgaggcagctggtccagtttctgaggtggaaggaaaccagaattttgacgcagggcattggtggttaaatatcacttgtgcagagcgggatggcatagttggcagttcccgcgagaaaccaaccaaagggcgatacggaattgctgtgctccccctgttgacaggatcagaggaatatgttcgcacgaatacaatcaagtacattcgacacgggacatcgtcggatatgcatatagggttgataccccaagttggacgacaaatcagaattcttcgagggcatacgctcaagagtatctatgcgccggaagcgggcttacgatacgatggactgtacacgatcaggcaatatggaatgaaatacgacgagaagctcggtgcacaccgtctcgagttaaccttagagcgtgttcctaatcagcgtccttgcgaagagctccgccagatcccgaaaccctcacaactagacgattggtatttatatgagaagcttgagggcgatcagattaagctaaggcaaggagaaacgaagtacctagaatggacactcagacggcgagaagagaaagccgatcttgagagctggcaggccacacgaatatttagagcctcgttgtccgaggttcctcgatga

SEQ ID NO: 6851 - protein, 331 aa, Muscodor strobelii
  misc_feature: SGI Peptide ID NO. 562036
  misc_feature (7)..(301): NCBI GI: 261360392 Blast Desc: conserved [Verticillium albo-atrum VaMs.102]
  misc_feature (12)..(300): NCBI GI: 256732765 Blast Desc: NECHADRAFT_79294 [Nectria haematococca mpVI 77-13-4]
  misc_feature (125)..(329): NCBI GI: 171686876 Blast Desc: protein product [Podospora anserina] gi|170943399|emb|CAP69052.1| protein product [Podospora anserina]
  misc_feature (13)..(302): NCBI GI: 154298938 Blast Desc: [Botryotinia fuckeliana B05.10] gi|150857621|gb|EDN32813.1| [Botryotinia fuckeliana B05.10]
  misc_feature (13)..(301): NCBI GI: 156064109 Blast Desc: [Sclerotinia sclerotiorum 1980] gi|154690924|gb|EDN90662.1| [Sclerotinia sclerotiorum 1980]
  misc_feature (4)..(179): NCBI GI: 46125831 Blast Desc: FG07293.1 [Gibberella zeae PH-1]
  misc_feature (132)..(294): NCBI GI: 189208726 Blast Desc: [Pyrenophora tritici-repentis Pt-1C-BFP] gi|187976789|gb|EDU43415.1| [Pyrenophora tritici-repentis Pt-1C-BFP]
  misc_feature (126)..(261): NCBI GI: 169616310 Blast Desc: SNOG_11325 [Phaeosphaeria nodorum SN15] gi|160703151|gb|EAT81033.2| SNOG_11325 [Phaeosphaeria nodorum SN15]
  misc_feature (4)..(143): NCBI GI: 116191957 Blast Desc: CHGG_05696 [Chaetomium globosum CBS 148.51] gi|88181609|gb|EAQ89077.1| CHGG_05696 [Chaetomium globosum CBS 148.51]
  misc_feature (130)..(280): NCBI GI: 154297251 Blast Desc: BC1G_12461 [Botryotinia fuckeliana B05.10] gi|150842988|gb|EDN18181.1| BC1G_12461 [Botryotinia fuckeliana B05.10]
MQNPEIKKMGTFLEVLSRDEQREHPTLDLETIEYARLDKLLAEFLQLAQKILRKLLPEDALRLRVDISHGRNLYDAWRRRFRQQWFMMDQHRCAVLVAGGRLKDVSFDNSLGYDLGKWQTSEAAGPVSEVEGNQNFDAGHWWLNITCAERDGIVGSSREKPTKGRYGIAVLPLLTGSEEYVRTNTIKYIRHGTSSDMHIGLIPQVGRQIRILRGHTLKSIYAPEAGLRYDGLYTIRQYGMKYDEKLGAHRLELTLERVPNQRPCEELRQIPKPSQLDDWYLYEKLEGDQIKLRQGETKYLEWTLRRREEKADLESWQATRIFRASLSEVPR

SEQ ID NO: 6852 - DNA, 2907 bp, Muscodor strobelii
  misc_feature: SGI cDNA ID NO. 562037
  misc_feature: Encodes the peptide sequence at SEQ ID NO 6853
atggcgacccacactgccatggcgcaaggcagtgacgcctctatgcgcaacgcactagagcagcgtctcggcatcattcattacgtctcagataaagagcgttcctggtatggtcaaatgcgcaccagatacactgacttccaagtccatgagatctccaatgaaggcgaagttgttcatttgaatgacttcgtcaacaatgcacgagagatggcaagagcctcgagccaggctgctgctccacagtctacgacccaaaacccatcacagactagggagtgcgatgccacagcctccaaggctgatgttgtggcccctgaacatgcccagtccagtcctgcagccgacgggactcagactaaaagtggcggtcggcttaatgtcaacattagcgaggccgacagaacatctctagaagaattagtgggagacactgtcacggacgctctaatctcactcaatgaacgaatttgcgttttctcgaggccgcttcccaagagtgacggtggtgtcaagaccccagctataggtgacaaagccaagagatcacgcgttcatgaggaagtgcgtcgcatctttgagggcaggatcgaaaccgtcacgttgtctgatggctctatcaaagcctcgcagagtcgtgcaaatggtcgccaaggcggcggcaatcgagctgccgggaatggatctcgaaataatcgccagaatccaggtcaaggccagggccaaaggcaagcccctggtgatggcccattcttacatttcacgctctacaaggaaaacaaagacactatggatgcgcttaaccatatggccaaaatcctcagattccctccaaaattctttggggttgcaggaactaaagatcgccgtgccgttacctcccagcgagtgagcatcaagaaccgaagccctacctcgatggttatcatcaatgaacggatccaccagatcaagataggcgacttcaaattctctcgacttccaatccgtctcaacgaccataatggtaacgagttcattgttgtactgaagaattgctttttccaaggcacagaacttctaagcattgaggacaagatggacgtggccaagtcgaccgtggaatcagctctagcgcaaatcacccagcacggtttcatcaactactatggaacgcagagatttggcactcatgagataggtactcaggaggttggcatgaagatactgcaagatgactttgcaggtgctacgcaagcgcttttatcctacgaccctcaattactccaggatgcagacgatcagggccaactcaaaaaatccaatcaggaagatattggtcgtgcccgagcatgcaagacatttttggagaccaagagtgctgaagaagcgcttgagtttcttccgccccgttgtcatgtcgaaagaactttgtttcaacacctcggaaagactcctactgatttccctggtgccgtcatggccatcacccgtactatgcgtaccatgtacgttcatgcataccagtctcttgtctggaatttcgcggccagcaagcgttgggagttgtttggaccacaagtaatcaagggagacttagtattggtcaaggccaaaaccgagtcgcaaatcgaccaacctatgactgatgaagacttaatgaaattagacgaggatatctctgcagagctacctgctggagtgatagcacatgtcataacggagagtgatatggaagagggcaagtattcggtttacgatgtcgtcttaccgacaccgggctgggacgttgtctatccactcaaccaagtcggagaattttacgcagaattcatgagcaagccggagaacggcggtttagatcctcataaaatgcaacgacgacaacgagacttcagtcttccaggctcgtaccgcaagttgatgggcaggctcaagagagttcctgctgtctctgtgcaaggatactctgacgatctggagcaactagtgcctacagatctagacaacatccgttctcgaaaagccaaagaagaagaacagcgtttggcacgtcaacagactgccacttcatcttggcatgacttcacaaagagcgttaagcagaacgagcttgaagagtctgagactcgcattgctgaacgagaagcagaggagccgctgccagctgctcgcatgaatgacacgtggattcagacgaacgttgatggcagcaataaacggataaagattgcaaagcactccgagaccgcaacagaggggacgaaactgacatccgaagaagctgatgtagcacggtctccagacgttaaagacaagcctgccttggccgtggatgttgaaatgctcgaaactgacgacccacaacaaaatggcgaggcgcaaggagaccaagttcgcacagctactacctccactatcatcaacatgttgacagcacaggtgcgcgctattacgagtcatattatgcaagctatccatcgagtgatggtcttcctaagaatcgctactgacaagcccgctacgaatcccgatgacaaccacaatcaattggagtcgcaggtagtcgcagggcagaaaacatcaactgacgaagaacaggacaatgaagaacgagagcaaccgacgacgaccggggaagaagtctcatccaatactctcccgttgcccgacgaccacagttcggagactgaaatccgaccaatccatccaccgcgccccgaccctagcacgccacaaccagatgctccttcagcttcaggtcctgctattgtttccgaccatgccgcgctagtagatgccagtgccatgtctgtcgatacacccaagccaaccaaagtagcagtcatcctacgctttgcgctcgacacaagccaatacgccacgatggtagtacgagaactccagggagcatactctcaagaatag

SEQ ID NO: 6853 - protein, 968 aa, Muscodor strobelii
  misc_feature: SGI Peptide ID NO. 562037
  misc_feature (219)..(966): Pfam Id: PF01142 Pfam Desc: tRNA pseudouridine synthase D (TruD)
  misc_feature (247)..(527): Pfam Id: PF01142 Pfam Desc: tRNA pseudouridine synthase D (TruD)
  misc_feature (4)..(963): NCBI GI: 39977157 Blast Desc: MGG_06481 [Magnaporthe grisea 70-15] gi|145016095|gb|EDK00585.1| MGG_06481 [Magnaporthe grisea 70-15]
  misc_feature (6)..(968): NCBI GI: 85084496 Blast Desc: NCU06428 [Neurospora crassa OR74A] gi|28918409|gb|EAA28083.1| [Neurospora crassa OR74A]
  misc_feature (14)..(968): NCBI GI: 116191931 Blast Desc: CHGG_05683 [Chaetomium globosum CBS 148.51] gi|88181596|gb|EAQ89064.1| CHGG_05683 [Chaetomium globosum CBS 148.51]
  misc_feature (176)..(742): NCBI GI: 171686904 Blast Desc: protein product [Podospora anserina] gi|170943413|emb|CAP69066.1| protein product [Podospora anserina]
  misc_feature (23)..(669): NCBI GI: 46125833 Blast Desc: FG07294.1 [Gibberella zeae PH-1]
  misc_feature (17)..(961): NCBI GI: 156064111 Blast Desc: SS1G_00063 [Sclerotinia sclerotiorum 1980] gi|154690925|gb|EDN90663.1| SS1G_00063 [Sclerotinia sclerotiorum 1980]
  misc_feature (17)..(673): NCBI GI: 154298940 Blast Desc: BC1G_11717 [Botryotinia fuckeliana B05.10] gi|150857622|gb|EDN32814.1| BC1G_11717 [Botryotinia fuckeliana B05.10]
  misc_feature (20)..(669): NCBI GI: 169767068 Blast Desc: [Aspergillus oryzae RIB40] gi|83765860|dbj|BAE56003.1| protein product [Aspergillus oryzae]
  misc_feature (20)..(669): NCBI GI: 238483891 Blast Desc: pseudouridine synthase TruD/Pus7, [Aspergillus flavus NRRL3357] gi|220701234|gb|EED57572.1| pseudouridine synthase TruD/Pus7, [Aspergillus flavus NRRL3357]
  misc_feature (11)..(672): NCBI GI: 159131776 Blast Desc: pseudouridine synthase TruD/Pus7, [Aspergillus fumigatus A1163]
MATHTAMAQGSDASMRNALEQRLGIIHYVSDKERSWYGQMRTRYTDFQVHEISNEGEVVHLNDFVNNAREMARASSQAAAPQSTTQNPSQTRECDATASKADVVAPEHAQSSPAADGTQTKSGGRLNVNISEADRTSLEELVGDTVTDALISLNERICVFSRPLPKSDGGVKTPAIGDKAKRSRVHEEVRRIFEGRIETVTLSDGSIKASQSRANGRQGGGNRAAGNGSRNNRQNPGQGQGQRQAPGDGPFLHFTLYKENKDTMDALNHMAKILRFPPKFFGVAGTKDRRAVTSQRVSIKNRSPTSMVIINERIHQIKIGDFKFSRLPIRLNDHNGNEFIVVLKNCFFQGTELLSIEDKMDVAKSTVESALAQITQHGFINYYGTQRFGTHEIGTQEVGMKILQDDFAGATQALLSYDPQLLQDADDQGQLKKSNQEDIGRARACKTFLETKSAEEALEFLPPRCHVERTLFQHLGKTPTDFPGAVMAITRTMRTMYVHAYQSLVWNFAASKRWELFGPQVIKGDLVLVKAKTESQIDQPMTDEDLMKLDEDISAELPAGVIAHVITESDMEEGKYSVYDVVLPTPGWDVVYPLNQVGEFYAEFMSKPENGGLDPHKMQRRQRDFSLPGSYRKLMGRLKRVPAVSVQGYSDDLEQLVPTDLDNIRSRKAKEEEQRLARQQTATSSWHDFTKSVKQNELEESETRIAEREAEEPLPAARMNDTWIQTNVDGSNKRIKIAKHSETATEGTKLTSEEADVARSPDVKDKPALAVDVEMLETDDPQQNGEAQGDQVRTATTSTIINMLTAQVRAITSHIMQAIHRVMVFLRIATDKPATNPDDNHNQLESQVVAGQKTSTDEEQDNEEREQPTTTGEEVSSNTLPLPDDHSSETEIRPIHPPRPDPSTPQPDAPSASGPAIVSDHAALVDASAMSVDTPKPTKVAVILRFALDTSQYATMVVRELQGAYSQE

SEQ ID NO: 6854 - DNA, 2912 bp, Muscodor strobelii
  misc_feature: SGI EST ID NO. CUFF.17121.0
  misc_feature: Variant of the nucleotide sequence at SEQ ID NO 6852
cgacagaacatctctagaagaattagtgggagacactgtcacggacgctctaatctcactcaatgaacgaatttgcgttttctcgaggccgcttcccaagagtgacggtggtgtcaagaccccagctataggtgacaaagccaagagatcacgcgttcatgaggaagtgcgtcgcatctttgagggcaggatcgaaaccgtcacgttgtctgatggctctatcaaagcctcgcagagtcgtgcaaatggtcgccaaggcggcggcaatcgagctgccgggaatggatctcgaaataatcgccagaatccaggtcaaggccagggccaaaggcaagcccctggtgatggcccattcttacatttcacgctctacaaggaaaacaaagacactatggatgcgcttaaccatatggccaaaatcctcagattccctccaaaattctttggggttgcaggaactaaagatcgccgtgccgttacctcccagcgagtgagcatcaagaaccgaagccctacctcgatggttatcatcaatgaacggatccaccagatcaagataggcgacttcaaattctctcgacttccaatccgtctcaacgaccataatggtaacgagttcattgttgtactgaagaattgctttttccaaggcacagaacttctaagcattgaggacaagatggacgtggccaagtcgaccgtggaatcagctctagcgcaaatcacccagcacggtttcatcaactactatggaacgcagagatttggcactcatgagataggtactcaggaggttggcatgaagatactgcaagatgactttgcaggtgctacgcaagcgcttttatcctacgaccctcaattactccaggatgcagacgatcagggccaactcaaaaaatccaatcaggaagatattggtcgtgcccgagcatgcaagacatttttggagaccaagagtgctgaagaagcgcttgagtttcttccgccccgttgtcatgtcgaaagaactttgtttcaacacctcggaaagactcctactgatttccctggtgccgtcatggccatcacccgtactatgcgtaccatgtacgttcatgcataccagtctcttgtctggaatttcgcggccagcaagcgttgggagttgtttggaccacaagtaatcaagggagacttagtattggtcaaggccaaaaccgagtcgcaaatcgaccaacctatgactgatgaagacttaatgaaattagacgaggatatctctgcagagctacctgctggagtgatagcacatgtcataacggagagtgatatggaagagggcaagtattcggtttacgatgtcgtcttaccgacaccgggctgggacgttgtctatccactcaaccaagtcggagaattttacgcagaattcatgagcaagccggagaacggcggtttagatcctcataaaatgcaacgacgacaacgagacttcagtcttccaggctcgtaccgcaagttgatgggcaggctcaagagagttcctgctgtctctgtgcaaggatactctgacgatctggagcaactagtgcctacagatctagacaacatccgttctcgaaaagccaaagaagaagaacagcgtttggcacgtcaacagactgccacttcatcttggcatgacttcacaaagagcgttaagcagaacgagcttgaagagtctgagactcgcattgctgaacgagaagcagaggagccgctgccagctgctcgcatgaatgacacgtggattcagacgaacgttgatggcagcaataaacggataaagattgcaaagcactccgagaccgcaacagaggggacgaaactgacatccgaagaagctgatgtagcacggtctccagacgttaaagacaagcctgccttggccgtggatgttgaaatgctcgaaactgacgacccacaacaaaatggcgaggcgcaaggagaccaagttcgcacagctactacctccactatcatcaacatgttgacagcacaggtgcgcgctattacgagtcatattatgcaagctatccatcgagtgatggtcttcctaagaatcgctactgacaagcccgctacgaatcccgatgacaaccacaatcaattggagtcgcaggtagtcgcagggcagaaaacatcaactgacgaagaacaggacaatgaagaacgagagcaaccgacgacgaccggggaagaagtctcatccaatactctcccgttgcccgacgaccacagttcggagactgaaatccgaccaatccatccaccgcgccccgaccctagcacgccacaaccagatgctccttcagcttcaggtcctgctattgtttccgaccatgccgcgctagtagatgccagtgccatgtctgtcgatacacccaagccaaccaaagtagcagtcatcctacgctttgcgctcgacacaagccaatacgccacgatggtagtacgagaactccagggagcatactctcaagaatagcagatcctctatgtctggacgaaaaccctaatttctggacttcaagacacaattactcactaacagtagtaagagccctttgttgatgatctcgagtaccgattgctctttgtttcatatgccggacaaagaaggagaatgttgagaagcgaaatgttgcgcagaccctcagggatcgatgatgcttctggtcgtccaaatacggatactgctgagtaatgtacttttaacgtgtgccagagtgcgttcacgtaaattgcgccagtggcttttgtaaacctagtctatactaacatgcttgatcgatgcatccttgcatttgccacgttctgagtagggcaaatggctaggaaaagaggcagttgccgatggacggggtaatcaaaaacaatccaaaatgcat

SEQ ID NO: 6855 - DNA, 2490 bp, Muscodor strobelii
  misc_feature: SGI cDNA ID NO. 562038
  misc_feature: Reduced expression when VOC is produced
  misc_feature: Encodes the peptide sequence at SEQ ID NO 6856
atggcgccaaagcggaaggcctctgcaaatgtgaccggcgcagccaagtccggaagggcctctgctgcatcgacgcctggcccctcgacgccccgcgagatcgagagctcctcggatgcctcagacaccgacgaggagccgcccgcccccgatgaggccttcatccagaagaatgtcgacaagttttcccttgctgcttatcaggaaaaggttggccgtggcaccatcgacagcgcctcccgctacttcggcgagaatggcaaacgagacttctcttacctcaagctgaagcccgattccaagagccgccccatatggatcgacccccagcgcggccgcatcatcctcgagaacttcaacccgctggctgagcaggccaaagacttcctcatcaccgtcgccgagcctttgtcacgaccaaccttcctccatgaatacgccctgaccccccacagtctctacgccgccgtgtccgtcggactggagccccgcgacattgtcaacaccctcgaccgattctccaagacccctctccccgaatcgatcgtccagttcatcgaaagctgtgcatcgagttacggcaaagtcaagcttgtcatcaaagataccaaatacttcgttgaaagcaacgatcccgacgtgctgcagaagcttctcaaagaccctaccatagggccatgccgtgtcaaaggcactgagaccgtgacaaatgcaccgtctatgggcggccttgtcattcccggaacatccaacgctgctggtgtccaacaagcgaagttgcagcaaggcgagaaccagcccgctgagaatcccgagaaaccccaacaagagaacccttttgatgcgctacgcgaggacgacgacgatgacaaccaagaggctgtccattctttcgaaatccaagacacaagcgtcgaaattgtgcagaagcgttgtcttgatatacagttcccgatgctggaagagtacgacttccgtaatgatgacaaaaatgctaacttggaaatcgatcttcgccctgcgactcagatcagaagctaccaagagaagagtctcagtaagatgtttggcaacgggcgggcgaaaagtggtatcatcgttctcccatgtggtgcaggtaaaactctcgtgggaatcactgctgcgtgcactatcaaaaagggatgcatcgtgttatgcactagcactatgtcggcgcaccaatggcgccaggaatttctcaaatggtcgaatatccggccggaagatatagctgtatttacagcagacagcaagaacaaattcccaggcaacactggtatcatcgtcacgacgtatcctatggtcacgcagtctggcaagagggctcatgactcacaaaagatgatggacttcctcacaggcagagaatggggtttaatgctactagatgaggtccacgtcgtgcctgcacagatcttccgaaaagtctcacattccataaaaagccatgcaaaactgggtctgaccgcgacgctgctccgagaagatgacaaaatccaagacttgaatttcctcattggcccgaaactgtacgaagcaaactggatggagctctcagaacaaggacatattgccaaggttcaatgtgctgaagtgtggtgccaaatgtcgacggagttttatgacgagtatctccgaaccaacgatcgtggtcttaaggcgaatctctacgtcatgaatcctcgcaaaatccaggcttgtcaattcctcattgattaccatgagcgtcgtggtgacaagatcattgtgttttccgacaatgtttatgctttgaagcacatagctacagctttggagaaggcgtacatctgcggagacacaggcaatgttgaacgcatgcgggttctggacaatttcatgcacaacccacttgtcaagaccatattcctctcgaagattggagacacatctttggatctgccagaagctacatgcctgattcaaatttcgtcacactacggatcgaggcgtcaagaagcacaacgacttggccgtattcttagggcgaagcgaagatccgatgaagggttcaatgcttttttctattcgcttgtgtcgaaagatacagcggaaatgtattactcaaccaaacgacaagctttccttgttgaccaaggttactctttcaaggtcataacgcagctagcaggcatggagcagatggacggattgacgtttaactcaaaatcagaacggcgagaactacttgccaaggtggtcctggatacggaatcaaaacgagaagctaatgaggaagccaccgatgacctgttctataccgctgtcaaaaggaagaagaggggtgtgcgccggacagccggcaccttgggcgagctaagtggtggtcaagacatggcatacattgagcaaaggaaaggtaccaataaggcgctcaagaagaaaccacagcaaaatgccttcttcaagaagattgctagagaaaagcaaaggctcaaagacgcacgttag

SEQ ID NO: 6856 - protein, 829 aa, Muscodor strobelii
  misc_feature: SGI Peptide ID NO. 562038
  misc_feature (604)..(677): Pfam Id: PF00271 Pfam Desc: Helicase conserved C-terminal domain
  misc_feature (341)..(501): Pfam Id: PF04851 Pfam Desc: Type III restriction enzyme, res subunit
  misc_feature (608)..(677): Pfam Id: PF00271 Pfam Desc: Helicase conserved C-terminal domain
  misc_feature (1)..(824): NCBI GI: 46125805 Blast Desc: FG07280.1 [Gibberella zeae PH-1]
  misc_feature (1)..(824): NCBI GI: 256732775 Blast Desc: [Nectria haematococca mpVI 77-13-4]
  misc_feature (1)..(828): NCBI GI: 154317790 Blast Desc: BC1G_02878 [Botryotinia fuckeliana B05.10] gi|150843536|gb|EDN18729.1| BC1G_02878 [Botryotinia fuckeliana B05.10]
  misc_feature (1)..(828): NCBI GI: 156050235 Blast Desc: SS1G_07704 [Sclerotinia sclerotiorum 1980] gi|154692105|gb|EDN91843.1| SS1G_07704 [Sclerotinia sclerotiorum 1980]
  misc_feature (1)..(829): NCBI GI: 171686848 Blast Desc: protein product [Podospora anserina] gi|170943385|emb|CAP69038.1| protein product [Podospora anserina]
  misc_feature (1)..(824): NCBI GI: 85084541 Blast Desc: DNA repair helicase RAD25 [Neurospora crassa OR74A] gi|28918419|gb|EAA28093.1| DNA repair helicase RAD25 [Neurospora crassa OR74A]
  misc_feature (4)..(828): NCBI GI: 145608666 Blast Desc: MGG_06470 [Magnaporthe grisea 70-15] gi|145016110|gb|EDK00600.1| MGG_06470 [Magnaporthe grisea 70-15]
  misc_feature (1)..(826): NCBI GI: 238503147 Blast Desc: TFIIH complex helicase Ssl2, [Aspergillus flavus NRRL3357] gi|220691617|gb|EED47965.1| TFIIH complex helicase Ssl2, [Aspergillus flavus NRRL3357]
  misc_feature (1)..(826): NCBI GI: 169776451 Blast Desc: [Aspergillus oryzae RIB40] gi|83771427|dbj|BAE61559.1| protein product [Aspergillus oryzae]
  misc_feature (1)..(828): NCBI GI: 242792361 Blast Desc: TFIIH complex helicase Ssl2, [Talaromyces stipitatus ATCC 10500] gi|218718525|gb|EED17945.1| TFIIH complex helicase Ssl2, [Talaromyces stipitatus ATCC 10500]
  misc_feature: Useful for introducing or modulating the production of volatile compounds
MAPKRKASANVTGAAKSGRASAASTPGPSTPREIESSSDASDTDEEPPAPDEAFIQKNVDKFSLAAYQEKVGRGTIDSASRYFGENGKRDFSYLKLKPDSKSRPIWIDPQRGRIILENFNPLAEQAKDFLITVAEPLSRPTFLHEYALTPHSLYAAVSVGLEPRDIVNTLDRFSKTPLPESIVQFIESCASSYGKVKLVIKDTKYFVESNDPDVLQKLLKDPTIGPCRVKGTETVTNAPSMGGLVIPGTSNAAGVQQAKLQQGENQPAENPEKPQQENPFDALREDDDDDNQEAVHSFEIQDTSVEIVQKRCLDIQFPMLEEYDFRNDDKNANLEIDLRPATQIRSYQEKSLSKMFGNGRAKSGIIVLPCGAGKTLVGITAACTIKKGCIVLCTSTMSAHQWRQEFLKWSNIRPEDIAVFTADSKNKFPGNTGIIVTTYPMVTQSGKRAHDSQKMMDFLTGREWGLMLLDEVHVVPAQIFRKVSHSIKSHAKLGLTATLLREDDKIQDLNFLIGPKLYEANWMELSEQGHIAKVQCAEVWCQMSTEFYDEYLRTNDRGLKANLYVMNPRKIQACQFLIDYHERRGDKIIVFSDNVYALKHIATALEKAYICGDTGNVERMRVLDNFMHNPLVKTIFLSKIGDTSLDLPEATCLIQISSHYGSRRQEAQRLGRILRAKRRSDEGFNAFFYSLVSKDTAEMYYSTKRQAFLVDQGYSFKVITQLAGMEQMDGLTFNSKSERRELLAKVVLDTESKREANEEATDDLFYTAVKRKKRGVRRTAGTLGELSGGQDMAYIEQRKGTNKALKKKPQQNAFFKKIAREKQRLKDAR

SEQ ID NO: 6857 - DNA, 396 bp, Muscodor strobelii
  misc_feature: SGI cDNA ID NO. 562039
  misc_feature: Encodes the peptide sequence at SEQ ID NO 6858
atgtattactcaaccaaacgacaagctttccttgttgaccaaggttactctttcaaggtcataacgcagctagcaggcatggagcagatggacggattgacgtttaactcaaaatcagaacggcgagaactacttgccaaggtggtcctggatacggaatcaaaacgagaagctaatgaggaagccaccgatgacctgttctataccgctgtcaaaaggaagaagaggggtgtgcgccggacagccggcaccttgggcgagctaagtggtggtcaagacatggcatacattgagcaaaggaaaggtaccaataaggcgctcaagaagaaaccacagcaaaatgccttcttcaagaagattgctagagaaaagcaaaggctcaaagacgcacgttag

SEQ ID NO: 6858 - protein, 131 aa, Muscodor strobelii
  misc_feature: SGI Peptide ID NO. 562039
  misc_feature (1)..(126): NCBI GI: 46125805 Blast Desc: FG07280.1 [Gibberella zeae PH-1]
  misc_feature (1)..(126): NCBI GI: 256732775 Blast Desc: [Nectria haematococca mpVI 77-13-4]
  misc_feature (1)..(130): NCBI GI: 154317790 Blast Desc: BC1G_02878 [Botryotinia fuckeliana B05.10] gi|150843536|gb|EDN18729.1| BC1G_02878 [Botryotinia fuckeliana B05.10]
  misc_feature (1)..(130): NCBI GI: 156050235 Blast Desc: SS1G_07704 [Sclerotinia sclerotiorum 1980] gi|154692105|gb|EDN91843.1| SS1G_07704 [Sclerotinia sclerotiorum 1980]
  misc_feature (1)..(131): NCBI GI: 171686848 Blast Desc: protein product [Podospora anserina] gi|170943385|emb|CAP69038.1| protein product [Podospora anserina]
  misc_feature (1)..(130): NCBI GI: 212535202 Blast Desc: TFIIH complex helicase Ssl2, [Penicillium marneffei ATCC 18224] gi|210070156|gb|EEA24246.1| TFIIH complex helicase Ssl2, [Penicillium marneffei ATCC 18224]
  misc_feature (1)..(128): NCBI GI: 259480979 Blast Desc: TPA: component of the holoenzyme form of RNA polymerase transcription factor (Eurofung) [Aspergillus nidulans FGSC A4]
  misc_feature (1)..(128): NCBI GI: 67902428 Blast Desc: AN8201.2 [Aspergillus nidulans FGSC A4] gi|40739655|gb|EAA58845.1| AN8201.2 [Aspergillus nidulans FGSC A4]
  misc_feature (1)..(128): NCBI GI: 169776451 Blast Desc: [Aspergillus oryzae RIB40] gi|83771427|dbj|BAE61559.1| protein product [Aspergillus oryzae]
  misc_feature (1)..(128): NCBI GI: 238503147 Blast Desc: TFIIH complex helicase Ssl2, [Aspergillus flavus NRRL3357] gi|220691617|gb|EED47965.1| TFIIH complex helicase Ssl2, [Aspergillus flavus NRRL3357]
MYYSTKRQAFLVDQGYSFKVITQLAGMEQMDGLTFNSKSERRELLAKVVLDTESKREANEEATDDLFYTAVKRKKRGVRRTAGTLGELSGGQDMAYIEQRKGTNKALKKKPQQNAFFKKIAREKQRLKDAR

SEQ ID NO: 6859 - DNA, 2670 bp, Muscodor strobelii
  misc_feature: SGI cDNA ID NO. 562040
  misc_feature: Encodes the peptide sequence at SEQ ID NO 6860
atgccgaacgcacgagagcacctcgtgaaactcgctgaagcactccgcccatcttttctatcccggaatcctcattttaacttcattactctccattatttctggatcatcggatggaccatcattggctcaatcctcatgtttgcttcaggtcgtggcaatttagaatacattgatgctcttgcctttgctgctggtgccaacacgcaggctggactcaatactgtggatatcaatcttctcaacaccttccagcaagctgtgatgtactttctggctttattgtctaatcctattaccatccattcgagtgttgtgttcctgcgactgtactggtttgagaaacgatttcaaaatatcgttcaggacgcgcgatcgaagagggtcaccattagcaaatcacggtccaagtctcatccggccgccttagacgctgagaaaggtgtcaatggccgcaacatcgatgtagtgtatgatacggggaaaacagctcgaatgactaatgacggtatccttctggacgattatgctgcgaatggagagctcaaaccggaacctctcacgaatacgtctagctcagaagatagatcggatcacaggagtccggacgatctagcacagccacctgcgccgcagatcaaattcgccaacgaagttcgtaggagtgatgctgtagagcagcagggcggcggcgttgaggacgaggacgatgttccgttgccgagacgccgatcagctgcagagcatattgctatcttggagaagcaacgcaaggccgataaaagcgtgttaaggatacctggaccccgggatgctgatcgaggcgctttaccggaggagctagaggacgatgtcgaagatcccgagatacaaaggcgaagacgcgagtcaagtctggaattaccagaaggtcgacctttgtcctcgcttccgcgacgatcgtcgactttcgcagatcgacaacgtaatattacgattgcagaacccgagcatccgcgtagagaagaccatacaaaggtggaagaagcagtagagaatgctgcggcagctgcacatgttttcgattttttgaagccccggagaccaaggaaagatggagagaaactacatcaatcggaaacgatgacatcgaggctacgtgacaaggtcaaccccctccaacgtatcagatcagctctttcacaaagcaaagaggaggatcccacgccgtacctgagttggcaaccaactatgggtcgaaattcggcctttgtcgatctcacagaagagcaaagagaagagctgggcggtattgagtatcgttcgctgaaaacactggcactggttctcacaatttatttctggggctacagcattcttggaatgatcacactagtgccttggatcctgcacaacaatccattttatacctctattctagaagcagatggtatcaatgccacttggtgggggttttggacggccaattcggcttttatggatctgggtttcactcttactcccgacagtatgaactctttcaacacggccatatttcctttgctcatcatgtcgttcctaatccttcttggcaacaccggtttcccggtcgcgctccggttcatgatatggcttggctccctcatggctcctcgtggttccggcctttgggaagagctacgcttcttgctggaccatcctcggcgctgtttcactttgctgttcccatctaacgcgaactggtggctctttttcatactggtaactttgaacggcatcgatcttattcttttcatcatcctggatctgggctctggccctattgcggagcttcctctacatatacgattcttggatggatggttccaggctacctcgacgcggacggctggtttttcctgcgtcaacctagccgttgttcaccctgctgtgcaaacgtcttatttgatcatgatgtacatctccgtctttcccgtcgccatttccattcgcaaaacaaatgtgtacgaagaaaagtctctcggcgtttacggggacgcaaacgaattagatgacgacacgcccaatatatcttatgtcgggacacatttacgtcgccagctgtcctttgatttgtggtatgtgttcctgggatttttcatcctctccatcaccgaaggtggccgcatcatgtctggcgacttcaatcagtattccgtcctgttcgaaattgtcagcgcctatggcacggtcgggctcagtctgggatatcctggcgtgaacacttcgctcgttggacaattttcagtgttaggcaaacttgtcatcattgccatgatgattcgaggccggcaccgtggactgccttacggactggatcgggccgtgcttctgcccagcgaatcactcgtccgtaaagaggtcgaggacgctgagcacagactgcagcggcgacagtcagtaatgtcagtggcaccgcaagatcgtcggccgtcaaggggccgtagccggagcgtagaccgcactcacttaatcactgggctgttacaccccgggccagcgtggacgagaaccaagtcggagtcgaaaccagagggcaagtctgaggcgttccagagatttgtcacggatccccgagcccgcaattcggaggatgtgccagaaggctaccgacggaggagagcggacactcagcctgccctcaattcgtag

SEQ ID NO: 6860 - protein, 889 aa, Muscodor strobelii
  misc_feature: SGI Peptide ID NO. 562040
  misc_feature (427)..(785): Pfam Id: PF02386 Pfam Desc: Cation transport protein
  misc_feature (14)..(839): NCBI GI: 154317942 Blast Desc: BC1G_02954 [Botryotinia fuckeliana B05.10] gi|150843612|gb|EDN18805.1| BC1G_02954 [Botryotinia fuckeliana B05.10]
  misc_feature (1)..(887): NCBI GI: 256732776 Blast Desc: [Nectria haematococca mpVI 77-13-4]
  misc_feature (4)..(871): NCBI GI: 46125803 Blast Desc: FG07279.1 [Gibberella zeae PH-1]
  misc_feature (14)..(778): NCBI GI: 156050117 Blast Desc: SS1G_07645 [Sclerotinia sclerotiorum 1980] gi|154692046|gb|EDN91784.1| SS1G_07645 [Sclerotinia sclerotiorum 1980]
  misc_feature (1)..(840): NCBI GI: 116191995 Blast Desc: CHGG_05715 [Chaetomium globosum CBS 148.51] gi|88181628|gb|EAQ89096.1| CHGG_05715 [Chaetomium globosum CBS 148.51]
  misc_feature (28)..(887): NCBI GI: 171686834 Blast Desc: protein product [Podospora anserina] gi|170943378|emb|CAP69031.1| protein product [Podospora anserina]
  misc_feature (28)..(887): NCBI GI: 18699011 Blast Desc: potassium transporter [Podospora anserina]
  misc_feature (14)..(839): NCBI GI: 85084587 Blast Desc: NCU06449 [Neurospora crassa OR74A] gi|3724137|emb|CAA08813.1| trk-1 [Neurospora crassa] gi|28918430|gb|EAA28104.1| NCU06449 [Neurospora crassa OR74A]
  misc_feature (22)..(809): NCBI GI: 242791530 Blast Desc: potassium ion transporter (Trk1), [Talaromyces stipitatus ATCC 10500] gi|218718364|gb|EED17784.1| potassium ion transporter (Trk1), [Talaromyces stipitatus ATCC 10500]
  misc_feature (22)..(809): NCBI GI: 212534932 Blast Desc: potassium ion transporter (Trk1), [Penicillium marneffei ATCC 18224] gi|210070021|gb|EEA24111.1| potassium ion transporter (Trk1), [Penicillium marneffei ATCC 18224]
MPNAREHLVKLAEALRPSFLSRNPHFNFITLHYFWIIGWTIIGSILMFASGRGNLEYIDALAFAAGANTQAGLNTVDINLLNTFQQAVMYFLALLSNPITIHSSVVFLRLYWFEKRFQNIVQDARSKRVTISKSRSKSHPAALDAEKGVNGRNIDVVYDTGKTARMTNDGILLDDYAANGELKPEPLTNTSSSEDRSDHRSPDDLAQPPAPQIKFANEVRRSDAVEQQGGGVEDEDDVPLPRRRSAAEHIAILEKQRKADKSVLRIPGPRDADRGALPEELEDDVEDPEIQRRRRESSLELPEGRPLSSLPRRSSTFADRQRNITIAEPEHPRREDHTKVEEAVENAAAAAHVFDFLKPRRPRKDGEKLHQSETMTSRLRDKVNPLQRIRSALSQSKEEDPTPYLSWQPTMGRNSAFVDLTEEQREELGGIEYRSLKTLALVLTIYFWGYSILGMITLVPWILHNNPFYTSILEADGINATWWGFWTANSAFMDLGFTLTPDSMNSFNTAIFPLLIMSFLILLGNTGFPVALRFMIWLGSLMAPRGSGLWEELRFLLDHPRRCFTLLFPSNANWWLFFILVTLNGIDLILFIILDLGSGPIAELPLHIRFLDGWFQATSTRTAGFSCVNLAVVHPAVQTSYLIMMYISVFPVAISIRKTNVYEEKSLGVYGDANELDDDTPNISYVGTHLRRQLSFDLWYVFLGFFILSITEGGRIMSGDFNQYSVLFEIVSAYGTVGLSLGYPGVNTSLVGQFSVLGKLVIIAMMIRGRHRGLPYGLDRAVLLPSESLVRKEVEDAEHRLQRRQSVMSVAPQDRRPSRGRSRSVDRTHLITGLLHPGPAWTRTKSESKPEGKSEAFQRFVTDPRARNSEDVPEGYRRRRADTQPALNS

SEQ ID NO: 6861 - DNA, 4466 bp, Muscodor strobelii
  misc_feature: SGI EST ID NO. CUFF.17188.0
  misc_feature: Variant of the nucleotide sequence at SEQ ID NO 6859
ctcaatagtatttgtgtatcatatgctgtgcttgatcacactcttttctgttgcctcatggtatcaaactctagtcattgccttttcgggcgagtcaagtcagcgaccatgtggccaatcagaaattatcgacgcataacttcaagcagatctaagagtgaaaaactgcttagccgtgcaccctggacagggaacacgcagcgcacgtattcagaccgtatcgaatacaattgccatttatcaagtgtctccggagtacaaaaattggaggattcgtcatgaaaatttgctgcttatgtagctcaagggaccaaatatgtcataagaaaccccttttctatctcatgttttcatcgcgattctggtcacgactcaggtaaccttactacttttagctgtggcgcaggacctgatagttgcgggtattgcattctgtacgagaattctctactgccttctttacattctgatgcactctgcgtttgtgtcatttgctatgaagttgctgtggagcataactacaacatgaggagataaggtaacgtgagaacacgacgacatgcatatatacctgcataccttaaccacaactgcattcctctacgaatctccattccgactcttgaaagagtgagggggaaaaacactgacgctcggcccacatgcccattctctccgaaacgtcagtccgcatttggcttctaagagctgtcgaattcgcatttgattgacccatcattatcgcatcaatttgaagaactcgatgtttctgtgtccgacttgcacaagtcccggggtctcgacaaaataccccggacctgttgaacgccctgggccctcttggcactgcggcttgtgaaagcttggctgcgtccgataagtggagcccgtctaccctcgaataccacaacaacaaactgccagattcaccgcggccgcctcgcccgtcactcaactctcatcgattttccttttcccattcatcccttcttatccgcacacgcaattctcgtaattttccgcaattcgctgccgaactctccaccgcctactccaatggtgaccaagacttaggatatcaggctttctcgactttcgcaataacacaatgatgattttggctcgccttgctactaccgacctagacaatcaggtcttacgcgcttcggatctctgacatttgcttttcccgttccttgcttccactcatttgccattccggtctactgcgctcccttgaagtcttcaggctttacttatcaccatgccgaacgcacgagagcacctcgtgaaactcgctgaagcactccgcccatcttttctatcccggaatcctcattttaacttcattactctccattgtaagatagattgatcagaaaggattgtggcgagtctctctaacgctcgtgccagatttctggatcatcggatggaccatcattggctcaatcctcatgtttgcttcaggtcgtggcaatttagaatacattgatgctcttgcctttgctgctggtgccaacacgcaggctggactcaatactgtggatatcaatcttctcaacaccttccagcaagctgtgatgtactttctggctttattgtctaatcctattaccatccattcgagtgttgtgttcctgcgactgtactggtttgagaaacgatttcaaaatatcgttcaggacgcgcgatcgaagagggtcaccattagcaaatcacggtccaagtctcatccggccgccttagacgctgagaaaggtgtcaatggccgcaacatcgatgtagtgtatgatacggggaaaacagctcgaatgactaatgacggtatccttctggacgattatgctgcgaatggagagctcaaaccggaacctctcacgaatacgtctagctcagaagatagatcggatcacaggagtccggacgatctagcacagccacctgcgccgcagatcaaattcgccaacgaagttcgtaggagtgatgctgtagagcagcagggcggcggcgttgaggacgaggacgatgttccgttgccgagacgccgatcagctgcagagcatattgctatcttggagaagcaacgcaaggccgataaaagcgtgttaaggatacctggaccccgggatgctgatcgaggcgctttaccggaggagctagaggacgatgtcgaagatcccgagatacaaaggcgaagacgcgagtcaagtctggaattaccagaaggtcgacctttgtcctcgcttccgcgacgatcgtcgactttcgcagatcgacaacgtaatattacgattgcagaacccgagcatccgcgtagagaagaccatacaaaggtggaagaagcagtagagaatgctgcggcagctgcacatgttttcgattttttgaagccccggagaccaaggaaagatggagagaaactacatcaatcggaaacgatgacatcgaggctacgtgacaaggtcaaccccctccaacgtatcagatcagctctttcacaaagcaaagaggaggatcccacgccgtacctgagttggcaaccaactatgggtcgaaattcggcctttgtcgatctcacagaagagcaaagagaagagctgggcggtattgagtatcgttcgctgaaaacactggcactggttctcacaatttatttctggggctacagcattcttggaatgatcacactagtgccttggatcctgcacaacaatccattttatacctctattctagaagcagatggtatcaatgccacttggtgggggttttggacggccaattcggcttttatggatctgggtttcactcttactcccgacagtatgaactctttcaacacggccatatttcctttgctcatcatgtcgttcctaatccttcttggcaacaccggtttcccggtcgcgctccggttcatgatatggcttggctccctcatggctcctcgtggttccggcctttgggaagagctacgcttcttgctggaccatcctcggcgctgtttcactttgctgttcccatctaacgcgaactggtggctctttttcatactggtaactttgaacggcatcgatcttattcttttcatcatcctggatctgggctctggccctattgcggagcttcctctacatatacgattcttggatggatggttccaggctacctcgacgcggacggctggtttttcctgcgtcaacctagccgttgttcaccctgctgtgcaaacgtcttatttgatcatgatgtacatctccgtctttcccgtcgccatttccattcgcaaaacaaatgtgtacgaagaaaagtctctcggcgtttacggggacgcaaacgaattagatgacgacacgcccaatatatcttatgtcgggacacatttacgtcgccagctgtcctttgatttgtggtatgtgttcctgggatttttcatcctctccatcaccgaaggtggccgcatcatgtctggcgacttcaatcagtattccgtcctgttcgaaattgtcagcgcctatggcacggtcgggctcagtctgggatatcctggcgtgaacacttcgctcgttggacaattttcagtgttaggcaaacttgtcatcattgccatgatgattcgaggccggcaccgtggactgccttacggactggatcgggccgtgcttctgcccagcgaatcactcgtccgtaaagaggtcgaggacgctgagcacagactgcagcggcgacagtcagtaatgtcagtggcaccgcaagatcgtcggccgtcaaggggccgtagccggagcgtagaccgcactcacttaatcactgggctgttacaccccgggccagcgtggacgagaaccaagtcggagtcgaaaccagagggcaagtctgaggcgttccagagatttgtcacggatccccgagcccgcaattcggaggatgtgccagaaggctaccgacggaggagagcggacactcagcctgccctcaattcgtagtggagacgaggcagtatgggatggacgcgcgagtcaccccaatcatcgatgctgcaaaaggatcggacgggaccggaactagtgagaaatgcaaagaccgagcgcagaacgtcgcctgcaccaccaccaccagcctttaacactccacagtgggagcggtccagtcgccgcatcaatagacctcgcaaggtgcattggtatctgggaagtactggatagactgctgcagaaggtgaaatgggtgttgggcgagcaccccaggtcaaagatggaggctcacgctttgcaaatataagaaaaggcgttaagggggctacattcatattagcaggcattgctctaggagcggtataagtgtgccagtcacgaggaatagcagcatagagaaaagacctgcatgcattgtttcccggcctactaaggggtatatatatagcgaatgcgagttttagtgattacgtattgatgcgatgcatt

SEQ ID NO: 6862 - DNA, 786 bp, Muscodor strobelii
  misc_feature: SGI cDNA ID NO. 562041
  misc_feature: Reduced expression when VOC is produced
  misc_feature: Encodes the peptide sequence at SEQ ID NO 6863
atgctcacacaacctgcctggcggccactcgccgcctggaagggcgctttacgcactgctcgacaccagcgtcccgtgcccttagtacgctcaatggccaccgagatgaccccgacgacgacggcagcctcttcgtccgcactaccccccatgcgaccgcgcagatcgagaaagccagagccaaaaaggcctctattccaacacgaaatattcgaaaacaaagaggccgtaatccacgacctaaagtccacaaaccccctctaccgcacacgcagcaaattcgccgtctacgcccagaaccggtccttccgctttcccaagcgacaccccgaagccctcgtagactaccacgcgcaacaaatcaagcgtctagacccaaagtctctccggacacacctcttctccaaatccaacccagactccgtgaaacccggcgacgtactccaagtcaccaccaaacggggcgagcccttctcgggcgtcgtcttatctatccggcgcgcaggcgtcgacacggctattctgctgcgcaaccacctgatgcgcatgggcgtcgagatgtggtacaagatctatagccccaacatcctgggcatggagatcatctggcgccgacctaaacgcgcgcgtcgcgccagactgacgtatatgcgccagccgaagcacgacatggggtctgtcgcccatcttgttgatgcgtggcgcaagacgaggaatgtttttagttcgaaggggggcaagcaggggaatgctgctgggcagaagaagaagggcggaaagaggtag

SEQ ID NO: 6863 - protein, 261 aa, Muscodor strobelii
  misc_feature: SGI Peptide ID NO. 562041
  misc_feature (118)..(221): Pfam Id: PF01245 Pfam Desc: Ribosomal protein L19
  misc_feature (8)..(260): NCBI GI: 261354297 Blast Desc: conserved [Verticillium albo-atrum VaMs.102]
  misc_feature (8)..(257): NCBI GI: 256732771 Blast Desc: [Nectria haematococca mpVI 77-13-4]
  misc_feature (8)..(244): NCBI GI: 39977131 Blast Desc: MGG_06468 [Magnaporthe grisea 70-15] gi|145016112|gb|EDK00602.1| MGG_06468 [Magnaporthe grisea 70-15]
  misc_feature (92)..(255): NCBI GI: 46125815 Blast Desc: FG07285.1 [Gibberella zeae PH-1]
  misc_feature (5)..(247): NCBI GI: 154317828 Blast Desc: BC1G_02897 [Botryotinia fuckeliana B05.10] gi|150843555|gb|EDN18748.1| BC1G_02897 [Botryotinia fuckeliana B05.10]
  misc_feature (6)..(243): NCBI GI: 116191993 Blast Desc: CHGG_05714 [Chaetomium globosum CBS 148.51] gi|88181627|gb|EAQ89095.1| CHGG_05714 [Chaetomium globosum CBS 148.51]
  misc_feature (119)..(243): NCBI GI: 85084591 Blast Desc: NCU06450 [Neurospora crassa OR74A] gi|28918431|gb|EAA28105.1| [Neurospora crassa OR74A]
  misc_feature (118)..(248): NCBI GI: 238839314 Blast Desc: conserved [Microsporum canis CBS 113480]
  misc_feature (91)..(242): NCBI GI: 169780812 Blast Desc: [Aspergillus oryzae RIB40] gi|238504990|ref|XP_002383724.1| mitochondrial ribosomal protein, [Aspergillus flavus NRRL3357] gi|83773610|dbj|BAE63737.1| protein
  misc_feature (111)..(239): NCBI GI: 261202378 Blast Desc: mitochondrial ribosomal protein [Ajellomyces dermatitidis SLH14081] gi|239590500|gb|EEQ73081.1| mitochondrial ribosomal protein [Ajellomyces dermatitidis SLH14081] ribosomal
  misc_feature: Useful for introducing or modulating the production of volatile compounds
MLTQPAWRPLAAWKGALRTARHQRPVPLVRSMATEMTPTTTAASSSALPPMRPRRSRKPEPKRPLFQHEIFENKEAVIHDLKSTNPLYRTRSKFAVYAQNRSFRFPKRHPEALVDYHAQQIKRLDPKSLRTHLFSKSNPDSVKPGDVLQVTTKRGEPFSGVVLSIRRAGVDTAILLRNHLMRMGVEMWYKIYSPNILGMEIIWRRPKRARRARLTYMRQPKHDMGSVAHLVDAWRKTRNVFSSKGGKQGNAAGQKKKGGKR

SEQ ID NO: 6864 - DNA, 1210 bp, Muscodor strobelii
  misc_feature: SGI EST ID NO. CUFF.17143.0
  misc_feature: Variant of the nucleotide sequence at SEQ ID NO 6862
caaccacccaaacttttcgacgccaggtcgagcatcaaaaagtcggattgatcacccatcatcacatccacccacgacagcaccggccacgatgctcacacaacctgcctggcggccactcgccgcctggaagggcgctttacgcactgctcgacaccagcgtcccgtgcccttagtacgctcaatggccaccgagatgaccccgacgacgacggcagcctcttcgtccgcactaccccccatgcgaccgcgcagatcgagaaagccagagccaaaaaggcctctattccaacacgaaatattcgaaaacaaagaggccgtaatccacgacctaaagtccacaaaccccctctaccgcacacgcagcaaattcgccgtctacgcccagaaccggtccttccgctttcccaagcgacaccccgaagccctcgtagactaccacgcgcaacaaatcaagcgtctagacccaaagtctctccggacacacctcttctccaaatccaacccagactccgtgaaacccggcgacgtactccaagtcaccaccaaacggggcgagcccttctcgggcgtcgtcttatctatccggcgcgcaggcgtcgacacggctattctgctgcgcaaccacctgatgcgcatgggcgtcgagatgtggtacaagatctatagccccaacatcctgggcatggagatcatctggcgccgacctaaacgcgcgcgtcgcgccagactgacgtatatgcgccagccgaagcacgacatggggtctgtcgcccatcttgttgatgcgtggcgcaagacgaggaatgtttttagttcgaaggggggcaagcaggggaatgctgctgggcagaagaagaagggcggaaagaggtagatggctgacggtagatggtctatgatataagagctgtgaagctgtcttatgatgcctttgagagtgtaaatactcttcgggacgaggagagagatgagattgagaattgatttacctgcctattcagcggctgggagtatgtgtgtggcgttgaagaaaggccgccttccgcatatactgggcattatatcgaaactgtagaatctgtacacaatatcatgtagacaatgtactaccaccaaattttatggaactggaaaaatactcacttttgctactgagtgaattttcaattcacgatgatggttgcaagtatatagagtacggattatc

SEQ ID NO: 6865 - DNA, 1143 bp, Muscodor strobelii
  misc_feature: SGI cDNA ID NO. 562042
  misc_feature: Reduced expression when VOC is produced
  misc_feature: Encodes the peptide sequence at SEQ ID NO 6866
atgtcgtcgaggtccgtcctcgccgccctctctgggaccagtgggctgcaggctgccaaccagctacgccttttcacatctacagtccagagatccgctcccataatacacttcactcgctgctctagccccgacatcgaccgcaccctcgaccgcatccgcaaaaccatcatcctcccttcacatctgcctgagtcacagcagaagaagctgagatccccaaaatgggagaagaagctgcaggctgaccccatcaccatcgagatcgacggcgatgtcgagaagttccgccacatgaacccaaccaaggacatccccaacagccgcaatattctgctatctgccatcaactccttcgagacccaggacgacttcgccaacttccagcccctcatgaccggtctcctccacgccaggcccttcaacgacgccttcttctgtctgctcatccgcgtcatgggcgacaagggccagatctaccacgtcatcgagctggcccgcggcgtcaggcgctccggcttcaagctcgacacccccgagaaggcctacaaggtccttgagtactgcagcctcaaggccaacgacgccaactacgccgaggccgacacccgccaggccctgctctgggccgagatggttctcgagatgctgcacgacaacgcccaccagcccgtccgcgaagagaaggggcagctgctcaaaggcgagctgcccctgaagcgcgaccccctcgtcatggccacccctctgcacctcgccgccgagattgccacgaggtacggcaatgacgacgacatcctcgacaagatccgcaagtacgctaccgacatcgtcaggctttggcccgacggcaagaaggccaccgagatacagcccgccgagatctacaccatgagaagtcccaagtcagtcgccaccaagacacacaatttcctctcagcccacagtgaattcattgccgtagctgcccccctgcagcgtggactcgagcgagctgcaaagctcgtcgagccagaactcgccagtaagctgcaggctcgcgccgacatcttggctgccgagatccaggagagacggcggctgtccaagggcaagagaggggagaacatgttgaaaaagataaacccagaggcaacaaggtga

SEQ ID NO: 6866 - protein, 380 aa, Muscodor strobelii
  misc_feature: SGI Peptide ID NO. 562042
  misc_feature (10)..(357): NCBI GI: 171686818 Blast Desc: protein product [Podospora anserina] gi|170943370|emb|CAP69023.1| protein product [Podospora anserina]
  misc_feature (21)..(358): NCBI GI: 261354298 Blast Desc: conserved [Verticillium albo-atrum VaMs.102]
  misc_feature (25)..(357): NCBI GI: 145608670 Blast Desc: MGG_06467 [Magnaporthe grisea 70-15] gi|145016113|gb|EDK00603.1| MGG_06467 [Magnaporthe grisea 70-15]
  misc_feature (1)..(356): NCBI GI: 85084595 Blast Desc: NCU06451 [Neurospora crassa OR74A] gi|28918432|gb|EAA28106.1| [Neurospora crassa OR74A]
  misc_feature (38)..(278): NCBI GI: 154317830 Blast Desc: BC1G_02898 [Botryotinia fuckeliana B05.10] gi|150843556|gb|EDN18749.1| BC1G_02898 [Botryotinia fuckeliana B05.10]
  misc_feature (23)..(223): NCBI GI: 256733221 Blast Desc: NECHADRAFT_100177 [Nectria haematococca mpVI 77-13-4]
  misc_feature (11)..(284): NCBI GI: 258571041 Blast Desc: [Uncinocarpus reesii 1704] gi|237904594|gb|EEP78995.1| [Uncinocarpus reesii 1704]
  misc_feature (19)..(246): NCBI GI: 46125817 Blast Desc: FG07286.1 [Gibberella zeae PH-1]
  misc_feature (38)..(284): NCBI GI: 119183305 Blast Desc: CIMG_06604 [Coccidioides immitis RS]
  misc_feature (2)..(136): NCBI GI: 116191991 Blast Desc: CHGG_05713 [Chaetomium globosum CBS 148.51] gi|88181626|gb|EAQ89094.1| CHGG_05713 [Chaetomium globosum CBS 148.51]
  misc_feature: Useful for introducing or modulating the production of volatile compounds
MSSRSVLAALSGTSGLQAANQLRLFTSTVQRSAPIIHFTRCSSPDIDRTLDRIRKTIILPSHLPESQQKKLRSPKWEKKLQADPITIEIDGDVEKFRHMNPTKDIPNSRNILLSAINSFETQDDFANFQPLMTGLLHARPFNDAFFCLLIRVMGDKGQIYHVIELARGVRRSGFKLDTPEKAYKVLEYCSLKANDANYAEADTRQALLWAEMVLEMLHDNAHQPVREEKGQLLKGELPLKRDPLVMATPLHLAAEIATRYGNDDDILDKIRKYATDIVRLWPDGKKATEIQPAEIYTMRSPKSVATKTHNFLSAHSEFIAVAAPLQRGLERAAKLVEPELASKLQARADILAAEIQERRRLSKGKRGENMLKKINPEATR

SEQ ID NO: 6867 - DNA, 2538 bp, Muscodor strobelii
  misc_feature: SGI EST ID NO. CUFF.17280.0
  misc_feature: Variant of the nucleotide sequence at SEQ ID NO 6865
gaaattttatggaagcgacgctacgtgatgccatatcgaagttgccaatatcaatgcgatttcgacatacctacctaaaggtacctcacatacacaacgacacctaccattgcaccgattgaaacgacatactgagtggcatatctgatccatcatgtcgtcgaggtccgtcctcgccgccctctctgggaccagtgggctgcaggctgccaaccagctacgccttttcacatctacagtccagagatccgctcccataatacacttcactcgctgctctagccccgacatcgaccgcaccctcgaccgcatccgcaaaaccatcatcctcccttcacatctgcctgagtcacagcagaagaagctgagatccccaaaatgggagaagaagctgcaggctgaccccatcaccatcgagatcgacggcgatgtcgagaagttccgccacatgaacccaaccaaggacatccccaacagccgcaatattctgctatctgccatcaactccttcgagacccaggacgacttcgccaacttccagcccctcatgaccggtctcctccacgccaggcccttcaacgacgccttcttctgtctgctcatccgcgtcatgggcgacaagggccagatctaccacgtcatcgagctggcccgcggcgtcaggcgctccggcttcaagctcgacacccccgagaaggcctacaaggtccttgagtactgcagcctcaaggccaacgacgccaactacgccgaggccgacacccgccaggccctgctctgggccgagatggttctcgagatgctgcacgacaacgcccaccagcccgtccgcgaagagaaggggcagctgctcaaaggcgagctgcccctgaagcgcgaccccctcgtcatggccacccctctgcacctcgccgccgagattgccacgaggtacggcaatgacgacgacatcctcgacaagatccgcaagtacgctaccgacatcgtcaggctttggcccgacggcaagaaggccaccgagatacagcccgccgagatctacaccatgagaagtcccaagtcagtcgccaccaagacacacaatttcctctcagcccacagtgaattcattgccgtagctgcccccctgcagcgtggactcgagcgagctgcaaagctcgtcgagccagaactcgccagtaagctgcaggctcgcgccgacatcttggctgccgagatccaggagagacggcggctgtccaagggcaagagaggggagaacatgttgaaaaagataaacccagaggcaacaaggtgatagataggagatgagatgaacgaagaagtgtaaatgtatgtaagaaaaggaaaacacaggaacattattgctgtaataataccatcgcatcgactcgaagatgttgtacaaataattgcatataaaggccaaactatctatatatacaatgctcatctatctggcttgtcatcttatctgagatctggcaccacaatctcatcatcattcattctccagccttcctcaaggcagtacaatatatttctccaaatgcttaggaatagcaccaagcaactccttactctcaagccacttcctcgaaaacaaccgatccgcataccgatacgcgccatcgcacagcatagtgacgactgtgtgacctggtcccatgagctccgcgacctccttagcagctacgacattcagcgcagagctggcaccgaggtataagccttcttcgtctaaacaccggtataccatctcgatacttttctcatcggagatatgcacactgccgtctagactctcgacgtcaggcgctaaattgtcggtgattcggccttggccgatgccttccgtgatactgccgccgctgcgctctgccagcttcccgccggattggatgtaggagtgaaggactgatcccggcggatctgctaggtagcttttacttttcccccgctgacgtcctttagataccgtgttacgccggcgagtgtgccggctgtacctgtagcgcacgtaaacgcatcgattttcccctgtgtctgtgtccatatttctggcccggtggtctcgatatgcgcgcgtcgattcgcggtattatcgaactgattcgtccacactgcatttcccgtctcctcccgcagtctttcagcgtgtcgcgcagcctggtggttgtaattctccggattatcaaacgcgacagcgggaacggggtagacttctgccccgagtaagcgcaacaggtcgattttcccctgggattgtgtgttgggcatgtagattattagtttgtaacctcgtgatctgcagacgtgggcgagccctatcccggtgtttcctgctgtgccttcgattactacgccgcctggtttgagaagacctcgttcctcggcgtcgaggactacgtagagggctgcccggtctttgactgagcctccgggattcatgaattcggctttgcccaggacggtgcagccggtttcgcgagagaggtggtgcagttttattagcggggtgttgccgattgctgtgtg

SEQ ID NO: 6868 - DNA, 1047 bp, Muscodor strobelii
  misc_feature: SGI cDNA ID NO. 562043
  misc_feature: Encodes the peptide sequence at SEQ ID NO 6869
atgacgacgatgttccgtcacagcgtccgccgtttcgcaacctcggcagcgcgcagaaccgttgcgcccgctgccgctcatgagccgagtccttacacactcgctgtctctaaggcgcagggtgttgctcagggtctcactggtgcaatcggcaacaccccgctaataaaactgcaccacctctctcgcgaaaccggctgcaccgtcctgggcaaagccgaattcatgaatcccggaggctcagtcaaagaccgggcagccctctacgtagtcctcgacgccgaggaacgaggtcttctcaaaccaggcggcgtagtaatcgaaggcacagcaggaaacaccgggatagggctcgcccacgtctgcagatcacgaggttacaaactaataatctacatgcccaacacacaatcccaggggaaaatcgacctgttgcgcttactcggggcagaagtctaccccgttcccgctgtcgcgtttgataatccggagaattacaaccaccaggctgcgcgacacgctgaaagactgcgggaggagacgggaaatgcagtgtggacgaatcagttcgataataccgcgaatcgacgcgcgcatatcgagaccaccgggccagaaatatggacacagacacaggggaaaatcgatgcgtttacgtgcgctacaggtacagccggcacactcgccggcgtaacacgcggcggcagtatcacggaaggcatcggccaaggccgaatcaccgacaatttagcgcctgacgtcgagagtctagacggcagtgtgcatatctccgatgagaaaagtatcgagatggtataccggtgtttagacgaagaaggcttatacctcggtgccagctctgcgctgaatgtcgtagctgctaaggaggtcgcggagctcatgggaccaggtcacacagtcgtcactatgctgtgcgatggcgcgtatcggtatgcggatcggttgttttcgaggaagtggcttgagagtaaggagttgcttggtgctattcctaagcatttggagaaatatattgtactgccttga

SEQ ID NO: 6869 - protein, 348 aa, Muscodor strobelii
  misc_feature: SGI Peptide ID NO. 562043
  misc_feature (46)..(313): Pfam Id: PF00291 Pfam Desc: Pyridoxal-phosphate dependent enzyme
  misc_feature (46)..(234): Pfam Id: PF00291 Pfam Desc: Pyridoxal-phosphate dependent enzyme
  misc_feature (236)..(313): Pfam Id: PF00291 Pfam Desc: Pyridoxal-phosphate dependent enzyme
  misc_feature (4)..(348): NCBI GI: 39977127 Blast Desc: cysteine synthase [Magnaporthe grisea 70-15] gi|145016114|gb|EDK00604.1| cysteine synthase [Magnaporthe grisea 70-15]
  misc_feature (4)..(348): NCBI GI: 256732770 Blast Desc: [Nectria haematococca mpVI 77-13-4]
  misc_feature (4)..(348): NCBI GI: 116191989 Blast Desc: cysteine synthase [Chaetomium globosum CBS 148.51] gi|88181625|gb|EAQ89093.1| cysteine synthase [Chaetomium globosum CBS 148.51]
  misc_feature (4)..(348): NCBI GI: 156050215 Blast Desc: cysteine synthase [Sclerotinia sclerotiorum 1980] gi|154692095|gb|EDN91833.1| cysteine synthase [Sclerotinia sclerotiorum 1980]
  misc_feature (4)..(348): NCBI GI: 261354299 Blast Desc: cysteine synthase [Verticillium albo-atrum VaMs.102]
  misc_feature (4)..(348): NCBI GI: 154317832 Blast Desc: BC1G_02899 [Botryotinia fuckeliana B05.10] gi|150843557|gb|EDN18750.1| BC1G_02899 [Botryotinia fuckeliana B05.10]
  misc_feature (4)..(347): NCBI GI: 261202828 Blast Desc: cysteine synthase [Ajellomyces dermatitidis SLH14081] gi|239590725|gb|EEQ73306.1| cysteine synthase [Ajellomyces dermatitidis SLH14081] gi|239612441|gb|EEQ89428.1| cysteine ER-3]
  misc_feature (4)..(348): NCBI GI: 238839564 Blast Desc: cysteine synthase [Microsporum canis CBS 113480]
  misc_feature (4)..(348): NCBI GI: 226291200 Blast Desc: cysteine synthase [Paracoccidioides brasiliensis Pb18]
  misc_feature (29)..(348): NCBI GI: 46125819 Blast Desc: CYSK_EMENI Cysteine synthase (O-acetylserine sulfhydrylase) (O-acetylserine (Thiol)-lyase) (CSase) [Gibberella zeae PH-1]
  misc_feature (4)..(348): SWISSPROT Homolog: EC 2.5.1.47 Cysteine synthase
MTTMFRHSVRRFATSAARRTVAPAAAHEPSPYTLAVSKAQGVAQGLTGAIGNTPLIKLHHLSRETGCTVLGKAEFMNPGGSVKDRAALYVVLDAEERGLLKPGGVVIEGTAGNTGIGLAHVCRSRGYKLIIYMPNTQSQGKIDLLRLLGAEVYPVPAVAFDNPENYNHQAARHAERLREETGNAVWTNQFDNTANRRAHIETTGPEIWTQTQGKIDAFTCATGTAGTLAGVTRGGSITEGIGQGRITDNLAPDVESLDGSVHISDEKSIEMVYRCLDEEGLYLGASSALNVVAAKEVAELMGPGHTVVTMLCDGAYRYADRLFSRKWLESKELLGAIPKHLEKYIVLP

SEQ ID NO: 6870 - DNA, 2845 bp, Muscodor strobelii
  misc_feature: SGI EST ID NO. CUFF.17281.1
  misc_feature: Variant of the nucleotide sequence at SEQ ID NO 6868
gccgttacaaacagacgtcgtcatacttcagttctagtaaactcatccttaaagacattcgcttttgcttgagacttgagccagggctagtttgaagatgacgacgatgttccgtcacagcgtccgccgtttcgcaacctcggcagcgcgcagaaccgttgcgcccgctgccgctcatgagccgagtccttacacactcgctgtctctaaggcgcagggtgttgctcagggtctcactggtgcaatcggcaacaccccgctaataaaactgcaccacctctctcgcgaaaccggctgcaccgtcctgggcaaagccgaattcatgaatcccggaggctcagtcaaagaccgggcagccctctacgtagtcctcgacgccgaggaacgaggtcttctcaaaccaggcggcgtagtaatcgaaggcacagcaggaaacaccgggatagggctcgcccacgtctgcagatcacgaggttacaaactaataatctacatgcccaacacacaatcccaggggaaaatcgacctgttgcgcttactcggggcagaagtctaccccgttcccgctgtcgcgtttgataatccggagaattacaaccaccaggctgcgcgacacgctgaaagactgcgggaggagacgggaaatgcagtgtggacgaatcagttcgataataccgcgaatcgacgcgcgcatatcgagaccaccgggccagaaatatggacacagacacaggggaaaatcgatgcgtttacgtgcgctacaggtacagccggcacactcgccggcgtaacacggtatctaaaggacgtcagcgggggaaaagtaaaagctacctagcagatccgccgggatcagtccttcactcctacatccaatccggcgggaagctggcagagcgcagcggcggcagtatcacggaaggcatcggccaaggccgaatcaccgacaatttagcgcctgacgtcgagagtctagacggcagtgtgcatatctccgatgagaaaagtatcgagatggtataccggtgtttagacgaagaaggcttatacctcggtgccagctctgcgctgaatgtcgtagctgctaaggaggtcgcggagctcatgggaccaggtcacacagtcgtcactatgctgtgcgatggcgcgtatcggtatgcggatcggttgttttcgaggaagtggcttgagagtaaggagttgcttggtgctattcctaagcatttggagaaatatattgtactgccttgaggaaggctggagaatgaatgatgatgagattgtggtgccagatctcagataagatgacaagccagatagatgagcattgtatatatagatagtttggcctttatatgcaattatttgtacaacatcttcgagtcgatgcgatggtattattacagcaataatgttcctgtgttttccttttcttacatacatttacacttcttcgttcatctcatctcctatctatcaccttgttgcctctgggtttatctttttcaacatgttctcccctctcttgcccttggacagccgccgtctctcctggatctcggcagccaagatgtcggcgcgagcctgcagcttactggcgagttctggctcgacgagctttgcagctcgctcgagtccacgctgcaggggggcagctacggcaatgaattcactgtgggctgagaggaaattgtgtgtcttggtggcgactgacttgggacttctcatggtgtagatctcggcgggctgtatctcggtggccttcttgccgtcgggccaaagcctgacgatgtcggtagcgtacttgcggatcttgtcgaggatgtcgtcgtcattgccgtacctcgtggcaatctcggcggcgaggtgcagaggggtggccatgacgagggggtcgcgcttcaggggcagctcgcctttgagcagctgccccttctcttcgcggacgggctggtgggcgttgtcgtgcagcatctcgagaaccatctcggcccagagcagggcctggcgggtgtcggcctcggcgtagttggcgtcgttggccttgaggctgcagtactcaaggaccttgtaggccttctcgggggtgtcgagcttgaagccggagcgcctgacgccgcgggccagctcgatgacgtggtagatctggcccttgtcgcccatgacgcggatgagcagacagaagaaggcgtcgttgaagggcctggcgtggaggagaccggtcatgaggggctggaagttggcgaagtcgtcctgggtctcgaaggagttgatggcagatagcagaatattgcggctgttggggatgtccttggttgggttcatgtggcggaacttctcgacatcgccgtcgatctcgatggtgatggggtcagcctgcagcttcttctcccattttggggatctcagcttcttctgctgtgactcaggcagatgtgaagggaggatgatggttttgcggatgcggtcgagggtgcggtcgatgtcggggctagagcagcgagtgaagtgtattatgggagctacgcattcgttaaaatcgtcgccgtcacggatttgcataggcttatgtaggcataaattggcatacataccggatctctggactgtagatgtgaaaaggcgtagctggttggcagcctgcagcccactggtcccagagagggcggcgaggacggacctcgacgacatgatggatcagatatgccactcagtatgtcgtttcaatcggtgcaatggtaggtgtcgttgtgtatgtgaggtacctttaggtaggtatgtcgaaatcgcattgatattggcaacttcgatatggcatcacgtagcgtcgcttccataaaatttc

SEQ ID NO: 6871 - DNA, 378 bp, Muscodor strobelii
  misc_feature: SGI cDNA ID NO. 562044
  misc_feature: Reduced expression when VOC is produced
  misc_feature: Encodes the peptide sequence at SEQ ID NO 6872
atgtattttgatctcatgccactttttgcaattgcgaacttcgtcaccataggatcggcaacttgttacagcacgggccaagccggagactatggtaaaggcctcgatgccgtcaacggcttgacgatcgcttgcaccaccctccagggcacttatatctccggcgagagtcgacagacttgcgtgcaagactccgccggtaccaaatggaactttgatttggcgaacatatctcatggatctcgcacaattggagttcaagaatgcatctctggtatgtcaaaagaggcccatggctgctggcgcggtggccatcgcgcgtactggaactgggcatacaaggctgatcccaatactggacactgcatgacgttctga

SEQ ID NO: 6872 - protein, 125 aa, Muscodor strobelii
  misc_feature: SGI Peptide ID NO. 562044
  misc_feature (8)..(122): NCBI GI: 226282594 Blast Desc: PAAG_01081 [Paracoccidioides brasiliensis Pb01]
  misc_feature (8)..(122): NCBI GI: 225681061 Blast Desc: [Paracoccidioides brasiliensis Pb03]
  misc_feature (8)..(122): NCBI GI: 226292240 Blast Desc: PADG_03744 [Paracoccidioides brasiliensis Pb18]
  misc_feature (8)..(122): NCBI GI: 169618764 Blast Desc: SNOG_12574 [Phaeosphaeria nodorum SN15] gi|111058752|gb|EAT79872.1| SNOG_12574 [Phaeosphaeria nodorum SN15]
  misc_feature (8)..(122): NCBI GI: 171693607 Blast Desc: protein product [Podospora anserina] gi|170946752|emb|CAP73556.1| protein product [Podospora anserina]
  misc_feature: Useful for introducing or modulating the production of volatile compounds
MYFDLMPLFAIANFVTIGSATCYSTGQAGDYGKGLDAVNGLTIACTTLQGTYISGESRQTCVQDSAGTKWNFDLANISHGSRTIGVQECISGMSKEAHGCWRGGHRAYWNWAYKADPNTGHCMTF

SEQ ID NO: 6873 - DNA, 701 bp, Muscodor strobelii
  misc_feature: SGI EST ID NO. CUFF.17112.0
  misc_feature: Variant of the nucleotide sequence at SEQ ID NO 6871
ttccgttcgaataaatctccttataaccacgttgagtcttattatttaccacgctatcattagattactattgcattgactctccacaagatgtattttgatctcatgccactttttgcaattgcgaacttcgtcaccataggatcggcaacttgttacagcacgggccaagccggagactatggtaaaggcctcgatgccgtcaacggcttgacgatcgcttgcaccaccctccagggcacttatatctccggcgagagtcgacagacttgcgtgcaagactccgccggtaccaaatggaactttgatttggcgaacatatctcatggatctcgcacaattggagttcaagaatgcatctctggtatgtcaaaagaggcccatggctgctggcgcggtggccatcgcgcgtactggaactgggcatacaaggctgatcccaatactggacactgcatgacgttctgagcatatggtcatggcgagtaactacctgcccagttgttctttcggtaaaccatccttgggcttgatggatagattccggcagtcgatcattcgtgggcttgtcttgttcacacgttcgtgttcaaatgaggagcgaccatcgaaaatgcgagtcctgtttgatttagttgcaactttgatattcctcaatagtataacggagagtagaagtgccgattgtatttatattttcc

SEQ ID NO: 6874 - DNA, 477 bp, Muscodor strobelii
  misc_feature: SGI cDNA ID NO. 562045
  misc_feature: Encodes the peptide sequence at SEQ ID NO 6875
atgccaccggagattcgcgtagatgaccatcctgtcacaatgcctacggtgcagagtcacgagattggattcactacctcggtgactagaggtgttgaaacccaccctacactcgaagagcttaaagccaacttgactctagcgatagagtggatgcacggccttctcgaagtatttgatgaagcatatgacgatgaagacgatgttggctccgatatactcttccccggttatttgcaatggtcactcgaattctgcaaatgtgttctttctatggcagactgttacgcacaaagtcgatacaatcctgcgctgtcagttcccgtgcagcttacacagtgttttttttggtctcgcggaatggggtactgcagcgctgctcctacgcaacaggcgtatcgtcgtcgctttgccagtcagttcgcacctcaagatgcagtacacgacgcaatagagcggcttttcctcgacgtttaa

SEQ ID NO: 6875 - protein, 158 aa, Muscodor strobelii
  misc_feature: SGI Peptide ID NO. 562045
MPPEIRVDDHPVTMPTVQSHEIGFTTSVTRGVETHPTLEELKANLTLAIEWMHGLLEVFDEAYDDEDDVGSDILFPGYLQWSLEFCKCVLSMADCYAQSRYNPALSVPVQLTQCFFWSRGMGYCSAAPTQQAYRRRFASQFAPQDAVHDAIERLFLDV

SEQ ID NO: 6876 - DNA, 360 bp, Muscodor strobelii
  misc_feature: SGI EST ID NO. CUFF.17117.0
  misc_feature: Variant of the nucleotide sequence at SEQ ID NO 6874
caaagtcgatacaatcctgcgctgtcagttcccgtgcagcttacacagtgttttttttggtctcgcggaatggggtactgcagcgctgctcctacgcaacaggcgtatcgtcgtcgctttgccagtcagttcgcacctcaagatgcagtacacgacgcaatagagcggcttttcctcgacgtttaaacagcaaagtatggttgtaggatgaatgcagcgagttgcaaggcgagatgtttttcggtcttagagtagctctatgatcgaagttcacttctttcaatacttacgttcgtttctacctgtcactagtcgaaacctgtatagtgtatttacagacgcttctggccaatcatcggc

SEQ ID NO: 6877 - DNA, 651 bp, Muscodor strobelii
  misc_feature: SGI cDNA ID NO. 562046
  misc_feature: Elevated expression when VOC is produced
  misc_feature: Encodes the peptide sequence at SEQ ID NO 6878
atgggtgatgagatttgccttctagacgaagcgagcgttgaggaggcgtggaatgagacattcggaccttatatggacgagatggacttcgattcaagcgatttcgaccttatagatcgtggcctagctctagagcagcgcacagaggcacttcttgagttgaaagtcggacaacatgctgcgaaacaattgaagacgattcgggaagacttcatgactgagctagcggacgtcgaggagacacagaatgaaatgaagaacattctccgattcattcaagctgaccctctctgggcggaatatgccgactttatggcgatgtcacttgaaacggaagaggaaaaggcgactgggcacacggctctttgccgtcttttcggtttcaaggagaccttctcctttaaacgtaattggagggccatcggtgaagctcgagaggcggtcaccgcgcttgctcatgatatctggtttccagacgaacgcaagaaattcgtgaagtttctcggtagattgatgggtcccgtggagtgcgatcaagaacagcagagacgagatgaccttctggaaatgaccgtatcggaacccgcgctgcagcagctggttaagacgttctggcgagagcacgacaagtatgatgttcgttgcacttag

SEQ ID NO: 6878 - protein, 216 aa, Muscodor strobelii
  misc_feature: SGI Peptide ID NO. 562046
  misc_feature: Useful for introducing or modulating the production of volatile compounds
MGDEICLLDEASVEEAWNETFGPYMDEMDFDSSDFDLIDRGLALEQRTEALLELKVGQHAAKQLKTIREDFMTELADVEETQNEMKNILRFIQADPLWAEYADFMAMSLETEEEKATGHTALCRLFGFKETFSFKRNWRAIGEAREAVTALAHDIWFPDERKKFVKFLGRLMGPVECDQEQQRRDDLLEMTVSEPALQQLVKTFWREHDKYDVRCT

SEQ ID NO: 6879 - DNA, 1528 bp, Muscodor strobelii
  misc_feature: SGI EST ID NO. CUFF.17135.0
  misc_feature: Variant of the nucleotide sequence at SEQ ID NO 6877
tgagcaatggctaaacagtttctttctgcagacatcaaagtattcccgaaatcatatatctttcgtcaaactgtgtatccctcagcagtgatttaagatgtttaagatgcatttacttcatctcgctgccatcctcattggactggtgtttacttggcgcagttatgccatgggtgatgagatttgccttctagacgaagcgagcgttgaggaggcgtggaatgagacattcggaccttatatggacgagatggacttcgattcaagcgatttcgaccttatagatcgtggcctagctctagagcagcgcacagaggcacttcttgagttgaaagtcggacaacatgctgcgaaacaattgaagacgattcgggaagacttcatgactgagctagcggacgtcgaggagacacagaatgaaatgaagaacattctccgattcattcaagctgaccctctctgggcggaatatgccgactttatggcgatgtcacttgaaacggaagaggaaaaggcgactgggcacacggctctttgccgtcttttcggtttcaaggagaccttctcctttaaacgtaattggagggccatcggtgaagctcgagaggcggtcaccgcgcttgctcatgatatctggtttccagacgaacgcaagaaattcgtgaagtttctcggtagattgatgggtcccgtggagtgcgatcaagaacagcagagacgagatgaccttctggaaatgaccgtatcggaacccgcgctgcagcagctggttaagacgttctggcgagagcacgacaagtatgatgttcgttgcacttagccgggttgtcgcgacttatcttagcatggtttcataaggtagttcctggagtagagctttcgagttttctctactatggtttctatgactttacagccagatataagaaaacacaattattcataagtccaaactcgtggcttaaagccttgattccctgtctcatgatgtacagttgtgcgactggtgggttatttggccagttatttgtagtgaagacgcccagaataacacaaatgaaagtctgataataaatgcatgttaacacatattagatgctcattgtggcctcttaagttaaatttggagcgcccgccgtatttcacgtcgtgcgacgagttatacccatgaatcaggtggcgccttggatctctgccactgcattctattactctcccgccgccatccttgcccggtccgaaatttctctaggaaggccaagaatccggatcctcccgatgaacgcgcccaaaagtataagacgattatggtggacagaatgtacgtgaacaaagggattgttacaaaactcgcaaggaaacccttgggcgttgacgttgaattactcgtcacgaatggaattgcccaaaaagcctgcgaatctctgctgtattagttttgctggtaatgatcacgagcgctaggactatagagatggaaggggttgtcaaaccgctatgaagcccaaaggcgtgaagaatactgtca

SEQ ID NO: 6880 - DNA, 1083 bp, Muscodor strobelii
  misc_feature: SGI cDNA ID NO. 562047
  misc_feature: Elevated expression when VOC is produced
  misc_feature: Encodes the peptide sequence at SEQ ID NO 6881
atgctctggcagatcatgccaaaggcctccagtagcattctttcaatgccgacagtagcttttctcgaaagtctatttgccccaagcgatcctaacttcacaagcaatgggaccattggtgattggtttccgatccagaccacgactcctgctttctatagtactggaaatctcggcaaaggaaattggctttgtgttcagcacttcgatggtatatggggcaattcaccaaaagtcgtgggatttcccctacagcgacaagccgcagagatcccggacgtaacgcgaaatacatcgcatttcgctgtcgagttcatgctctcagtttcaatcgtcctcagaaaacgacgtcgacataacggcccttctgccctcaaatacaatgttgttgtgtggatagactacgataatacagagttcaacgaacgagtcgagcgtggatcgacgtttcctgtgctctcagacaaggttgacgccgacctaggtttaatagattgtgggtctggaggggagggcttttaccaagttctcgttattcttgcgaagtcaatcgatcattggaagaaatgctgggatgctataatggataaaatcgatagtatcatcagcgttcagatgcatgataccctcgataagaaacgctgggccaagttgatgtttgatgactctttccaattgtcagagcagtactttacgatactgcaactcctccggatcttcgagaactggattgacgaaaccgaacgaggcttggattcattcttcgaggagatttcccaacagtcggaattttggcttaagtggcggcatgagcatgagcaaatggatgagatagaatggccgctcgatatagatgctctgtaccacaatatcgatcaactccgagattttttcgagagccgcgctgttccgctgaaagacagaatcgaaagaaaaaaagaggagctcacgactttacaagatgcgctcttaagcacttcctcgttacacgaggcacttaaagcaaagacgctaaatctgtacatcggtgtttttactaccgtgacagtattcttcacgcctttgggcttcatagcggtttga

SEQ ID NO: 6881 - protein, 360 aa, Muscodor strobelii
  misc_feature: SGI Peptide ID NO. 562047
  misc_feature (175)..(358): NCBI GI: 46134027 Blast Desc: FG09153.1 [Gibberella zeae PH-1]
  misc_feature (186)..(360): NCBI GI: 119501615 Blast Desc: NFIA_044860 [Neosartorya fischeri NRRL 181] gi|119415730|gb|EAW25667.1| NFIA_044860 [Neosartorya fischeri NRRL 181]
  misc_feature (187)..(360): NCBI GI: 171676599 Blast Desc: protein product [Podospora anserina] gi|170936366|emb|CAP61024.1| protein product [Podospora anserina]
  misc_feature (172)..(352): NCBI GI: 116197541 Blast Desc: [Chaetomium globosum CBS 148.51] gi|88178205|gb|EAQ85673.1| [Chaetomium globosum CBS 148.51]
  misc_feature (219)..(358): NCBI GI: 116198769 Blast Desc: [Chaetomium globosum CBS 148.51] gi|88178819|gb|EAQ86287.1| [Chaetomium globosum CBS 148.51]
  misc_feature (173)..(360): NCBI GI: 159130128 Blast Desc: conserved [Aspergillus fumigatus A1163]
  misc_feature (173)..(360): NCBI GI: 71002786 Blast Desc: conserved [Aspergillus fumigatus Af293] gi|66853712|gb|EAL94036.1| conserved [Aspergillus fumigatus Af293]
  misc_feature (173)..(360): NCBI GI: 119482375 Blast Desc: NFIA_092800 [Neosartorya fischeri NRRL 181] gi|119409370|gb|EAW19319.1| conserved [Neosartorya fischeri NRRL 181]
  misc_feature (152)..(248): NCBI GI: 115436796 Blast Desc: [Aspergillus terreus NIH2624] gi|114188461|gb|EAU30161.1| [Aspergillus terreus NIH2624]
  misc_feature (308)..(359): NCBI GI: 116194133 Blast Desc: [Chaetomium globosum CBS 148.51] gi|88182697|gb|EAQ90165.1| [Chaetomium globosum CBS 148.51]
  misc_feature: Useful for introducing or modulating the production of volatile compounds
MLWQIMPKASSSILSMPTVAFLESLFAPSDPNFTSNGTIGDWFPIQTTTPAFYSTGNLGKGNWLCVQHFDGIWGNSPKVVGFPLQRQAAEIPDVTRNTSHFAVEFMLSVSIVLRKRRRHNGPSALKYNVVVWIDYDNTEFNERVERGSTFPVLSDKVDADLGLIDCGSGGEGFYQVLVILAKSIDHWKKCWDAIMDKIDSIISVQMHDTLDKKRWAKLMFDDSFQLSEQYFTILQLLRIFENWIDETERGLDSFFEEISQQSEFWLKWRHEHEQMDEIEWPLDIDALYHNIDQLRDFFESRAVPLKDRIERKKEELTTLQDALLSTSSLHEALKAKTLNLYIGVFTTVTVFFTPLGFIAV

SEQ ID NO: 6882 - DNA, 1643 bp, Muscodor strobelii
  misc_feature: SGI EST ID NO. CUFF.17136.1
  misc_feature: Variant of the nucleotide sequence at SEQ ID NO 6880
cacttcgatggtatatggggcaattcaccaaaagtcgtgggatttcccctacagcgacaagccgcagagatcccggacgtaacgcgaaatacatcgcatttcgctgtcgagttcatgctctcagtttcaatcgtcctcagaaaacgacgtcgacataacggcccttctgccctcaaatacaatgttgttgtgtggatagactacgataatacagagttcaacgaacgagtcgagcgtggatcgacgtttcctgtgctctcagacaaggttgacgccgacctaggtttaatagattgtgggtctggaggggagggcttttaccaagttctcgttattcttgcgaagtcaatcgatcattggaagaaatgctgggatgctataatggataaaatcgatagtatcatcagcgttcagatgcatgataccctcgataagaaacgctgggccaagttgatgtttgatgactctttccaattgtcagagcagtactttacgatactgcaactcctccggatcttcgagaactggattgacgaaaccgaacgaggcttggattcattcttcgaggagatttcccaacagtcggaattttggcttaagtggcggcatgagcatgagcaaatggatgagatagaatggccgctcgatatagatgctctgtaccacaatatcgatcaactccgagattttttcgagagccgcgctgttccgctgaaagacagaatcgaaagaaaaaaagaggagctcacgactttacaagatgcgctcttaagcacttcctcgttacacgaggcacttaaagcaaagacgctaaatctgtacatcggtgtttttactaccgtgacagtattcttcacgcctttgggcttcatagcggctttttgggcaattccattcgtgacgagtaattcaacgtcaacgcccaagggtttccttgcgagttttgtaacaatccctttgttcacgtacattctgtccaccataatcgtcttatacttttgggcgcgttcatcgggaggatccggattcttggccttcctagagaaatttcggaccgggcaaggatggcggcgggagagtaatagaatgcagtggcagagatccaaggcgccacctgattcatgggtataactcgtcgcacgacgtgaaatacggcgggcgctccaaatttaacttaagaggccacaatgagcatctaatatgtgttaacatgcatttattatcagactttcatttgtgttattctgggcgtcttcactacaaataactggccaaataacccaccagtcgcacaactgtacatcatgagacagggaatcaaggctttaagccacgagtttggacttatgaataattgtgttttcttatatctggctgtaaagtcatagaaaccatagtagagaaaactcgaaagctctactccaggaactaccttatgaaaccatgctaagataagtcgcgacaacccggctaagtgcaacgaacatcatacttgtcgtgctctcgccagaacgtcttaaccagctgctgcagcgcgggttccgatacggtcatttccagaaggtcatctcgtctctgctgttcttgatcgcactccacgggacccatcaatctaccgagaaacttcacgaatttcttgcgtt

SEQ ID NO: 6883 - DNA, 2829 bp, Muscodor strobelii
  misc_feature: SGI cDNA ID NO. 562048
  misc_feature: Encodes the peptide sequence at SEQ ID NO 6884
atggcagacacggccaccccaaagcctggtgtcgacttggaaaaagagttgacttgctcgatctgtaccgagatcctcttccagcctttgacgctgctcgactgtctgcatacttactgtggctcttgtctgaaagagtggtttgaatttcaatatgtctccgcctcgacgaaaccagatcctcccccaccgggcaccaacatctacagttgcccgtcatgtcgcgcacccgtccgcaacacgcgaggcaacgccactgtcacgagtctactcgatctctacctcgcctgctaccccgacaaagtgaagtccaaagaagagcaggaagaaatgcgccgcaagtataagccgggagacaatatactgcccccatatcgtcctgggggttcgcagcgggagggaaacgctagtggcacatcttcaggtagaagacgccgtgaccacagccgttctgaaggcagtagaaccagatcagggagggacaacagtcgggaggcacgccatcgacctcggcgcgagaatgagcgcagacgtcgcacagattcaaacggcatgcttcaacctgattcatcctctgacgaacagagaggcagccgcagtgagtcaaggcggcgggctgttacacaacaagccattcgtgattcttcatctgcagcaagagctaggcacgttgagcaccaggcatctatcaggtccttaatcagctcctctgatgtcgactctcgagatttagaacaagagattgacgactttgctcggcaaatccaagaggaaggtttacttgatgggctcgacctagacaatatcgacctaagtcaaaacgacgaactcagccgcaaaattacagaggcatatcgcagacggcaaagggctcggccaagagctgagtctgccaggagcactgcagccaacatcacttctcatcgggtagaggcggcccatcctcaatccagacctccagtcacagagtcgcttcgccctgcaagcagacagagatccaattcagcacatgtgcgaacgccaagcagtagcagtcagtcgaatgagcgtagtcgtccgcccataacatccgcgagacttgaagtcaacagcgattccgagagaaggcgacgaaggagcacgtccagtagtgctagaagcgcaaccgaccccatacgaccaagcactgctgaaacgcgtccggcaacgagacgcccgacagatttgaccatccggtctcagagctctgaccggtcagctcggcggccgtctcttgtagatagtcgaagtagtagtatgcctatcgactcttcaagaggctcatcatcggctgagcaacacagtgcaccgtcgggtaacggtgctagagacttgtctttcagtggtcgggcttcagccgccgctctatcccaatccacgatggccccacctctcctctcgcctaccgatgactccggtggcgaacgtcctatgaggcgacgaagaccttctagcctgatagtgcctcagagcccattgcccagtctcggactgctatcttcccccacacatcagacacaccatcaacaacctagacaccagtttttccaagagccttcaattacatgctcgcgatgccaaagaccgcatattgagtacgagctgcactataattgtgcgcaatgttcaggtggggagtggaatatttgcttaagctgctacaggacaggaaagggatgtcgccactggtttgggtttggatacgcagcttttagtaactgggaccgacaacgtgtcagatcagaaaggcctctcgatccgccacacatgctcactgcgaatcgatatatcccaccacgatctgctcctggtggggctgaaggccgcaagactctcacgacagacgatccggcccttcggctggaaagtggcatgttctgcgtccgctgcctcgcgtgggctaatgagtgttactggcgttgtgattattgtaacgatggagactgggggttttgcaatgcttgtgttaaccaaggatacggttgcaagcaccctcttctgccattaacatacgtgcagcctccacactcgccttcacctctgccatctccctccctctcacagaattcctcaaccccacctagcagccccaggttgcgacaagggaatagacatcatcgaccacgctctgctacactgttcactggcccaaacgcgatgacgataggcaatttccggccgctggtattcataacgacctgcgacgtgtgtcaacagtccatacagcccgcggatcggcgatatcactgcaacaaatgtaccagccaagtttttccagatactcaatctggagattatgatatttgtcttcagtgctatgacaagctcgttaccgacgggcagatctcttccgataatggttgcgagggctggcgcaggtgcttacgtggtcatcgtatgagtattctcggcttcaacgaaggaaaaggcggacaacgtcggatcattatgcgggacatagttggagggaccggtttaaccattgaaccgcatgagagtgatcagacattgcagagatggcactggtatgtcagtgggacgaaagttaatcgtgtcgctaccgtcgaggttggctccaaactccccgagcagctacaacaacagaatgagttccctcctgatggtggtgctggcttgagaggagacgcgaaatggtcttggtaccctgctgctggtgccgacgacgaactcatgttccctcggggtgcggaaatcctcgagatcgaggatgcgaatggggagtggtgctatggatcgtatatgggagtaaagaggctattcccaaccccatatgttaacatcatgagctaa

SEQ ID NO: 6884 - protein, 942 aa, Muscodor strobelii
  misc_feature: SGI Peptide ID NO. 562048
  misc_feature (19)..(74): Pfam Id: PF00097 Pfam Desc: Zinc finger, C3HC4 type (RING finger)
  misc_feature (3)..(941): NCBI GI: 154311271 Blast Desc: BC1G_06488 [Botryotinia fuckeliana B05.10] gi|150850885|gb|EDN26078.1| BC1G_06488 [Botryotinia fuckeliana B05.10]
  misc_feature (3)..(941): NCBI GI: 156065295 Blast Desc: SS1G_00658 [Sclerotinia sclerotiorum 1980] gi|154691517|gb|EDN91255.1| SS1G_00658 [Sclerotinia sclerotiorum 1980]
  misc_feature (93)..(939): NCBI GI: 261354301 Blast Desc: RING finger domain-containing protein [Verticillium albo-atrum VaMs.102]
  misc_feature (21)..(938): NCBI GI: 145608908 Blast Desc: MGG_12869 [Magnaporthe grisea 70-15] gi|145016332|gb|EDK00822.1| MGG_12869 [Magnaporthe grisea 70-15]
  misc_feature (1)..(940): NCBI GI: 226286793 Blast Desc: RING finger domain-containing protein [Paracoccidioides brasiliensis Pb18]
  misc_feature (1)..(937): NCBI GI: 226280243 Blast Desc: RING finger domain-containing protein [Paracoccidioides brasiliensis Pb01]
  misc_feature (12)..(941): NCBI GI: 189207390 Blast Desc: RING finger domain containing protein [Pyrenophora tritici-repentis Pt-1C-BFP] gi|187976122|gb|EDU42748.1| RING finger domain containing protein [Pyrenophora tritici-repentis
  misc_feature (5)..(941): NCBI GI: 212526234 Blast Desc: SH3 domain protein [Penicillium marneffei ATCC 18224] gi|210072672|gb|EEA26759.1| SH3 domain protein [Penicillium marneffei ATCC 18224]
  misc_feature (1)..(941): NCBI GI: 119481635 Blast Desc: RING finger domain protein [Neosartorya fischeri NRRL 181] gi|119409000|gb|EAW18949.1| RING finger domain protein [Neosartorya fischeri NRRL 181]
  misc_feature (21)..(934): NCBI GI: 225684661 Blast Desc: conserved [Paracoccidioides brasiliensis Pb03]
MADTATPKPGVDLEKELTCSICTEILFQPLTLLDCLHTYCGSCLKEWFEFQYVSASTKPDPPPPGTNIYSCPSCRAPVRNTRGNATVTSLLDLYLACYPDKVKSKEEQEEMRRKYKPGDNILPPYRPGGSQREGNASGTSSGRRRRDHSRSEGSRTRSGRDNSREARHRPRRENERRRRTDSNGMLQPDSSSDEQRGSRSESRRRAVTQQAIRDSSSAARARHVEHQASIRSLISSSDVDSRDLEQEIDDFARQIQEEGLLDGLDLDNIDLSQNDELSRKITEAYRRRQRARPRAESARSTAANITSHRVEAAHPQSRPPVTESLRPASRQRSNSAHVRTPSSSSQSNERSRPPITSARLEVNSDSERRRRRSTSSSARSATDPIRPSTAETRPATRRPTDLTIRSQSSDRSARRPSLVDSRSSSMPIDSSRGSSSAEQHSAPSGNGARDLSFSGRASAAALSQSTMAPPLLSPTDDSGGERPMRRRRPSSLIVPQSPLPSLGLLSSPTHQTHHQQPRHQFFQEPSITCSRCQRPHIEYELHYNCAQCSGGEWNICLSCYRTGKGCRHWFGFGYAAFSNWDRQRVRSERPLDPPHMLTANRYIPPRSAPGGAEGRKTLTTDDPALRLESGMFCVRCLAWANECYWRCDYCNDGDWGFCNACVNQGYGCKHPLLPLTYVQPPHSPSPLPSPSLSQNSSTPPSSPRLRQGNRHHRPRSATLFTGPNAMTIGNFRPLVFITTCDVCQQSIQPADRRYHCNKCTSQVFPDTQSGDYDICLQCYDKLVTDGQISSDNGCEGWRRCLRGHRMSILGFNEGKGGQRRIIMRDIVGGTGLTIEPHESDQTLQRWHWYVSGTKVNRVATVEVGSKLPEQLQQQNEFPPDGGAGLRGDAKWSWYPAAGADDELMFPRGAEILEIEDANGEWCYGSYMGVKRLFPTPYVNIMS

SEQ ID NO: 6885 - DNA, 3034 bp, Muscodor strobelii
  misc_feature: SGI EST ID NO. CUFF.17183.1
  misc_feature: Variant of the nucleotide sequence at SEQ ID NO 6883
cgacgtagcaacccctccagcttctacattctgtgttactctgagcagctgcctcaagtcttcaagacaacaacttggtggccccgatggcagacacggccaccccaaagcctggtgtcgacttggaaaaagagttgacttgctcgatctgtaccgagatcctcttccagcctttgacgctgctcgactgtctgcatacttactgtggctcttgtctgaaagagtggtttgaatttcaatatgtctccgcctcgacgaaaccagatcctcccccaccgggcaccaacatctacagttgcccgtcatgtcgcgcacccgtccgcaacacgcgaggcaacgccactgtcacgagtctactcgatctctacctcgcctgctaccccgacaaagtgaagtccaaagaagagcaggaagaaatgcgccgcaagtataagccgggagacaatatactgcccccatatcgtcctgggggttcgcagcgggagggaaacgctagtggcacatcttcaggtagaagacgccgtgaccacagccgttctgaaggcagtagaaccagatcagggagggacaacagtcgggaggcacgccatcgacctcggcgcgagaatgagcgcagacgtcgcacagattcaaacggcatgcttcaacctgattcatcctctgacgaacagagaggcagccgcagtgagtcaaggcggcgggctgttacacaacaagccattcgtgattcttcatctgcagcaagagctaggcacgttgagcaccaggcatctatcaggtccttaatcagctcctctgatgtcgactctcgagatttagaacaagagattgacgactttgctcggcaaatccaagaggaaggtttacttgatgggctcgacctagacaatatcgacctaagtcaaaacgacgaactcagccgcaaaattacagaggcatatcgcagacggcaaagggctcggccaagagctgagtctgccaggagcactgcagccaacatcacttctcatcgggtagaggcggcccatcctcaatccagacctccagtcacagagtcgcttcgccctgcaagcagacagagatccaattcagcacatgtgcgaacgccaagcagtagcagtcagtcgaatgagcgtagtcgtccgcccataacatccgcgagacttgaagtcaacagcgattccgagagaaggcgacgaaggagcacgtccagtagtgctagaagcgcaaccgaccccatacgaccaagcactgctgaaacgcgtccggcaacgagacgcccgacagatttgaccatccggtctcagagctctgaccggtcagctcggcggccgtctcttgtagatagtcgaagtagtagtatgcctatcgactcttcaagaggctcatcatcggctgagcaacacagtgcaccgtcgggtaacggtgctagagacttgtctttcagtggtcgggcttcagccgccgctctatcccaatccacgatggccccacctctcctctcgcctaccgatgactccggtggcgaacgtcctatgaggcgacgaagaccttctagcctgatagtgcctcagagcccattgcccagtctcggactgctatcttcccccacacatcagacacaccatcaacaacctagacaccagtttttccaagagccttcaattacatgctcgcgatgccaaagaccgcatattgagtacgagctgcactataattgtgcgcaatgttcaggtggggagtggaatatttgcttaagctgctacaggacaggaaagggatgtcgccactggtttgggtttggatacgcagcttttagtaactgggaccgacaacgtgtcagatcagaaaggcctctcgatccgccacacatgctcactgcgaatcgatatatcccaccacgatctgctcctggtggggctgaaggccgcaagactctcacgacagacgatccggcccttcggctggaaagtggcatgttctgcgtccgctgcctcgcgtgggctaatgagtgttactggcgttgtgattattgtaacgatggagactgggggttttgcaatgcttgtgttaaccaaggatacggttgcaagcaccctcttctgccattaacatacgtgcagcctccacactcgccttcacctctgccatctccctccctctcacagaattcctcaaccccacctagcagccccaggttgcgacaagggaatagacatcatcgaccacgctctgctacactgttcactggcccaaacgcgatgacgataggcaatttccggccgctggtattcataacgacctgcgacgtgtgtcaacagtccatacagcccgcggatcggcgatatcactgcaacaaatgtaccagccaagtttttccagatactcaatctggagattatgatatttgtcttcagtgctatgacaagctcgttaccgacgggcagatctcttccgataatggttgcgagggctggcgcaggtgcttacgtggtcatcgtatgagtattctcggcttcaacgaaggaaaaggcggacaacgtcggatcattatgcgggacatagttggagggaccggtttaaccattgaaccgcatgagagtgatcagacattgcagagatggcactggtatgtcagtgggacgaaagttaatcgtgtcgctaccgtcgaggttggctccaaactccccgagcagctacaacaacagaatgagttccctcctgatggtggtgctggcttgagaggagacgcgaaatggtcttggtaccctgctgctggtgccgacgacgaactcatgttccctcggggtgcggaaatcctcgagatcgaggatgcgaatggggagtggtgctatggatcgtatatgggagtaaagaggctattcccaaccccatatgttaacatcatgagctaaggtagagggttaaattgcccacatttgttgatttcagtttgcataagcggagcgtgagattagcgaaacatgataagattcacatagcataggttgataggaaaagatctgcatatcac

SEQ ID NO: 6886 - DNA, 1026 bp, Muscodor strobelii
  misc_feature: SGI cDNA ID NO. 562049
  misc_feature: Elevated expression when VOC is produced
  misc_feature: Encodes the peptide sequence at SEQ ID NO 6887
atggaaacttacacacagttcttacttctcctcgcacttgggtctggagtgcgcggatacggtgagaaggggccctttcaagctttcttcaaaccaatcccatacgtggacgtagatgctggagggattttgcccgtctcttcagacattattgtataccaaaaccaacacccaaacgcgtcatcgagcgcaacattcaaaccctttaaggacacatggagcgagctggggccagactctgtacttcgggactcagagtggacgtttcgcgtaaatacaagccaattctacggcccctataacgacaatagcagcgacctcgcgaagttcggtgaccggcaagcctttgtgagccaaacctacgatttctcctggcccgcagaaggcaatatctcgtcagcattagacggggccacgggtccgctatgcattgcccaagtgactgggatcgatctcccggtgaacgtcacaaatgcgttgacagacggtacaagctgcgttcctgctctcggccaggaatgtgtcgatgccatcctggctaacataacgctgcccagcgagagtggcgtctgcagcttgggccggttcggtcagggcgataggattcccgagtgtaggggttcgttcggccgcgaaaggggcttgatgagcattacaatgcctcaccttgatctcgacaacgcaacgacgcaaattgacagcggcgatacattttgggtgaatactagcggtcctgtactgggcaatgagacgtggctgtacgagactactgggaaccaaatgcagataatgctcttgactgtttcgttacccactggtcatcagaacaatccttatgtgcttgggacggagctcctctgcctaagggccaataacacaaagttacccgacattgatagtgacggggatggtgtcgctacggttggcgaagttgcactgttgaatgcaggcacacagatggaggtccggtttgggtcatttatgtgcctaggactagtcgcgttggttattggcgccctactctaa

SEQ ID NO: 6887 - protein, 341 aa, Muscodor strobelii
  misc_feature: SGI Peptide ID NO. 562049
  misc_feature (56)..(294): NCBI GI: 171690030 Blast Desc: protein product [Podospora anserina] gi|170944970|emb|CAP71081.1| protein product [Podospora anserina]
  misc_feature (116)..(312): NCBI GI: 116194898 Blast Desc: [Chaetomium globosum CBS 148.51] gi|88179960|gb|EAQ87428.1| [Chaetomium globosum CBS 148.51]
  misc_feature: Useful for introducing or modulating the production of volatile compounds
METYTQFLLLLALGSGVRGYGEKGPFQAFFKPIPYVDVDAGGILPVSSDIIVYQNQHPNASSSATFKPFKDTWSELGPDSVLRDSEWTFRVNTSQFYGPYNDNSSDLAKFGDRQAFVSQTYDFSWPAEGNISSALDGATGPLCIAQVTGIDLPVNVTNALTDGTSCVPALGQECVDAILANITLPSESGVCSLGRFGQGDRIPECRGSFGRERGLMSITMPHLDLDNATTQIDSGDTFWVNTSGPVLGNETWLYETTGNQMQIMLLTVSLPTGHQNNPYVLGTELLCLRANNTKLPDIDSDGDGVATVGEVALLNAGTQMEVRFGSFMCLGLVALVIGALL

SEQ ID NO: 6888 - DNA, 2218 bp, Muscodor strobelii
  misc_feature: SGI EST ID NO. CUFF.17146.1
  misc_feature: Variant of the nucleotide sequence at SEQ ID NO 6886
cgtaattgtgctttgctggttcttcaatccaatgcataggtaagtaggtacagacagatacgtgagtctcgcagtcgcatattcatataaatgaccatttttatttgaattttacatgtcaactctgttcctcacacacactctctctcactctctccatctcttgaagttgaagttgacactatagggaacaatggaaacttacacacagttcttacttctcctcgcacttgggtctggagtgcgcggatacggtgagaaggggccctttcaagctttcttcaaaccaatcccatacgtggacgtagatgctggagggattttgcccgtctcttcagacattattgtataccaaaaccaacacccaaacgcgtcatcgagcgcaacattcaaaccctttaaggacacatggagcgagctggggccagactctgtacttcgggactcagagtggacgtttcgcgtaaatacaagccaattctacggcccctataacgacaatagcagcgacctcgcgaagttcggtgaccggcaagcctttgtgagccaaacctacgatttctcctggcccgcagaaggcaatatctcgtcagcattagacggggccacgggtccgctatgcattgcccaagtgactgggatcgatctcccggtgaacgtcacaaatgcgttgacagacggtacaagctgcgttcctgctctcggccaggaatgtgtcgatgccatcctggctaacataacgctgcccagcgagagtggcgtctgcagcttgggccggttcggtcagggcgataggattcccgagtgtaggggttcgttcggccgcgaaaggggcttgatgagcattacaatgcctcaccttgatctcgacaacgcaacgacgcaaattgacagcggcgatacattttgggtgaatactagcggtcctgtactgggcaatgagacgtggctgtacgagactactgggaaccaaatgcagataatgctcttgactgtttcgttacccactggtcatcagaacaatccttatgtgcttgggacggagctcctctgcctaagggccaataacacaaagttacccgacattgatagtgacggggatggtgtcgctacggttggcgaagttgcactgttgaatgcaggcacacagatggaggtccggtttgggtcatttatgtgcctaggactagtcgcgttggttattggcgccctactctaaagcgacagtttcaagtacgataccgctcgaaaacaaattagacaacaatgcgagaacggatcactaaggactgcttggtgttacaattattgcaaagttcgagaaatcgtaagattagtctacacgtgtctcttggtcactatcattccttaactttttgcaactttcttgtcgacgaatatttcgaaagacggtggcgtgctcgccttatggctatgtcaatactgctgcctcccgttttcagtccgaaaagagtgcctcgcgatgtagcagtagtacaatccttgacgaggggtcggcctttttgagtgagtatgcaaagagtttgccgatgtttccaattccgagaacatgaatcgtcttcattgcgactgtagctaatcttgatggtcttattccgacacggcgcgctgttgatgatcaagaaaccatcgtgcatgcttgagctggtgaatccctgccaactccaccaaaggattcagtgtctcagctgccatatgatcatcaaccaaagtacttttgaccaactcaagagatgagcgtacctgaacctaaggcatgacaaccagtgctctttgccaaatattctacaactgatcggcccggatgacgcgggtgccgctacttgaacaaagtagcaatattattcctcttgtgaaagtaaacagtcaatgagtaggggattgcttgatctacctactaaggtactgaacgcaatggatgggaaatgacgccctattcttaggttgatctctgccctgtaatagacctacctggaaagcggttccaacctaatgctacgctagaaggtatgtagaggaacgaacggtaacccggagtcaagatgaataggattcccgattctgttatgctgaagacccgatagggattctgaccgacgtaaaagggaaaaaaaaaaagaaagaaaacttcctcataagctgacgcactcacactcattaagctagaacggacactcgatgagatgagcgtagtcac

SEQ ID NO: 6889 - DNA, 639 bp, Muscodor strobelii
  misc_feature: SGI cDNA ID NO. 562050
  misc_feature: Encodes the peptide sequence at SEQ ID NO 6890
atggccaccatctttgatctaatcaagtgctatcccgtactttctcgcttacgtcaatatctcgatatcagggatcagctaaggttctgtcaaacgtcccgtcggattaacatccgacccgatatcaattcatggcttgggaggtttttcgcccaccccatcgcgtttcgcaatcacttaggtcggtacgatgcgctcatttctggcagttttgccctccaatttctcaagggtgttgtctgggatgattcagacctggacatagttatcaatgatggtccagaactcttggaaatgatcatatatctggtcgacatcgagggataccaattcactggcgagcaggacttcggcaggcccgaatgcctaccggatggttactggattgaatttggttctaaactcgacgagcgacgtgttggtgacgagaagacttgggttacacatctagatacctctgggatccagcagcctactaagcccgatttcgttatcgagggctcatgtttcttcgttgagtcaatgaaggaacgtgccgaagatcacccagaagaccacccagaggtcaatttcgactggatgtatggtttcaacatccgcgccccaacatttacatcaccatcgctgaagtaccagtaa

SEQ ID NO: 6890 - protein, 212 aa, Muscodor strobelii
  misc_feature: SGI Peptide ID NO. 562050
  misc_feature (4)..(110): NCBI GI: 256721412 Blast Desc: NECHADRAFT_88423 [Nectria haematococca mpVI 77-13-4]
  misc_feature (3)..(125): NCBI GI: 170085847 Blast Desc: [Laccaria bicolor S238N-H82] gi|164651699|gb|EDR15939.1| [Laccaria bicolor S238N-H82]
  misc_feature (41)..(88): NCBI GI: 242216675 Blast Desc: [Postia placenta Mad-698-R] gi|220726688|gb|EED80629.1| [Postia placenta Mad-698-R]
  misc_feature (41)..(88): NCBI GI: 242209890 Blast Desc: [Postia placenta Mad-698-R] gi|220730133|gb|EED83995.1| [Postia placenta Mad-698-R]
  misc_feature (4)..(127): NCBI GI: 119194221 Blast Desc: [Coccidioides immitis RS]
  misc_feature (37)..(111): NCBI GI: 169844535 Blast Desc: [Coprinopsis cinerea okayama7#130] gi|116509728|gb|EAU92623.1| [Coprinopsis cinerea okayama7#130]
  misc_feature (41)..(112): NCBI GI: 242216721 Blast Desc: [Postia placenta Mad-698-R] gi|220726711|gb|EED80652.1| [Postia placenta Mad-698-R]
MATIFDLIKCYPVLSRLRQYLDIRDQLRFCQTSRRINIRPDINSWLGRFFAHPIAFRNHLGRYDALISGSFALQFLKGVVWDDSDLDIVINDGPELLEMIIYLVDIEGYQFTGEQDFGRPECLPDGYWIEFGSKLDERRVGDEKTWVTHLDTSGIQQPTKPDFVIEGSCFFVESMKERAEDHPEDHPEVNFDWMYGFNIRAPTFTSPSLKYQ

SEQ ID NO: 6891 - DNA, 1236 bp, Muscodor strobelii
  misc_feature: SGI cDNA ID NO. 562051
  misc_feature: Encodes the peptide sequence at SEQ ID NO 6892
atgtcgccggaccagctccttcttcctgaagccgtccaacagaacatagtcgacggacctgcactcagtccacctctaggtatcttgccagattttgacaaccctccaaaccagacctctctcggcgtcgctgttatcacaatgtgtctttctttatcaacgatagtgtttggattagcagcccatgctaagttgcactatgtgaagaaagtccatattgaagactttctcttcttctctggctatggattggttgttggtcattactactgtctgtacgagacgtcgactggcgttgggtttttcgtacaccagtggaatgttcgagtcaaagatttggctcagtttttctacgtagttatttatcattttctccgtcttaaccgcaggatccttcacgttggtacgcttctgtattcagtcggcatcatgcttttcaaagttgctatccttctccagtggatacgagtatttgtcccgtgtggtaccaaggggccattcttctggacttgctatgtcttcatagggattaatatcctcttatactcttccaccgtgatcaccggaattgcatcgtgcgaaccttttaggcgatcatgggatccgaccacacccggcatatgcagtatcaatcgggatactatcgacgtttgtactgctgtcggcaacctcgtatcggacgttatcatcttaatcttgccgcaccggatgatatggagtcttcatatcaaaatgcaaaagaaggttggcgttgttttcatcttccttctcagcgcattcgctgtcgtttctgccggattcagggttgatgcatcgattggccttcttagctctgttgacaagacatacgacataaccaccgtagctctttggggcatctctgagctcacatgtacgatcctcgttttctgcgtgccatcaatccccaaaatctttcgagaatccggactttccattaagtcgcctgtcttcttctggggtcggtccaaaaacctcgctggagaaaagaaatctggtcatagttcaatctggacaagccttggtggtaggactctagctgttgatagcctatgcgacccgaaatacgactacgatctccagcggtcgacaaccgacccagtgaaagcccaagtgtggcacctggaggcacacaacagaggacttgataatgttgaatgtcttcccgcaggagtcttgcccaccacgagcacagcgggtcttattcgagctgactag

SEQ ID NO: 6892 - protein, 411 aa, Muscodor strobelii
  misc_feature: SGI Peptide ID NO. 562051
  misc_feature (17)..(365): NCBI GI: 256727941 Blast Desc: NECHADRAFT_26479 [Nectria haematococca mpVI 77-13-4]
  misc_feature (17)..(317): NCBI GI: 46118221 Blast Desc: FG04693.1 [Gibberella zeae PH-1]
  misc_feature (7)..(410): NCBI GI: 145607555 Blast Desc: MGG_04339 [Magnaporthe grisea 70-15] gi|145015080|gb|EDJ99648.1| MGG_04339 [Magnaporthe grisea 70-15]
  misc_feature (6)..(320): NCBI GI: 256731204 Blast Desc: NECHADRAFT_85215 [Nectria haematococca mpVI 77-13-4]
  misc_feature (27)..(342): NCBI GI: 169781106 Blast Desc: [Aspergillus oryzae RIB40] gi|83773758|dbj|BAE63883.1| protein product [Aspergillus oryzae]
  misc_feature (27)..(342): NCBI GI: 238500906 Blast Desc: conserved [Aspergillus flavus NRRL3357] gi|220691924|gb|EED48271.1| conserved [Aspergillus flavus NRRL3357]
  misc_feature (13)..(313): NCBI GI: 212534224 Blast Desc: conserved [Penicillium marneffei ATCC 18224] gi|210069667|gb|EEA23757.1| conserved [Penicillium marneffei ATCC 18224]
  misc_feature (100)..(316): NCBI GI: 238505010 Blast Desc: conserved [Aspergillus flavus NRRL3357] gi|220689848|gb|EED46198.1| conserved [Aspergillus flavus NRRL3357]
  misc_feature (21)..(315): NCBI GI: 156057637 Blast Desc: SS1G_04550 [Sclerotinia sclerotiorum 1980] gi|154702335|gb|EDO02074.1| SS1G_04550 [Sclerotinia sclerotiorum 1980]
  misc_feature (81)..(356): NCBI GI: 145248463 Blast Desc: An13g03450 [Aspergillus niger] gi|134081233|emb|CAK41741.1| protein product [Aspergillus niger]
MSPDQLLLPEAVQQNIVDGPALSPPLGILPDFDNPPNQTSLGVAVITMCLSLSTIVFGLAAHAKLHYVKKVHIEDFLFFSGYGLVVGHYYCLYETSTGVGFFVHQWNVRVKDLAQFFYVVIYHFLRLNRRILHVGTLLYSVGIMLFKVAILLQWIRVFVPCGTKGPFFWTCYVFIGINILLYSSTVITGIASCEPFRRSWDPTTPGICSINRDTIDVCTAVGNLVSDVIILILPHRMIWSLHIKMQKKVGVVFIFLLSAFAVVSAGFRVDASIGLLSSVDKTYDITTVALWGISELTCTILVFCVPSIPKIFRESGLSIKSPVFFWGRSKNLAGEKKSGHSSIWTSLGGRTLAVDSLCDPKYDYDLQRSTTDPVKAQVWHLEAHNRGLDNVECLPAGVLPTTSTAGLIRAD

SEQ ID NO: 6893 - DNA, 876 bp, Muscodor strobelii
  misc_feature: SGI cDNA ID NO. 562052
  misc_feature: Encodes the peptide sequence at SEQ ID NO 6894
atgaatcacatccgagctgtgagacccattgcctcccgcttccagccgtccactctacccaaggtcgtccgaccattctcttccacagtagccagatcgtatgagcatattcagacctcgaagccgaaacctggtgttgggcaagtcacactgagccgacccaaggctctcaacgccctttgcacaccattaatcacagagctcaaccaggcgctaggcgaattcggctccgccgatgatgtctccgttatcatcctcacagggtcagagaaggccttcgccgccggtgccgatatcaaggagatggctcccttgacgttctcagaagcatacacaaacagcttcatcgaatcatggtcagacctcaccacaaaggtcaagaagcccattctcgcggctgtatctggtcacgctcttggtggcggttgcgagctggccatgatgtgtgatgttctgtactgcaccgagaacgcaaacttcgggcagcctgagatcaagctcggcacgattcccggcgccggtggcagccagcgccttacccgcgccattggaaagtcgaaggccatggagctcattctgacgggcaaatcattctcaggagctgatgcagagaagtggggtctcgctgcgaaggcgttcccgagctacgaggcgttgatggagggtgttatgaagacagcagaaactattgctgggtactccaaggttgccatcattggtgctaaggaggttgtgaacaagagccaggatctaccactgcgggacggtgttgagtatgagagaagggtgttccatggcatcttcggtagccaggaccagaaaatcggtatgaaggctttttctgagaagaagaaggctgagtggacccattcatag

SEQ ID NO: 6894 - protein, 291 aa, Muscodor strobelii
  misc_feature: SGI Peptide ID NO. 562052
  misc_feature (47)..(214): Pfam Id: PF00378 Pfam Desc: Enoyl-CoA hydratase/isomerase family
  misc_feature (14)..(291): NCBI GI: 256732769 Blast Desc: NECHADRAFT_104181 [Nectria haematococca mpVI 77-13-4]
  misc_feature (1)..(290): NCBI GI: 154323145 Blast Desc: BC1G_00915 [Botryotinia fuckeliana B05.10] gi|150848249|gb|EDN23442.1| BC1G_00915 [Botryotinia fuckeliana B05.10]
  misc_feature (1)..(290): NCBI GI: 145608906 Blast Desc: MGG_12868 [Magnaporthe grisea 70-15] gi|145016331|gb|EDK00821.1| MGG_12868 [Magnaporthe grisea 70-15]
  misc_feature (1)..(290): NCBI GI: 156064459 Blast Desc: SS1G_00237 [Sclerotinia sclerotiorum 1980] gi|154691099|gb|EDN90837.1| SS1G_00237 [Sclerotinia sclerotiorum 1980]
  misc_feature (10)..(290): NCBI GI: 116191943 Blast Desc: conserved [Chaetomium globosum CBS 148.51] gi|88181602|gb|EAQ89070.1| conserved [Chaetomium globosum CBS 148.51]
  misc_feature (2)..(288): NCBI GI: 85084582 Blast Desc: enoyl-CoA hydratase, mitochondrial precursor [Neurospora crassa OR74A] gi|28918429|gb|EAA28103.1| enoyl-CoA hydratase, mitochondrial precursor [Neurospora crassa OR74A]
  misc_feature (12)..(288): NCBI GI: 171686894 Blast Desc: protein product [Podospora anserina] gi|170943408|emb|CAP69061.1| protein product [Podospora anserina]
  misc_feature (8)..(290): NCBI GI: 71001488 Blast Desc: enoyl-CoA hydratase/isomerase family protein [Aspergillus fumigatus Af293] gi|66853063|gb|EAL93387.1| enoyl-CoA hydratase/isomerase family protein [Aspergillus Af293]
  misc_feature (17)..(290): NCBI GI: 119481075 Blast Desc: enoyl-CoA hydratase/isomerase family protein [Neosartorya fischeri NRRL 181] gi|119408720|gb|EAW18669.1| enoyl-CoA hydratase/isomerase family protein [Neosartorya NRRL
  misc_feature (23)..(290): NCBI GI: 255950514 Blast Desc: Pc22g21270 [Penicillium chrysogenum Wisconsin 54-1255] gi|211593041|emb|CAP99415.1| Pc22g21270 [Penicillium chrysogenum Wisconsin 54-1255]
  misc_feature (19)..(288): SWISSPROT Homolog: EC 4.2.1.17 Enoyl-CoA hydratase
MNHIRAVRPIASRFQPSTLPKVVRPFSSTVARSYEHIQTSKPKPGVGQVTLSRPKALNALCTPLITELNQALGEFGSADDVSVIILTGSEKAFAAGADIKEMAPLTFSEAYTNSFIESWSDLTTKVKKPILAAVSGHALGGGCELAMMCDVLYCTENANFGQPEIKLGTIPGAGGSQRLTRAIGKSKAMELILTGKSFSGADAEKWGLAAKAFPSYEALMEGVMKTAETIAGYSKVAIIGAKEVVNKSQDLPLRDGVEYERRVFHGIFGSQDQKIGMKAFSEKKKAEWTHS

SEQ ID NO: 6895 - DNA, 2010 bp, Muscodor strobelii
  misc_feature: SGI EST ID NO. CUFF.17177.0
  misc_feature: Variant of the nucleotide sequence at SEQ ID NO 6893
atcctcggccagcttcggtcatcaccttgtcactgtgatagctttacagttcaccagcaagctccagaacttcttcccatagacatttctgctactctaaaatagatttcaacccccaagacaaaatcaatttacactcaattggcttcctttaaactctggaaaatcaacactgctgcccattatgaatcacatccgagctgtgagacccattgcctcccgcttccagccgtccactctacccaaggtcgtccgaccattctcttccacagtagccagatcgtatgagcatattcagacctcgaagccgaaacctggtgttgggcaagtcacactgagccgacccaaggctctcaacgccctttgcacaccattaatcacagagctcaaccaggcgctaggcgaattcggctccgccgatgatgtctccgttatcatcctcacagggtcagagaaggccttcgccgccggtgccgatatcaaggagatggctcccttgacgttctcagaagcatacacaaacagcttcatcgaatcatggtcagacctcaccacaaaggtcaagaagcccattctcgcggctgtatctggtcacgctcttggtggcggttgcgagctggccatgatgtgtgatgttctgtactgcaccgagaacgcaaacttcgggcagcctgagatcaagctcggcacgattcccggcgccggtggcagccagcgccttacccgcgccattggaaagtcgaaggccatggagctcattctgacgggcaaatcattctcaggagctgatgcagagaagtggggtctcgctgcgaaggcgttcccgagctacgaggcgttgatggagggtgttatgaagacagcagaaactattgctgggtactccaaggttgccatcattggtgctaaggaggttgtgaacaagagccaggatctaccactgcgggacggtgttgagtatgagagaagggtgttccatggcatcttcggtagccaggaccagaaaatcggtatgaaggctttttctgagaagaagaaggctgagtggacccattcatagaggagactatgttgtaggtagagcagaaatccaaaatctcggcatcagtttgtccaaagaacgatcttttaactaatattattgttacagtggctagctaattaactacatcaatttgatacgtgaggactccgtgtggtaacgaattacagtacgaaacaataagcagaaggccgaaaagaattgatctcaaaagtcttgcgaattttaaactcaaaatcttgatgtgttcatggctacaccttggactataggggtaataaagcaatgcgtgcaagcatggaatttaaaacgaaaggaaggcgacaattcggtgctccatataattgtcgctagtcagctcgaataagacccgctgtgctcgtggtgggcaagactcctgcgggaagacattcaacattatcaagtcctctgttgtgtgcctccaggtgccacacttgggctttcactgggtcggttgtcgaccgctggagatcgtagtcgtatttcgggtcgcataggctatcaacagctagagtcctaccaccaaggcttgtccagattgaactatgaccagatttcttttctccagcgaggtttttggaccgaccccagaagaagacaggcgacttaatggaaagtccggattctcgaaagattttggggattgatggcacgcagaaaacgaggatcgtacatgtgagctcagagatgccccaaagagctacggtggttatgtcgtatgtcttgtcaacagagctaagaaggccaatcgatgcatcaaccctgaatccggcagaaacgacagcgctaagagacatgagtacatttgtagtagaatgagaggtcaagcattggaaggggctgacatacaatgcgctgagaaggaagatgaaaacaacgccaaccttcttttgcattttgatatgaagactccatatcatccggtgcggcaagattaagatgataac

SEQ ID NO: 6896 - DNA, 399 bp, Muscodor strobelii
  misc_feature: SGI cDNA ID NO. 562053
  misc_feature: Encodes the peptide sequence at SEQ ID NO 6897
atggatgccgtaaccattcgcagccggcggttcatccgcaacgccctcctcggcagaaagcagatggtgattgatgtcctccacccaggcagcgccggcattgccaagaacgacctccgcgagcagctctcccgcatgtacaaagcgactcccgagcaagtcagcgtctttggcctcagaacccagtttggaggtggcaggacgacgggtttcgcgctggtctacgactcagccgaggctttgcgcaagtttgagccgcagcatcgccttgttcgcgacggccttgcgaccaggcctgagcgtgcttctcgtcaacagcgcaaacaacgcaagaatcgccagaagaccttacgtggtactgccaaagtgaagggtacaaaggctaagaaagacaagtga

SEQ ID NO: 6897 - protein, 132 aa, Muscodor strobelii
  misc_feature: SGI Peptide ID NO. 562053
  misc_feature (22)..(105): Pfam Id: PF01282 Pfam Desc: Ribosomal protein S24e
  misc_feature (4)..(132): NCBI GI: 171676527 Blast Desc: protein product [Podospora anserina] gi|170936330|emb|CAP60988.1| protein product [Podospora anserina]
  misc_feature (4)..(132): NCBI GI: 116197363 Blast Desc: 40S ribosomal protein S24 [Chaetomium globosum CBS 148.51] gi|88178116|gb|EAQ85584.1| 40S ribosomal protein S24 [Chaetomium globosum CBS 148.51]
  misc_feature (4)..(132): NCBI GI: 85084940 Blast Desc: 40S ribosomal protein S24 [Neurospora crassa OR74A] gi|28918498|gb|EAA28171.1| 40S ribosomal protein S24 [Neurospora crassa OR74A] gi|28950233|emb|CAD71100.1| 40S RIBOSOMAL PROTEIN
  misc_feature (4)..(120): NCBI GI: 261353598 Blast Desc: 40S ribosomal protein S24 [Verticillium albo-atrum VaMs.102]
  misc_feature (4)..(120): NCBI GI: 46117268 Blast Desc: FG04476.1 [Gibberella zeae PH-1]
  misc_feature (4)..(120): NCBI GI: 256729515 Blast Desc: [Nectria haematococca mpVI 77-13-4]
  misc_feature (4)..(131): NCBI GI: 119489199 Blast Desc: 37S ribosomal protein S24 [Neosartorya fischeri NRRL 181] gi|119411009|gb|EAW20954.1| 37S ribosomal protein S24 [Neosartorya fischeri NRRL 181]
  misc_feature (4)..(131): NCBI GI: 146324608 Blast Desc: 37S ribosomal protein S24 [Aspergillus fumigatus Af293] gi|129555387|gb|EAL84680.2| 37S ribosomal protein S24 [Aspergillus fumigatus Af293] gi|159123040|gb|EDP48160.1| 37S S24
  misc_feature (4)..(120): NCBI GI: 39971319 Blast Desc: MGG_10680 [Magnaporthe grisea 70-15] gi|145012226|gb|EDJ96882.1| MGG_10680 [Magnaporthe grisea 70-15]
  misc_feature (4)..(131): NCBI GI: 242824604 Blast Desc: 37S ribosomal protein S24 [Talaromyces stipitatus ATCC 10500] gi|218713213|gb|EED12638.1| 37S ribosomal protein S24 [Talaromyces stipitatus ATCC 10500]
MDAVTIRSRRFIRNALLGRKQMVIDVLHPGSAGIAKNDLREQLSRMYKATPEQVSVFGLRTQFGGGRTTGFALVYDSAEALRKFEPQHRLVRDGLATRPERASRQQRKQRKNRQKTLRGTAKVKGTKAKKDK

SEQ ID NO: 6898 - DNA, 898 bp, Muscodor strobelii
  misc_feature: SGI EST ID NO. CUFF.17209.3
  misc_feature: Variant of the nucleotide sequence at SEQ ID NO 6896
ccggtctacagggcagccagctagcagatgcaatgacaatggcaaaggctctcagccatcagctagcgcaccaccagtcaactgggaccccgccagaattaaccttcttcagaatttattgttagatgggaattgccatcctcgcagcatcacacaacgccaaaccactaccatggatgccgtaaccattcgcagccggcggttcatccgcaacgccctcctcggcagagtatgggttctacccagtccagacaagaagcaaagctgacaatctcatcagaagcagatggtgattgatgtcctccacccaggcagcgccggcattgccaagaacgacctccgcgagcagctctcccgcatgtacaaagcgactcccgagcaagtcagcgtctttggcctcagaacccagtttggaggtggcaggacgacgggtttcgcgctggtctacgactcagccgaggctttgcgcaagtttgagccgcagcatcgccttgttcgcgacggccttgcgaccaggcctgagcgtgcttctcgtcaacagcgcaaacaacgcaagaatcgccagaagaccttacgtggtactgccaaagtgaagggtacaaaggctaagaaagacaagtgatcattgcagatatgccaaggacgggtgaagaccaaggacgaaggacgagagatgatcgttgcatgctatggcgttatgcagggcaaggctttgccctcagtaaactagaccggactagctgacaacgaattacaatgagttaagaatgcatctactaacacagccggatgaacggctacttccctgaggactacctgccgccatgttcgtgactcttagattcttgctttcctctaatcgaaaggtagcgattcacaagtaattgaccgctaccca

SEQ ID NO: 6899 - DNA, 576 bp, Muscodor strobelii
  misc_feature: SGI cDNA ID NO. 562054
  misc_feature: Encodes the peptide sequence at SEQ ID NO 6900
atggagaatattgagaccgaccagacgccctttgcggctgtcacagcccagacctccaagatccaaaggcaataccaagccgtcctcgatcgctccacgccctacgtgctgtatcggtggattggcactggcgtggccctgtcgctcttcttcctgcgagtgttcattgcgcaaggctggtatattgttgcgtatgcgctcggtatctacctgctcaacctgttcctcgccttcctatcgcccaaattcgacccttccaatgatatcctcgacaacgaaatggaggacggctcggctgggggcctgccgaccaagcaggacgaagagttccgacctttcattcgccgactccccgagttcaagttctggcacgaggctacccgcgccatcgtcatctccatcacctgcagcttcttcaccgtcttcgacgtccccgtcttctggcctgtccttgtcatgtactggttcatcctcctgattctgactatgcgcaaacaaatccagcacatgatcaagtaccgatatgtacctttctccttcggcaagacgagatacggcaagagcagcaccaactga

SEQ ID NO: 6900 - protein, 191 aa, Muscodor strobelii
  misc_feature: SGI Peptide ID NO. 562054
  misc_feature (2)..(187): Pfam Id: PF03248 Pfam Desc: Rer1 family
  misc_feature (23)..(187): Pfam Id: PF03248 Pfam Desc: Rer1 family
  misc_feature (1)..(190): NCBI GI: 39976741 Blast Desc: MGG_06273 [Magnaporthe grisea 70-15] gi|145016330|gb|EDK00820.1| MGG_06273 [Magnaporthe grisea 70-15]
  misc_feature (1)..(190): NCBI GI: 261360408 Blast Desc: RER1 [Verticillium albo-atrum VaMs.102]
  misc_feature (1)..(190): NCBI GI: 85084577 Blast Desc: RER1 protein [Neurospora crassa OR74A] gi|28918428|gb|EAA28102.1| RER1 protein [Neurospora crassa OR74A]
  misc_feature (1)..(190): NCBI GI: 154323147 Blast Desc: RER1 protein [Botryotinia fuckeliana B05.10] gi|150848250|gb|EDN23443.1| RER1 protein [Botryotinia fuckeliana B05.10]
  misc_feature (1)..(190): NCBI GI: 116191945 Blast Desc: conserved [Chaetomium globosum CBS 148.51] gi|88181603|gb|EAQ89071.1| conserved [Chaetomium globosum CBS 148.51]
  misc_feature (1)..(190): NCBI GI: 46125821 Blast Desc: FG07288.1 [Gibberella zeae PH-1]
  misc_feature (1)..(190): NCBI GI: 171686892 Blast Desc: protein product [Podospora anserina] gi|170943407|emb|CAP69060.1| protein product [Podospora anserina]
  misc_feature (1)..(190): NCBI GI: 256733220 Blast Desc: [Nectria haematococca mpVI 77-13-4]
  misc_feature (1)..(188): NCBI GI: 255950516 Blast Desc: Pc22g21280 [Penicillium chrysogenum Wisconsin 54-1255] gi|211593042|emb|CAP99416.1| Pc22g21280 [Penicillium chrysogenum Wisconsin 54-1255]
  misc_feature (1)..(188): NCBI GI: 212543625 Blast Desc: Golgi membrane protein (Rer1), [Penicillium marneffei ATCC 18224] gi|210066874|gb|EEA20967.1| Golgi membrane protein (Rer1), [Penicillium marneffei ATCC 18224]
MENIETDQTPFAAVTAQTSKIQRQYQAVLDRSTPYVLYRWIGTGVALSLFFLRVFIAQGWYIVAYALGIYLLNLFLAFLSPKFDPSNDILDNEMEDGSAGGLPTKQDEEFRPFIRRLPEFKFWHEATRAIVISITCSFFTVFDVPVFWPVLVMYWFILLILTMRKQIQHMIKYRYVPFSFGKTRYGKSSTN

SEQ ID NO: 6901 - DNA, 1399 bp, Muscodor strobelii
  misc_feature: SGI EST ID NO. CUFF.17196.0
  misc_feature: Variant of the nucleotide sequence at SEQ ID NO 6899
aggtaattgactgggctgctaggaaaaggagcgaacgttgatcggcatcctgggagagtcgcggccacgctacgaatcttcttttgaaaccctggctttgaggctcgcacccttttccccaagtcaccttgcattatttcatcgtcgtacggactttccactatcttcaacatcacgctcattcaccgattttgcaacgtattaccattttaatcaacccgcgacaccatcggccgctgtatatacagactcccttctccggcgttccctcttccttacgtggcccctccttttagacatccaaaagtagttcgcgatggagaatattgagaccgaccagacgccctttgcggctgtcacagcccagacctccaagatccaaaggcaataccaagccgtcctcgatcgctccacgccctacgtgctgtatcggtggattggcactggcgtggccctgtcgctcttcttcctgcgagtgttcattgcgcaaggctggtatattgttgcgtatgcgctcggtatctacctgctcaacctgttcctcgccttcctatcgcccaaattcgacccttccaatgatatcctcgacaacgaaatggaggacggctcggctgggggcctgccgaccaagcaggacgaagagttccgacctttcattcgccgactccccgagttcaagttctggcacgaggctacccgcgccatcgtcatctccatcacctgcagcttcttcaccgtcttcgacgtccccgtcttctggcctgtccttgtcatgtactggttcatcctcctgattctgactatgcgcaaacaaatccagcacatgatcaagtaccgatatgtacctttctccttcggcaagacgagatacggcaagagcagcaccaactgagcccatcatcaggaaggatggtgtgcctattgtcttgcgccaggccaggaaagggccctggtaaatctctgttagatttaggctggtacagatatgggttaaaagcatgtgggctgtagcttgcagcttgtagacaacaatgtattcatgacatgatagaggcgttcaggcagagctcatgcaacattgcacggtgagcatgcttttgttgactgtacactgtgcagaattacgagacatgcattatacgtgcatgtgaagtgaaacgacgacaagaaaagccgtcgcaaaatgattttttggggggcatttgaggcttgtgtaggcctgtggtctgtctgatacagatttgcgacaacagtcaaggacagtgagggcaggatacaggagaggacaggtttcgcatggggatagaggagggatatgacattcttcttcagacggccaagtggtatagaacatatcatgataataatatgaattaatgaaatatattttatctattgc

SEQ ID NO: 6902 - DNA, 1461 bp, Muscodor strobelii
  misc_feature: SGI cDNA ID NO. 562055
  misc_feature: Encodes the peptide sequence at SEQ ID NO 6903
atggcgtcgtcgtcgcgcaatgggggcgagcaccgctctgttcaccaagacttcatcgctcgcattcgctactccaatgccttgccaccgccgcctcacccgccaaagctcctcgacatccccaacacaggcctagccagcggccagtacactgctcctggctttgcctcgaggctggccagagagcagccactgaacatcgaggctgatgcagagctgggaatgcccctcgacctcgtcggcatgcccaagattttcgatggcgacgagagctctatccaagcacccgcccaacaacctcccctctcctctctccaccctgccgatcgagcccttctccgatccctgaccacactgggcaagcccaagattgcagacgcctccgtctccttcctccgacgcaccgagtatatctcatcagtcacccccaagaagcaggacgccgccaccatgcgcgccgtcaactcagccttcatcaacaggcggcccgtcaagaggaagtctcccgagccagatgtcgactcgcccgcctacgtcaagagaaagatcgaccagagcttctccgtcgctgcccagcagttaaaggacaagaagcgcgtagctcatccttccaagcgcggcctcaagctggtcgagagctaccccgtcctccccgacctcgagtccttccccgattacggtggctacttcaccatcaagttcaccaacaacccggtgtcttcatccgaaacctatgataagcgtctactgaacagcatcatacgcgcatgcccgctagatgaggagaccgagaatgtctacaaccttgccctcaagcaacacgagaaggatcccaccagtatggcccgacccgtcaatccacagtgctacgactactacctcgctgagtccgaggaaacatcggagaaattccgggagcgtttcgatgtgttgaacccggaccacgacgacgaggacctctacaccacgcccgccaccaaagacaggagcgcctacttccagttctcctacgtgcgccgatatgagaccaaggtagaccaagaactgggcataactaataaatatgccgacgagatcatcttcggcttcaacgacgacgagacagcgggtcagaaggctgccttctactcccccgtcatgctgcggactgtcatcagaccgcagcgctccaagacgattcatcgcaatgctggctatgacgagaaggaggataagatccctgatcgactctatgtcacagtagatgatctatccgagagtgctaaggccagaatcgatggattgaaggccaatcctttcaagcctccctttgagggtgacgatgaggaagaggacacgcagggacagagtcagcagaaagctacgaatgggcgtgatgaggatgacgacgacgaagacagggggaatcatcgccaggactcggacgaggatcaggatgctgagggtgatgaggaggactga

SEQ ID NO: 6903 - protein, 486 aa, Muscodor strobelii
  misc_feature: SGI Peptide ID NO. 562055
  misc_feature (16)..(140): Pfam Id: PF03985 Pfam Desc: Paf1
  misc_feature (1)..(485): NCBI GI: 256733219 Blast Desc: NECHADRAFT_106056 [Nectria haematococca mpVI 77-13-4]
  misc_feature (1)..(485): NCBI GI: 261360407 Blast Desc: conserved [Verticillium albo-atrum VaMs.102]
  misc_feature (1)..(486): NCBI GI: 46125823 Blast Desc: FG07289.1 [Gibberella zeae PH-1]
  misc_feature (12)..(433): NCBI GI: 156064453 Blast Desc: SS1G_00234 [Sclerotinia sclerotiorum 1980] gi|154691096|gb|EDN90834.1| SS1G_00234 [Sclerotinia sclerotiorum 1980]
  misc_feature (8)..(433): NCBI GI: 85084573 Blast Desc: NCU06446 [Neurospora crassa OR74A] gi|28918427|gb|EAA28101.1| [Neurospora crassa OR74A]
  misc_feature (1)..(463): NCBI GI: 154323151 Blast Desc: BC1G_00918 [Botryotinia fuckeliana B05.10] gi|150848252|gb|EDN23445.1| BC1G_00918 [Botryotinia fuckeliana B05.10]
  misc_feature (1)..(486): NCBI GI: 145608904 Blast Desc: MGG_06274 [Magnaporthe grisea 70-15] gi|145016329|gb|EDK00819.1| MGG_06274 [Magnaporthe grisea 70-15]
  misc_feature (16)..(332): NCBI GI: 171686890 Blast Desc: protein product [Podospora anserina] gi|170943406|emb|CAP69059.1| protein product [Podospora anserina]
  misc_feature (1)..(432): NCBI GI: 116191947 Blast Desc: CHGG_05691 [Chaetomium globosum CBS 148.51] gi|88181604|gb|EAQ89072.1| CHGG_05691 [Chaetomium globosum CBS 148.51]
  misc_feature (14)..(389): NCBI GI: 189204876 Blast Desc: conserved [Pyrenophora tritici-repentis Pt-1C-BFP] gi|187985872|gb|EDU51360.1| conserved [Pyrenophora tritici-repentis Pt-1C-BFP]
MASSSRNGGEHRSVHQDFIARIRYSNALPPPPHPPKLLDIPNTGLASGQYTAPGFASRLAREQPLNIEADAELGMPLDLVGMPKIFDGDESSIQAPAQQPPLSSLHPADRALLRSLTTLGKPKIADASVSFLRRTEYISSVTPKKQDAATMRAVNSAFINRRPVKRKSPEPDVDSPAYVKRKIDQSFSVAAQQLKDKKRVAHPSKRGLKLVESYPVLPDLESFPDYGGYFTIKFTNNPVSSSETYDKRLLNSIIRACPLDEETENVYNLALKQHEKDPTSMARPVNPQCYDYYLAESEETSEKFRERFDVLNPDHDDEDLYTTPATKDRSAYFQFSYVRRYETKVDQELGITNKYADEIIFGFNDDETAGQKAAFYSPVMLRTVIRPQRSKTIHRNAGYDEKEDKIPDRLYVTVDDLSESAKARIDGLKANPFKPPFEGDDEEEDTQGQSQQKATNGRDEDDDDEDRGNHRQDSDEDQDAEGDEED

SEQ ID NO: 6904 - DNA, 1864 bp, Muscodor strobelii
  misc_feature: SGI EST ID NO. CUFF.17344.1
  misc_feature: Variant of the nucleotide sequence at SEQ ID NO 6902
ctcattgttgcgcgtcgagcttcgatcctctgccacagactctctttctagctctgtcccatcgccaaccgactccctcggagaaatcaaacacggtttagaattgcatctcaggcaggctcagactgcgacgttcagcatggcgtcgtcgtcgcgcaatgggggcgagcaccgctctgttcaccaagacttcatcgctcgcattcgctactccaatgccttgccaccgccgcctcacccgccaaagctcctcgacatccccaacacaggcctagccagcggccagtacactgctcctggctttgcctcgaggctggccagagagcagccactgaacatcgaggctgatgcagagctgggaatgcccctcgacctcgtcggcatgcccaagattttcgatggcgacgagagctctatccaagcacccgcccaacaacctcccctctcctctctccaccctgccgatcgagcccttctccgatccctgaccacactgggcaagcccaagattgcagacgcctccgtctccttcctccgacgcaccgagtatatctcatcagtcacccccaagaagcaggacgccgccaccatgcgcgccgtcaactcagccttcatcaacaggcggcccgtcaagaggaagtctcccgagccagatgtcgactcgcccgcctacgtcaagagaaagatcgaccagagcttctccgtcgctgcccagcagttaaaggacaagaagcgcgtagctcatccttccaagcgcggcctcaagctggtcgagagctaccccgtcctccccgacctcgagtccttccccgattacggtggctacttcaccatcaagttcaccaacaacccggtgtcttcatccgaaacctatgataagcgtctactgaacagcatcatacgcgcatgcccgctagatgaggagaccgagaatgtctacaaccttgccctcaagcaacacgagaaggatcccaccagtatggcccgacccgtcaatccacagtgctacgactactacctcgctgagtccgaggaaacatcggagaaattccgggagcgtttcgatgtgttgaacccggaccacgacgacgaggacctctacaccacgcccgccaccaaagacaggagcgcctacttccagttctcctacgtgcgccgatatgagaccaaggtagaccaagaactgggcataactaataaatatgccgacgagatcatcttcggcttcaacgacgacgagacagcgggtcagaaggctgccttctactcccccgtcatgctgcggactgtcatcagaccgcagcgctccaagacgattcatcgcaatgctggctatgacgagaaggaggataagatccctgatcgactctatgtcacagtagatgatctatccgagagtgctaaggccagaatcgatggattgaaggccaatcctttcaagcctccctttgagggtgacgatgaggaagaggacacgcagggacagagtcagcagaaagctacgaatgggcgtgatgaggatgacgacgacgaagacagggggaatcatcgccaggactcggacgaggatcaggatgctgagggtgatgaggaggactgacgaaggagctaaataagaattcggagagaaagccaggattgtgctgcagacctgcagcggaagttatctacaagttgcatttgaggcgttcaggctagcgaattgatcaacatgtggggttccatgaggagaatagacaggctgtcagtacttggcggactgatctggagttgtaggatagatagcttcagtttattcatatcggaaaatgaatgattgtatagctacgggatccaattcattacagatatttgtgattttttc

SEQ ID NO: 6905 - DNA, 2163 bp, Muscodor strobelii
  misc_feature: SGI cDNA ID NO. 562056
  misc_feature: Elevated expression when VOC is produced
  misc_feature: Encodes the peptide sequence at SEQ ID NO 6906
atggctcgccttggtgttctcatcgtcctggtgacgctcttcgcactcgtctttgcgaacggctgtccctactccaacggcatcacctatcgtgacacatcctccaactctcagacccctctcaccgacgctactgttgacgacagtactggcttcctttctgacgatgtcggtggtcagatcagcgaccaggacagtctccgagctggatcacgtggacctactctccttgaagacttcattttccgtcagaaaatcactcactttgaccacgagcgagttcctgagcgtgctgtccatgctcgaggtgctggagcccatggtaccttcactagctacgcagactggtccaatatcaccgccgcctctttcctaggagccaaaggcaaagagacacctgtctttgtccgcttctctaccgttgctggctcccgaggaagtgctgatacagcacgggatgttcacggctttgccacgcgtttttacactgatgagggcaactttgatattgttggaaacaatatccctgtgagcaatagtcaagatgctatccgcttccccgacttgatccatgcagtcaagccaagtcccgatagcgagattccacaggcagccactgcacatgattcggcttgggacttcttttcgcaacagcccagcactcttcacaccttattctgggctatggctggctttggtattcctcgaagttatcgtcacatggatggtttcggtgtacacactttccgtttagtcaaagacgacggcaggtctcaattcgtcaagtggcattggaagaccaagcagggacgggccagtctatattgggaggaggctcaagttctatctggcaagaatgcggattctcaccgagctgatttattcgacgccatcgcatctggcaattttcccgagtgggagcttgcagcacagattgtcgatgaagaccaagcactcgcattcgggtttgacctacttgatcccacaaagatcattcccgaggaactggcaccgctcaagaaactcggcgtgctgagactgcatactaatcctacaaactacttcgccgaaactgagcagatcatgtttcaacccggacacatcgtaagaggcattgatttcacagaggatcccctacttcaaggacgtatcttctcttatctcgatacccaactcaaccgacacgggggccccaactttgaacagctccccatcaaccgtcctctgatcccaatccacaacaacaatcgtgacggtgccgcgcagaatctcatccacaagaacaccgccgcctactcaccaaacagcctcaacaacggcttcccacgacaggccaaccaaaccgtgggccgaggtttcttcacgactccaggacgcagcgtaacaggcaatctagtccgcggcctatcatcaaccttcgacgaccactggacacagcctcgtctattctacaattcattgaccacagtcgagcaacaattcctcatcaacgcaatacgtttcgagaccagccacatccaatccacagccgtgaagcgaaacgtcttagtccaactgaacaggatcagcaacgacatcgccatacgcgtagcggacgccctaggactccccgctccagccccagacccaacctactaccacaacaacaccacaggtgggatttccatcacgaacaccaccctaccaaccatcgccggtctaaaaatcggcatcctagcaaccgtatccaacacctccctctccctatcccaagcccgtgaactcagcgaccacttcacaacctccaatctcacaccactcatcatcgccgagcgtctaatcacagacgtagaccgcacctactccgcgtccgacgcgacagatttcgacgctttggtcataacctccggcgccgacactgctggactcttcaacatgagcacgacctcgcctctctacccaccgatgcgtccgttgcagatcgcgaactcggcgttcgtcttcggaaaacctatgggatatttcggcggaactacgcccagcgctatgctggctgccgctggctttggctcaggggcgcaggatggtgtttttgtggggagtgatctggatgagattgtgcagcagattgaggatggacttaagacttttaagtttactggtcggtacccacttgacgactga

SEQ ID NO: 6906 - protein, 720 aa, Muscodor strobelii
  misc_feature: SGI Peptide ID NO. 562056
  misc_feature (53)..(441): Pfam Id: PF00199 Pfam Desc: Catalase
  misc_feature (486)..(539): Pfam Id: PF06628 Pfam Desc: Catalase-related
  misc_feature (63)..(441): Pfam Id: PF00199 Pfam Desc: Catalase
  misc_feature (7)..(719): NCBI GI: 46124711 Blast Desc: FG06733.1 [Gibberella zeae PH-1]
  misc_feature (1)..(720): NCBI GI: 171685842 Blast Desc: protein product [Podospora anserina] gi|170942882|emb|CAP68535.1| protein product [Podospora anserina]
  misc_feature (1)..(720): NCBI GI: 12054761 Blast Desc: CATB protein [Podospora anserina]
  misc_feature (22)..(719): NCBI GI: 3157413 Blast Desc: catalase [Claviceps purpurea]
  misc_feature (22)..(719): NCBI GI: 88766403 Blast Desc: catalase [Metarhizium anisopliae]
  misc_feature (7)..(720): NCBI GI: 15022485 Blast Desc: AF243853_1 catalase [Botryotinia fuckeliana]
  misc_feature (22)..(719): NCBI GI: 284009447 Blast Desc: catalase [Metarhizium anisopliae]
  misc_feature (3)..(719): NCBI GI: 85087088 Blast Desc: catalase 3 precursor [Neurospora crassa OR74A] gi|30580366|sp|Q9C169.1|CAT3_NEUCR RecName: Full=Catalase-3; Flags: Precursor gi|13272201|gb|AAK15807.1| Catalase-3 crassa] 3
  misc_feature (7)..(720): NCBI GI: 156061934 Blast Desc: SS1G_01081 [Sclerotinia sclerotiorum 1980] gi|154696419|gb|EDN96157.1| SS1G_01081 [Sclerotinia sclerotiorum 1980]
  misc_feature (36)..(719): NCBI GI: 220702447 Blast Desc: SS1G_01081 [Sclerotinia sclerotiorum 1980] gi|154696419|gb|EDN96157.1| SS1G_01081 [Sclerotinia sclerotiorum 1980]
  misc_feature (3)..(719): SWISSPROT Homolog: EC 1.11.1.6 Catalase
  misc_feature: Useful for introducing or modulating the production of volatile compounds
MARLGVLIVLVTLFALVFANGCPYSNGITYRDTSSNSQTPLTDATVDDSTGFLSDDVGGQISDQDSLRAGSRGPTLLEDFIFRQKITHFDHERVPERAVHARGAGAHGTFTSYADWSNITAASFLGAKGKETPVFVRFSTVAGSRGSADTARDVHGFATRFYTDEGNFDIVGNNIPVSNSQDAIRFPDLIHAVKPSPDSEIPQAATAHDSAWDFFSQQPSTLHTLFWAMAGFGIPRSYRHMDGFGVHTFRLVKDDGRSQFVKWHWKTKQGRASLYWEEAQVLSGKNADSHRADLFDAIASGNFPEWELAAQIVDEDQALAFGFDLLDPTKIIPEELAPLKKLGVLRLHTNPTNYFAETEQIMFQPGHIVRGIDFTEDPLLQGRIFSYLDTQLNRHGGPNFEQLPINRPLIPIHNNNRDGAAQNLIHKNTAAYSPNSLNNGFPRQANQTVGRGFFTTPGRSVTGNLVRGLSSTFDDHWTQPRLFYNSLTTVEQQFLINAIRFETSHIQSTAVKRNVLVQLNRISNDIAIRVADALGLPAPAPDPTYYHNNTTGGISITNTTLPTIAGLKIGILATVSNTSLSLSQARELSDHFTTSNLTPLIIAERLITDVDRTYSASDATDFDALVITSGADTAGLFNMSTTSPLYPPMRPLQIANSAFVFGKPMGYFGGTTPSAMLAAAGFGSGAQDGVFVGSDLDEIVQQIEDGLKTFKFTGRYPLDD

SEQ ID NO: 6907 - DNA, 1931 bp, Muscodor strobelii
  misc_feature: SGI EST ID NO. CUFF.17200.0
  misc_feature: Variant of the nucleotide sequence at SEQ ID NO 6905
tagcttcaacatacccattgactggcgataaatttgcatttactaacagagcaatagtcaagatgctatccgcttccccgacttgatccatgcagtcaagccaagtcccgatagcgagattccacaggcagccactgcacatgattcggcttgggacttcttttcgcaacagcccagcactcttcacaccttattctgggctatggctggctttggtattcctcgaagttatcgtcacatggatggtttcggtgtacacactttccgtttagtcaaagacgacggcaggtctcaattcgtcaagtggcattggaagaccaagcagggacgggccagtctatattgggaggaggctcaagttctatctggcaagaatgcggattctcaccgagctgatttattcgacgccatcgcatctggcaattttcccgagtgggagcttgcagcacagattgtcgatgaagaccaagcactcgcattcgggtttgacctacttgatcccacaaagatcattcccgaggaactggcaccgctcaagaaactcggcgtgctgagactgcatactaatcctacaaactacttcgccgaaactgagcagatcatgtttcaacccggacacatcgtaagaggcattgatttcacagaggatcccctacttcaaggacgtatcttctcttatctcgatacccaactcaaccgacacgggggccccaactttgaacagctccccatcaaccgtcctctgatcccaatccacaacaacaatcgtgacggtgccgcgcagaatctcatccacaagaacaccgccgcctactcaccaaacagcctcaacaacggcttcccacgacaggccaaccaaaccgtgggccgaggtttcttcacgactccaggacgcagcgtaacaggcaatctagtccgcggcctatcatcaaccttcgacgaccactggacacagcctcgtctattctacaattcattgaccacagtcgagcaacaattcctcatcaacgcaatacgtttcgagaccagccacatccaatccacagccgtgaagcgaaacgtcttagtccaactgaacaggatcagcaacgacatcgccatacgcgtagcggacgccctaggactccccgctccagccccagacccaacctactaccacaacaacaccacaggtgggatttccatcacgaacaccaccctaccaaccatcgccggtctaaaaatcggcatcctagcaaccgtatccaacacctccctctccctatcccaagcccgtgaactcagcgaccacttcacaacctccaatctcacaccactcatcatcgccgagcgtctaatcacagacgtagaccgcacctactccgcgtccgacgcgacagatttcgacgctttggtcataacctccggcgccgacactgctggactcttcaacatgagcacgacctcgcctctctacccaccgatgcgtccgttgcagatcgcgaactcggcgttcgtcttcggaaaacctatgggatatttcggcggaactacgcccagcgctatgctggctgccgctggctttggctcaggggcgcaggatggtgtttttgtggggagtgatctggatgagattgtgcagcagattgaggatggacttaagacttttaagtttactggtcggtacccacttgacgactgagctggcgttcaaagacggagtgtggggttggacgatgagaaacagaggatgagtgaataggcagcctggccagataggctagttgctgtagaggattgagtgactcccagtgagagaaaaggcgtctatgaccgactttcaatgcctggtctttgcggcatggtaacgacaacttcaattatgccccgaaagggttacctacataggtatcgatgactaaatagtcaaataaactgcattattatatgaa

SEQ ID NO: 6908 - DNA, 1290 bp, Muscodor strobelii
  misc_feature: SGI cDNA ID NO. 562057
  misc_feature: Reduced expression when VOC is produced
  misc_feature: Encodes the peptide sequence at SEQ ID NO 6909
atggccgacttcctcaaaaatttcatgggcggcaagcctgaggagaaacctgctgccaaggtcgattctgacttcgccgacttcgctgaggcacccgaacccacacctttacctttcgacaccattgctactggtgcgactcctggcggtgctgttcccaccgctgcgccttataccaaatggtacaatatccatgagcgtcacagcatcggcgagttcaagactgaaggaattatcctctccatcatcttcatcatcttcaccttccacatcatcggcgcaaggctgaaccgttccaaggcaaaggcttggatcaaggcccatgccccaatcctccacagcgagtacgccgtcgttggcttcagtggccaacccgttgccgaagatgcccacgataagatgatgaaggagaagagtttgttcgaatttgcctcgtatgcgactggtcgacagaatgtcgccttcatcgacctcaaggtcatgttgataaggcgctttaatcctcttcaactcatcgccgaatacgccactggcttcttcttcgaagcctctcctaccccagaggactccatgggcgcgactatctaccccttcgacggcaaagagtctcaaatcgtccccggtattccaggtgctgctgaactgcgagccaaggacgccaagagctcttttgatgggtttgtctgggccgtcgtgaacaaggacaagatgaagacacttcgcgatgatcgctacgacgtttctatcactttcaccaaggaccatgccaagctgcctcaatgggccacggtcatgagcgaaagcgctgagatcacctcggctctcgtcacagaagagctcgtcaacgccgttatcaaggctggagatcttttcgagtaccttatcattaccgaccaacctgtggacaagcccaagaagatggacgagactgttcctcgcaagcgcatctacctcaagtaccgactcccctcgtcgaataactatgacaacctccttcccctcttctcgtacttcgtgaagcttcctgatcaattggtcgccgtcgcgcatttccgaaacgaagttttgcgaaaagttaagagcgtccgtgacgagaacattaagcagatccagaaggctgctgaagacgagaaggctgaggagcgcgcgttggagcgcgacagagccaagaaggccaagcgtgatgctgagctcagcggtctcgatgccaaggctcagaagaaatacttagaaaaggagaaagagaaggagaagcgcaaagcggccaaaaagcagaccgttcgtggatga

SEQ ID NO: 6909 - protein, 429 aa, Muscodor strobelii
  misc_feature: SGI Peptide ID NO. 562057
  misc_feature (58)..(425): Pfam Id: PF07946 Pfam Desc: Domain of function (DUF1682)
  misc_feature (1)..(429): NCBI GI: 39940104 Blast Desc: MGG_05188 [Magnaporthe grisea 70-15] gi|145010546|gb|EDJ95202.1| MGG_05188 [Magnaporthe grisea 70-15]
  misc_feature (1)..(429): NCBI GI: 164425254 Blast Desc: NCU06200 [Neurospora crassa OR74A] gi|157070852|gb|EAA33680.2| conserved [Neurospora crassa OR74A]
  misc_feature (1)..(429): NCBI GI: 256733198 Blast Desc: NECHADRAFT_68547 [Nectria haematococca mpVI 77-13-4]
  misc_feature (1)..(429): NCBI GI: 46124743 Blast Desc: FG06749.1 [Gibberella zeae PH-1]
  misc_feature (1)..(429): NCBI GI: 156044969 Blast Desc: SS1G_09673 [Sclerotinia sclerotiorum 1980] gi|154694068|gb|EDN93806.1| SS1G_09673 [Sclerotinia sclerotiorum 1980]
  misc_feature (1)..(429): NCBI GI: 154303414 Blast Desc: BC1G_09278 [Botryotinia fuckeliana B05.10] gi|150854589|gb|EDN29781.1| BC1G_09278 [Botryotinia fuckeliana B05.10]
  misc_feature (1)..(429): NCBI GI: 121707549 Blast Desc: DUF1682 domain protein [Aspergillus clavatus NRRL 1] gi|119400019|gb|EAW10445.1| DUF1682 domain protein [Aspergillus clavatus NRRL 1]
  misc_feature (1)..(429): NCBI GI: 169599635 Blast Desc: SNOG_02641 [Phaeosphaeria nodorum SN15] gi|160705282|gb|EAT89372.2| SNOG_02641 [Phaeosphaeria nodorum SN15]
  misc_feature (1)..(429): NCBI GI: 145258490 Blast Desc: An04g07080 [Aspergillus niger] gi|134074676|emb|CAK44708.1| protein product [Aspergillus niger]
  misc_feature (4)..(428): NCBI GI: 238485726 Blast Desc: conserved [Aspergillus flavus NRRL3357] gi|220698980|gb|EED55319.1| conserved [Aspergillus flavus NRRL3357]
  misc_feature: Useful for introducing or modulating the production of volatile compounds
MADFLKNFMGGKPEEKPAAKVDSDFADFAEAPEPTPLPFDTIATGATPGGAVPTAAPYTKWYNIHERHSIGEFKTEGIILSIIFIIFTFHIIGARLNRSKAKAWIKAHAPILHSEYAVVGFSGQPVAEDAHDKMMKEKSLFEFASYATGRQNVAFIDLKVMLIRRFNPLQLIAEYATGFFFEASPTPEDSMGATIYPFDGKESQIVPGIPGAAELRAKDAKSSFDGFVWAVVNKDKMKTLRDDRYDVSITFTKDHAKLPQWATVMSESAEITSALVTEELVNAVIKAGDLFEYLIITDQPVDKPKKMDETVPRKRIYLKYRLPSSNNYDNLLPLFSYFVKLPDQLVAVAHFRNEVLRKVKSVRDENIKQIQKAAEDEKAEERALERDRAKKAKRDAELSGLDAKAQKKYLEKEKEKEKRKAAKKQTVRG

SEQ ID NO: 6910 - DNA, 4235 bp, Muscodor strobelii
  misc_feature: SGI EST ID NO. CUFF.17416.0
  misc_feature: Variant of the nucleotide sequence at SEQ ID NO 6908
ctgacatcgagggccaactgcaggtggtgagacgatttcggactagatccgtagctacccgcctcgcccgctccatatccgtactttattcgagacgaactggtcatgctaaatttcccgattggtgggagtctgcatatgcgttgaacgatggtgacaagcgttgatgctgttcgtcctagtactaggtatgttttctgattcctagactatctctaaatgctctctgataatcatagttatggatatatggtgtatgctcgcccggcacaatacacatgcaatcttcaaaatgccgctcgctacgtatttccaatgcgccaatgtaaaacatgctataatacaactctcatgacgcttgtacagcacttggccgatgtttgcggggcgatcgccgaagagacagatttaagaagctgtgatgcccctcgtccacagtcaagattgagagaatcgacttctcaatctcatctctccctcccatcaactgatcctcatctagccaaccggcctcgacggcgtatcggacgatgtcgcttgcactgtcgaatcctggcaagtctgcggcggtttcagggtcaaggtgagaccagaattctttcgtggcgcgcttgaacatattgacttctttcttcggaccgcggaaattctccaccatccaatcgtataagtaagcaagccatagcacatttgtgtatggttcatgcgtgctccatgagattggcccatcgatgccttgggcataagctttcttgtgactagtagcaggaaggcatacgcgatcgccgcgcaacaagaaggatctcatctgacgatacactcgacattgcgctgcatgctcgcttgtgaagagactgaggtcgcgttccaagtcataggccactggttcagaatcaccaccggcccctgcccgtgataaaccgtaatctagaatggtgatctctagacctgaaaagccaaaatacaccggtcggtctctttcctcttgcgggattggctcgcccacctttcgtatgcagagattgccttcgtggagatctcggtgctcaaactctatgcgcgtctcagcccgcgccaaagctatcgcgacatgaaagaagatgtcccataactggtcggcatacaccagctcgaagtcttcgagcgccgtgcctgcatcacctaactccacgaccagaaatttggtgtcatcaaggtatcgactgggcgacggatagaattgcaaacgatctggatcctgcctcttgagctttttatggaatgattgatgcgtctctaacaactcgcgacatgcttttccctgcacaatgtaccgttccttgtagacgacgaaacctggaatatcagcgacccactcggagatctgcagctcaccatgcagatccgactcttgatgaggctcttcgtctaccagaccggatttctgctgtgtcttggtctgggccttgatgggagactccatgcgaatgaccttgatgatactggttccacgctcattcgtgactcggtagacctctgcataggaggcctcagcgattttgacgattttatcgcctggcggacaaacctcgacccaagacaagacttgcaaatccttgggttcatcctgagtatctggtgacgcttctgatggtggttcaactgtgctctcgtctgtagtgactgatttgggcggtgtagctatcactgcctctagcgtttcgggcggctgaagtgctttgtcttctggtgagtcaagaagagcggattgcctagttctcctccgtctggtaggtaatacaggcgattgatctgaatctgagttggaggtttcgtctttgattttaattgctgaaatgtcttgtaccagatctgagattatgtcatcggcaactttgtcttcgagtatcgactttggcttccgtatgggcgtctgtggcagctcaacgaacagacgtccggcttgagacttggtctgtttgccataaccccgaactgtccttggtttcgacattttgatccggacttgaagaattagggttcaattgcttctttttacatttcagttgttcaatctcgttgtgtttccatgtgtttggtgagtgtcgtggttgaatacctcgtgattgtttacttccgggttagtcatacatgtaaacgagagataaggtaccccagcaacgatgacacctgagccacaccttccccattagcaccagccccggcccctatttcgaggcagctggagccccaaagcacgaatcgcgtggggcttggcgcgtggcaccctggaccccaattcctggatcgccgtgtggcccatcctggtcgtctcatcaattccgtcagcttctgtagtgcgtggtgcgtctccgccgtcgttggtgaattattggggagaaactatgctccaattgcgcctctcatcctcctcatcctccacctcccacctcttttcaaacttcgtcgcgcgtcattagtttgtcgcacgagcgtccgaaaagatggccgacttcctcaaaaatttcatgggcggcaagcctgaggagaaacctgctgccaaggtcgattctgacttcgccgacttcgctgaggcacccgaacccacacctttacctttcgacaccattgctactggtgcgactcctggcggtgctgttcccaccgctgcgccttataccaaatggtacaatatccatgagcgtcacagcatcggcgagttcaagactgaaggaattatcctctccatcatcttcatcatcttcaccttccacatcatcggcgcaaggctgaaccgttccaaggcaaaggcttggatcaaggcccatgccccaatcctccacagcgagtacgccgtcgttggcttcagtggccaacccgttgccgaagatgcccacgataagatgatgaaggagaagagtttgttcgaatttgcctcgtatgcgactggtcgacagaatgtcgccttcatcgacctcaaggtcatgttgataaggcgctttaatcctcttcaactcatcgccgaatacgccactggcttcttcttcgaagcctctcctaccccagaggactccatgggcgcgactatctaccccttcgacggcaaagagtctcaaatcgtccccggtattccaggtgctgctgaactgcgagccaaggacgccaagagctcttttgatgggtttgtctgggccgtcgtgaacaaggacaagatgaagacacttcgcgatgatcgctacgacgtttctatcactttcaccaaggaccatgccaagctgcctcaatgggccacggtcatgagcgaaagcgctgagatcacctcggctctcgtcacagaagagctcgtcaacgccgttatcaaggctggagatcttttcgagtaccttatcattaccgaccaacctgtggacaagcccaagaagatggacgagactgttcctcgcaagcgcatctacctcaagtaccgactcccctcgtcgaataactatgacaacctccttcccctcttctcgtacttcgtgaagcttcctgatcaattggtcgccgtcgcgcatttccgaaacgaagttttgcgaaaagttaagagcgtccgtgacgagaacattaagcagatccagaaggctgctgaagacgagaaggctgaggagcgcgcgttggagcgcgacagagccaagaaggccaagcgtgatgctgagctcagcggtctcgatgccaaggctcagaagaaatacttagaaaaggagaaagagaaggagaagcgcaaagcggccaaaaagcagaccgttcgtggatgatctgactcactcttttgttgattatgtgataggctagaatcgttcatatacaatcctaattcgcggcatgggagttggcaaaaagcggagggttggtggttaacgggatggtcgaagaaaaaaatcatatataccgagggaccggaaaaggtacttgtgactgatcacggtccggcatgcgacgatgctgtggaggtgcgatagccacggaattctattgtaggataattactattttaaaaagtacaaaatatcttccgtgcatacgtctctaccttgattcatctaatgtacatctttatgtatcagtcccatgcgctgtggtcatttacgatgtcgacttagccaacagattctcgatacgcttcactttgtccgccgctgtctgcttcttgtctgttctattaggtagtcagtagagaatcaaaagcgatgttgcagctagtgagaagaatcgatacg

SEQ ID NO: 6911 - DNA, 342 bp, Muscodor strobelii
  misc_feature: SGI cDNA ID NO. 562058
  misc_feature: Encodes the peptide sequence at SEQ ID NO 6912
atggactactccagcatcccaacaccggagagatgctatgcggatttctgcttgatacctgtcgggacaggtaccgtatcagtcgcagaagaaatagccgaagtgcagaagctcctcaaagccagcggtcttacttgcactatgcattctgcgggtacaactgttgagggctcctgggacgaagtcatgaaagtaatcgggcaagcacacagcgtcgtacacgcaaaaggcgtcgtaagagtccagacatcgatgcgtgtcggaacgagaacagacaagaagcagacagcggcggacaaagtgaagcgtatcgagaatctgttggctaagtcgacatcgtaa

SEQ ID NO: 6912 - protein, 113 aa, Muscodor strobelii
  misc_feature: SGI Peptide ID NO. 562058
  misc_feature (12)..(105): Pfam Id: PF01910 Pfam Desc: Domain of function DUF77
  misc_feature (1)..(109): NCBI GI: 46124707 Blast Desc: FG06731.1 [Gibberella zeae PH-1]
  misc_feature (2)..(113): NCBI GI: 261360391 Blast Desc: conserved [Verticillium albo-atrum VaMs.102]
  misc_feature (2)..(112): NCBI GI: 116207372 Blast Desc: CHGG_02979 [Chaetomium globosum CBS 148.51] gi|88183576|gb|EAQ91044.1| CHGG_02979 [Chaetomium globosum CBS 148.51]
  misc_feature (2)..(110): NCBI GI: 85109439 Blast Desc: NCU06201 [Neurospora crassa OR74A] gi|28924561|gb|EAA33681.1| conserved [Neurospora crassa OR74A]
  misc_feature (1)..(111): NCBI GI: 39940106 Blast Desc: MGG_05187 [Magnaporthe grisea 70-15] gi|145010547|gb|EDJ95203.1| MGG_05187 [Magnaporthe grisea 70-15]
  misc_feature (4)..(109): NCBI GI: 171685838 Blast Desc: protein product [Podospora anserina] gi|170942880|emb|CAP68533.1| protein product [Podospora anserina]
  misc_feature (2)..(109): NCBI GI: 156033021 Blast Desc: SS1G_13586 [Sclerotinia sclerotiorum 1980] gi|154698989|gb|EDN98727.1| SS1G_13586 [Sclerotinia sclerotiorum 1980]
  misc_feature (4)..(108): NCBI GI: 189188706 Blast Desc: conserved [Pyrenophora tritici-repentis Pt-1C-BFP] gi|187972298|gb|EDU39797.1| conserved [Pyrenophora tritici-repentis Pt-1C-BFP]
  misc_feature (2)..(110): NCBI GI: 169771693 Blast Desc: [Aspergillus oryzae RIB40] gi|83768175|dbj|BAE58314.1| protein product [Aspergillus oryzae]
  misc_feature (2)..(110): NCBI GI: 121707533 Blast Desc: cell wall biogenesis protein Ecm15, [Aspergillus clavatus NRRL 1] gi|119400014|gb|EAW10440.1| cell wall biogenesis protein Ecm15, [Aspergillus clavatus NRRL 1]
MDYSSIPTPERCYADFCLIPVGTGTVSVAEEIAEVQKLLKASGLTCTMHSAGTTVEGSWDEVMKVIGQAHSVVHAKGVVRVQTSMRVGTRTDKKQTAADKVKRIENLLAKSTS

SEQ ID NO: 6913 - DNA, 1222 bp, Muscodor strobelii
  misc_feature: SGI EST ID NO. CUFF.17417.1
  misc_feature: Variant of the nucleotide sequence at SEQ ID NO 6911
gaattatgaccatagtagcttcactttgcgattcaacctcccacctttatcaacgacaatgtccttactcatattgcttccaaatcgcttcaatcgtctaccccgttatataataccaacctctagctttcacttcaaatctccgtcgtcgagactcctgagcaccagcttcagaatggactactccagcatcccaacaccggagagatgctatgcggatttctgcttgatacctgtcgggacaggtaccgtatcagtcgcagaagaaatagccgaagtgcagaagctcctcaaagccagcggtcttacttgcactatgcattctgcgggtacaactgttgagggctcctgggacgaagtcatgaaagtaatcgggcaagcacacagcgtcgtacacgcaaaaggcgtcgtaagagtccagacatcgatgcgtgtcggaacgagaacagacaagaagcagacagcggcggacaaagtgaagcgtatcgagaatctgttggctaagtcgacatcgtaaatgaccacagcgcatgggactgatacataaagatgtacattagatgaatcaaggtagagacgtatgcacggaagatattttgtactttttaaaatagtaattatcctacaatagaattccgtggctatcgcacctccacagcatcgtcgcatgccggaccgtgatcagtcacaagtaccttttccggtccctcggtatatatgatttttttcttcgaccatcccgttaaccaccaaccctccgctttttgccaactcccatgccgcgaattaggattgtatatgaacgattctagcctatcacataatcaacaaaagagtgagtcagatcatccacgaacggtctgctttttggccgctttgcgcttctccttctctttctccttttctaagtatttcttctgagccttggcatcgagaccgctgagctcagcatcacgcttggccttcttggctctgtcgcgctccaacgcgcgctcctcagccttctcgtcttcagcagccttctggatctgcttaatgttctcgtcacggacgctcttaacttttcgcaaaacttcgtttcggaaatgcgcgacggcgaccaattgatcaggaagcttcacgaagtacgagaagaggggaaggaggttgtcatagttattcgacgaggggagtcggtacttgaggtagatgcgcttgcgaggaacagtctcgtccatcctat

SEQ ID NO: 6914 - DNA, 1146 bp, Muscodor strobelii
  misc_feature: SGI cDNA ID NO. 562059
  misc_feature: Reduced expression when VOC is produced
  misc_feature: Encodes the peptide sequence at SEQ ID NO 6915
atgagaccctccttacacacgtatctaacggccgctgctgcaatagcgagcacagcctatgcgaatccgcagaacaataatgcattcacaacggtgacaactgcaacgccagtatcatcaacgacagcatcgacggcaaaagcagcagcaacaacaacagcttgtaacaactcaccagatctatgtaatcgatcttacagtaatataacacatatgggagctcatgattcgagttttctccgggatgccagcaccgataattcaatcgccggcactcaatattataacgctacgatagcattagatgctggcatacgattactccaggcgcaagttcatgacctgaatggaaccgttgagctatgtcacactttgtgcagtttgctggacgctgggccactagagacttggcttgctgagatacgatattggatggacaataacccaaatgaagttgtgacgttgcttctagtcaattcagacaacttcaatgcttcgacattcggatcggtattcgaggcatctgggatctcaaaatacggatatacaccgacaggaacgagtgattggccgacgttgcagtccatgatcagcaacaacacgcgcttggtgtcattcatcgcttccgttgacaccgatagcgcgtatccgtatctattacccgaattcgactatgtcttcgagaccgcgtatcaagtcacgtctctatcaggattcaactgcacactggaccgcccatcgacgcagagctctgcgacatctgcgatatccgccggactgttaccgctcatgaatcacttcgcatacgtagccctcacggcctcgatcttggttcctgactccggcgacgtcgccacgacgaacagcccatcgactactacgaccggagcgctcggtttgcatgctcagaattgtcgcacgagctggggtactaagccgatttacattttagtcgattactggaatatggggcctgctatcaatacggctgatactttgaatggtatcacggccgtcgggcggataaactctacagctacaaatacgacctctgcaatgaacaatgctgagcgaagccgtggtgcaactgggtttggaactggtgcgctgattgcgtttattgcggccgcagtgttgttagcataa

SEQ ID NO: 6915 - protein, 381 aa, Muscodor strobelii
  misc_feature: SGI Peptide ID NO. 562059
  misc_feature (28)..(380): NCBI GI: 85081803 Blast Desc: NCU00473 [Neurospora crassa OR74A] gi|28917869|gb|EAA27556.1| conserved [Neurospora crassa OR74A]
  misc_feature (1)..(380): NCBI GI: 261360362 Blast Desc: conserved [Verticillium albo-atrum VaMs.102]
  misc_feature (51)..(343): NCBI GI: 154301455 Blast Desc: BC1G_10397 [Botryotinia fuckeliana B05.10] gi|150856137|gb|EDN31329.1| BC1G_10397 [Botryotinia fuckeliana B05.10]
  misc_feature (5)..(347): NCBI GI: 156033027 Blast Desc: SS1G_13589 [Sclerotinia sclerotiorum 1980] gi|154698992|gb|EDN98730.1| SS1G_13589 [Sclerotinia sclerotiorum 1980]
  misc_feature (55)..(380): NCBI GI: 256732740 Blast Desc: NECHADRAFT_104164 [Nectria haematococca mpVI 77-13-4]
  misc_feature (53)..(341): NCBI GI: 171686186 Blast Desc: protein product [Podospora anserina] gi|170943054|emb|CAP68707.1| protein product [Podospora anserina]
  misc_feature (54)..(380): NCBI GI: 46124705 Blast Desc: FG06730.1 [Gibberella zeae PH-1]
  misc_feature (41)..(346): NCBI GI: 67522797 Blast Desc: AN1855.2 [Aspergillus nidulans FGSC A4] gi|40745864|gb|EAA65020.1| AN1855.2 [Aspergillus nidulans FGSC A4] gi|259487207|tpe|CBF85697.1| TPA: conserved [Aspergillus FGSC
  misc_feature (53)..(358): NCBI GI: 121707530 Blast Desc: conserved [Aspergillus clavatus NRRL 1] gi|119400013|gb|EAW10439.1| conserved [Aspergillus clavatus NRRL 1]
  misc_feature (53)..(352): NCBI GI: 238485720 Blast Desc: conserved [Aspergillus flavus NRRL3357] gi|220698977|gb|EED55316.1| conserved [Aspergillus flavus NRRL3357]
  misc_feature: Useful for introducing or modulating the production of volatile compounds
MRPSLHTYLTAAAAIASTAYANPQNNNAFTTVTTATPVSSTTASTAKAAATTTACNNSPDLCNRSYSNITHMGAHDSSFLRDASTDNSIAGTQYYNATIALDAGIRLLQAQVHDLNGTVELCHTLCSLLDAGPLETWLAEIRYWMDNNPNEVVTLLLVNSDNFNASTFGSVFEASGISKYGYTPTGTSDWPTLQSMISNNTRLVSFIASVDTDSAYPYLLPEFDYVFETAYQVTSLSGFNCTLDRPSTQSSATSAISAGLLPLMNHFAYVALTASILVPDSGDVATTNSPSTTTTGALGLHAQNCRTSWGTKPIYILVDYWNMGPAINTADTLNGITAVGRINSTATNTTSAMNNAERSRGATGFGTGALIAFIAAAVLLA

SEQ ID NO: 6916 - DNA, 1724 bp, Muscodor strobelii
  misc_feature: SGI EST ID NO. CUFF.17420.0
  misc_feature: Variant of the nucleotide sequence at SEQ ID NO 6914
cgccacccgaagcaacccacatgccacgccagctggtgtatgagagtggtcgatcttacgtacggcactggcgctgatgcttcagcctccgccatgtcctcgttatgatcctaattaaaatagactgaacgtcgtcataaacgtcgctcccatagaattgctaaaacatttgtttactcttattccataatctcactgacactcgctctcaattttgcttctcgtgtcttattgtctttcttctgtattgtgtctcgtgtagattattgtattgcaacttgaattgcttctataccacacatccaacagcacaatgagaccctccttacacacgtatctaacggccgctgctgcaatagcgagcacagcctatgcgaatccgcagaacaataatgcattcacaacggtgacaactgcaacgccagtatcatcaacgacagcatcgacggcaaaagcagcagcaacaacaacagcttgtaacaactcaccagatctatgtaatcgatcttacagtaatataacacatatgggagctcatgattcgagttttctccgggatgccagcaccgataattcaatcgccggcactcaatattataacgctacgatagcattagatgctggcatacgattactccaggcgcaagttcatgacctgaatggaaccgttgagctatgtcacactttgtgcagtttgctggacgctgggccactagagacttggcttgctgagatacgatattggatggacaataacccaaatgaagttgtgacgttgcttctagtcaattcagacaacttcaatgcttcgacattcggatcggtattcgaggcatctgggatctcaaaatacggatatacaccgacaggaacgagtgattggccgacgttgcagtccatgatcagcaacaacacgcgcttggtgtcattcatcgcttccgttgacaccgatagcgcgtatccgtatctattacccgaattcgactatgtcttcgagaccgcgtatcaagtcacgtctctatcaggattcaactgcacactggaccgcccatcgacgcagagctctgcgacatctgcgatatccgccggactgttaccgctcatgaatcacttcgcatacgtagccctcacggcctcgatcttggttcctgactccggcgacgtcgccacgacgaacagcccatcgactactacgaccggagcgctcggtttgcatgctcagaattgtcgcacgagctggggtactaagccgatttacattttagtcgattactggaatatggggcctgctatcaatacggctgatactttgaatggtatcacggccgtcgggcggataaactctacagctacaaatacgacctctgcaatgaacaatgctgagcgaagccgtggtgcaactgggtttggaactggtgcgctgattgcgtttattgcggccgcagtgttgttagcataattcgcctcaagggatagggatatggacttacgagtctcggctttttgcattcaggtttctgttttttgcatagttcctagaggtatgcccagttacacaggatttagggagcatagcgatggcgtttgatctttttgaaatatagggagtttaccgacaggcggccaatgtcttgaaaaccgggataggctagtgtctggatcataactttagcatatcgacatcctaattgaagaagaaacaaattgtttctccaaataacggc

SEQ ID NO: 6917 - DNA, 1482 bp, Muscodor strobelii
  misc_feature: SGI cDNA ID NO. 562060
  misc_feature: Reduced expression when VOC is produced
  misc_feature: Encodes the peptide sequence at SEQ ID NO 6918
atgccggtcgactacagcaagtgggacaatctcgagctcagtgatgactccgacatcgaggtccaccctaacgtcgacaagcgatccttcattcgtgccaagcagaaccagatccacgccgagcgccaacagcgcaagctccagatcgagacgctgaagtacgagagccagatcaacgatgctttgatcaagcgcatatccgggctcttgactgccctcaaagccaatgctgccgaagcagaggccaacctggccgaggctgcatttcgcgctgtcatggagtccgctggcagtcccgaggacgataccccacccccgcgacccgagggagtccatgccaacgcagagcagccccctacttacaccaagatgatggctacgctgctagaccaggtgaaccaagccctgaacgagaagaagcccgagaatcgctacgccgcaatggtcgacgaaatacaagaccaccttaacaaagtcgaggatctacagaagcagctgttcgtaaagctcgccgagctggaaaaggaggaaggccgcaagatcaccagcgaaagcattcacacgggcttcaatagttcacatgtggccaaggctacgccctccacgtcgatcgacaagaagactgagggcaagccggaactactgaaccccaatttctctatgaacgccgacaaatcaaaagccacaccatcagcgagcactgacgaagacgacgatgatgactacgagatctccgcagacggacgcaagtttggcaacatcaaggctgataattatgcggagagttacgccttcctttcatcacaccctcatatgctgtcgaagaaggaagaaaatggcctcatgatcatggctctcgatcgccaatcagaatatcagctagagaacaaggatgaccccaagaaattagagcgtgaggattctgttacgaagaattacattcaccaggcaaagctgctgcagttttgccagttgctcggcagagatggtgtttcccttttcttcaagcgcatcaccacgaaagaccacaaagctcgagaagcactcgatagcgaggttaacgagacgtaccaacaaattaaagcaagcgcgagaagaatcaacgaccaacgcgcgcagagctcgggcgaagatgtcgagcaaatccagctgcatgctgtagagcccggcactgagatcaagatcctgatacctgccaaggatagcgaggatgaagatgagaagcgtggcagagagatattcgagggtttcgcgcccgatatgcgggccgctctcgagacgggcagcctagacaaagttaatgaagtcctgggtagaatgaaagttccagatgccgaggaagtcgttagtctcttaagcgaggctggcatcttgagtatggaagaacaaattatcgatgctacaacggaggagggcaagcaaaagatcaaggacatggaggaacaagctgcgatggagtcttacacagatgatcccgaatag

SEQ ID NO: 6918 - protein, 493 aa, Muscodor strobelii
  misc_feature: SGI Peptide ID NO. 562060
  misc_feature (394)..(491): Pfam Id: PF08564 Pfam Desc: Cdc37 C terminal domain
  misc_feature (196)..(379): Pfam Id: PF08565 Pfam Desc: Cdc37 Hsp90 binding domain
  misc_feature (2)..(193): Pfam Id: PF03234 Pfam Desc: Cdc37 N terminal kinase binding
  misc_feature (1)..(492): NCBI GI: 116207746 Blast Desc: CHGG_03166 [Chaetomium globosum CBS 148.51] gi|88183763|gb|EAQ91231.1| CHGG_03166 [Chaetomium globosum CBS 148.51]
  misc_feature (1)..(493): NCBI GI: 46124703 Blast Desc: FG06729.1 [Gibberella zeae PH-1]
  misc_feature (1)..(484): NCBI GI: 256732739 Blast Desc: NECHADRAFT_39137 [Nectria haematococca mpVI 77-13-4]
  misc_feature (1)..(492): NCBI GI: 85081799 Blast Desc: NCU00472 [Neurospora crassa OR74A] gi|28917868|gb|EAA27555.1| NCU00472 [Neurospora crassa OR74A]
  misc_feature (1)..(479): NCBI GI: 171686232 Blast Desc: protein product [Podospora anserina] gi|170943077|emb|CAP68730.1| protein product [Podospora anserina]
  misc_feature (1)..(493): NCBI GI: 154301389 Blast Desc: BC1G_10364 [Botryotinia fuckeliana B05.10] gi|150856104|gb|EDN31296.1| BC1G_10364 [Botryotinia fuckeliana B05.10]
  misc_feature (1)..(493): NCBI GI: 156033069 Blast Desc: SS1G_13610 [Sclerotinia sclerotiorum 1980] gi|154699013|gb|EDN98751.1| SS1G_13610 [Sclerotinia sclerotiorum 1980]
  misc_feature (41)..(493): NCBI GI: 145602346 Blast Desc: MGG_04990 [Magnaporthe grisea 70-15] gi|145010770|gb|EDJ95426.1| MGG_04990 [Magnaporthe grisea 70-15]
  misc_feature (1)..(480): NCBI GI: 67523189 Blast Desc: AN2051.2 [Aspergillus nidulans FGSC A4] gi|40745727|gb|EAA64883.1| AN2051.2 [Aspergillus nidulans FGSC A4] gi|259487419|tpe|CBF86082.1| TPA: essential Hsp90p (Eurofung)
  misc_feature (1)..(491): NCBI GI: 70993956 Blast Desc: Hsp90 co-chaperone Cdc37 [Aspergillus fumigatus Af293] gi|66849459|gb|EAL89787.1| Hsp90 co-chaperone Cdc37 [Aspergillus fumigatus Af293] gi|159125257|gb|EDP50374.1| Hsp90 co-chaperone
  misc_feature: Useful for introducing or modulating the production of volatile compounds
MPVDYSKWDNLELSDDSDIEVHPNVDKRSFIRAKQNQIHAERQQRKLQIETLKYESQINDALIKRISGLLTALKANAAEAEANLAEAAFRAVMESAGSPEDDTPPPRPEGVHANAEQPPTYTKMMATLLDQVNQALNEKKPENRYAAMVDEIQDHLNKVEDLQKQLFVKLAELEKEEGRKITSESIHTGFNSSHVAKATPSTSIDKKTEGKPELLNPNFSMNADKSKATPSASTDEDDDDDYEISADGRKFGNIKADNYAESYAFLSSHPHMLSKKEENGLMIMALDRQSEYQLENKDDPKKLEREDSVTKNYIHQAKLLQFCQLLGRDGVSLFFKRITTKDHKAREALDSEVNETYQQIKASARRINDQRAQSSGEDVEQIQLHAVEPGTEIKILIPAKDSEDEDEKRGREIFEGFAPDMRAALETGSLDKVNEVLGRMKVPDAEEVVSLLSEAGILSMEEQIIDATTEEGKQKIKDMEEQAAMESYTDDPE

SEQ ID NO: 6919 - DNA, 2609 bp, Muscodor strobelii
  misc_feature: SGI EST ID NO. CUFF.17227.0
  misc_feature: Variant of the nucleotide sequence at SEQ ID NO 6917
ttgggactatattctgttttttcattcttttctggacagttgcaagtaatgacatagaatgcaatgatgtcagcataatacacgcataaaataccggataactttaaatgcaactcatagaagatcgcaggccaggctcaaggcaggcacgtgcgttatcaaccaagataattgaatcacctagcaacagcaaccatcagtcctcgtgacctagtggttcggccgtgtactctcttccatgaagttgtgggttcgatccccatgcgtgccacatattgagtgtcgttgacctggtccctacattcgtagccttgccgctcgccaacttatgactcagttgcctcacgcccggcctgttttttttttttcctttctcacctcataaaaggccttgtatctacgtacgcagatgcgcaatagacaaaacgggtttcaacggtataaatttcagcaatagtggtcgcattccatagcccgacagttgattgtcgtaggcaggaaacagtagtacagtatggaagcatgtatcgataaagcgtaagactgacattgacatggtggaaggtggcggggcaatctggaagctgctagacaggaaggaccaccccgcactagcaacgcgatttaccctgtcaccctcggtgcctccaagcaacgattcaactcgacctccaagtttagcattttgaacactgcagtattcacattataccctactacttatgcgagaactcttactactgttgcagtgcatccgtctataatatctccagcttaagggccgagtcaatatgccggtcgactacagcaagtgggacaatctcgagctcagtgatgactccgacatcgaggtccaccctaacgtcgacaagcgatccttcattcgtgccaagcagaaccagatccacgccgagcgccaacagcgcaagctccagatcgagacgctgaagtacgagagccagatcaacgatgctttgatcaagcgcatatccgggctcttgactgccctcaaagccaatgctgccgaagcagaggccaacctggccgaggctgcatttcgcgctgtcatggagtccgctggcagtcccgaggacgataccccacccccgcgacccgagggagtccatgccaacgcagagcagccccctacttacaccaagatgatggctacgctgctagaccaggtgaaccaagccctgaacgagaagaagcccgagaatcgctacgccgcaatggtcgacgaaatacaagaccaccttaacaaagtcgaggatctacagaagcagctgttcgtaaagctcgccgagctggaaaaggaggaaggccgcaagatcaccagcgaaagcattcacacgggcttcaatagttcacatgtggccaaggctacgccctccacgtcgatcgacaagaagactgagggcaagccggaactactgaaccccaatttctctatgaacgccgacaaatcaaaagccacaccatcagcgagcactgacgaagacgacgatgatgactacgagatctccgcagacggacgcaagtttggcaacatcaaggctgataattatgcggagagttacgccttcctttcatcacaccctcatatgctgtcgaagaaggaagaaaatggcctcatgatcatggctctcgatcgccaatcagaatatcagctagagaacaaggatgaccccaagaaattagagcgtgaggattctgttacgaagaattacattcaccaggcaaagctgctgcagttttgccagttgctcggcagagatggtgtttcccttttcttcaagcgcatcaccacgaaagaccacaaagctcgagaagcactcgatagcgaggttaacgagacgtaccaacaaattaaagcaagcgcgagaagaatcaacgaccaacgcgcgcagagctcgggcgaagatgtcgagcaaatccagctgcatgctgtagagcccggcactgagatcaagatcctgatacctgccaaggatagcgaggatgaagatgagaagcgtggcagagagatattcgagggtttcgcgcccgatatgcgggccgctctcgagacgggcagcctagacaaagttaatgaagtcctgggtagaatgaaagttccagatgccgaggaagtcgttagtctcttaagcgaggctggcatcttgagtatggaagaacaaattatcgatgctacaacggaggagggcaagcaaaagatcaaggacatggaggaacaagctgcgatggagtcttacacagatgatcccgaatagtcaaaagacgatgatattttcagcaacaagggatcacatggcttggcataactaaagagagcaagggattcggttacgcaagcatcgccgtcttatgcaagttcagatttgtactgacaaaaagcactgtagatagtcaaagtcttagataagtttgatcatgtctaagtgatctttcacttccggccacagctcgccgtacattagacccggaacataagccggagctacaactcgaaatttatctccaataggccgtagtacaacaggatggtctaatcctgctaatagatatataagatcgccctcttggcaagtacggtaagcgagcccgag

SEQ ID NO: 6920 - DNA, 2307 bp, Muscodor strobelii
  misc_feature: SGI cDNA ID NO. 562061
  misc_feature: Elevated expression when VOC is produced
  misc_feature: Encodes the peptide sequence at SEQ ID NO 6921
atggaaaatagtcaagtttatctgggcgtatggacaaattactcgaaagggaaaatcttaggcgtaacacttacaacgacgcaacagcaaggcgctcttttaattgcctttactgctttccttattccatttgtggcatcgaggttctggaaattattatgtatatttcttcatcaaatttactcaaccacggaacctcgcaatgctattcatcatcaacgccaggtcatccttcgaaactcatcgtcgcctgattctggcctggcgacattacttcagatgctatggacttggcagcggttcggtgctcgaaaagacgtacttacaagtatcatgccgattattttctacgcattcagttgtatattaatatttagctctgccggcggactctcttcgcagatctcgatttctgcaggcaaagaagtcctcctgaagggtcaggattgcggaattccacaggttctgtcattcggccagctcccatcaatagcggacgagcggaacacattgggtgatgcggccaattatgcccaacaatgctacaatccgaacggctccagcattctaagctgcaacacctttgttactaaaactttaccgactgtgtcgtttcagtacgatgcgcactgtccttttgaggctggtatctgccgaggaaacaatactgcggtccattttgacactggatacgttcacagtaaccatgatcttggtttcaacttaccattagacgaggcatttgcatatcgacaagtcgcaacatgcgcgccccttatcaccgaaggccatacaaccaacttttatatcgggaatatttcatccgtgcgatatgactatggcggttttgtaagcaaaaaaaatggaattaggaactacacctacgagtcggtagatttagcgacccagtacttggccaacaatttccatggggtcgctgttcctccatataactacttgttagccatacttgtttctttaacatttcaaggtgagcctgtaatagggacaggcttttttatcccgagctctagcatctcacgtgaagatggggacgtctcgattatattcttgtctgggaatggtgtcctgttttctggtacaccaatggatgacgagtggtatcgagccaccaagccagcagtgaatgttagtggctcaggacttttgaatcaaacagtgatgacatatcaggctacagaagcagcaagcccattgggatgcgtacagcaatatcaatggtgtaatggagagcatccaaacgtcaataattgcggacctcttgcgagcttttacgatgcagcttacggcgcggccgctatgttcaacttgactaaagaagatttagatccttcgaggccgtcttcggaaacagctactggaacgcggttcatctggccgtggcttattgtgtcaactccggccaacgatatcactaccgtactgggctctttaggggctcagtccctagcatctcaaagcgtcctagattctggatttcaatacccattacctaaaaatcaatggcaaatcgatgtcacaaagtggtggaacttgtcgctggctagcacacaatacgcctttattaaaacagcattagggacagccccggccaaatggccaccactcaatgacgaagagcgaaagctatgtcgtagccagaaaattctgagcagcggatactcctcgttcaatcttttcgcactactctttacctacatcgtaagcggggtgataataacgttctctttcatcactgaaccaattcttggttatctttctcgacgccggaaaattaaagagtacgagtatctggaatggacggccaacgagtctttgcaacttcatcgcctggcgcaagaggagagaggaccggaagagtggtttggtggttcggacaagatcccaaccacttcagtggataacatgcttgcacatctcgacatcagcaactcgcaacatcccatcttatctcgccaccagctcgggatgtctacaacgggagagaccaagcctgaaggtagtcagacaggagaggatcagcgacccgacacgatgatgagctcaaatggcgaaacaaatgctgccaattctgttacgacaatacatgcaaaccatgacagcgactgccatgctgaaagtagccacccgggagagaacgagccagccagcaagctcatcagctctcatggcggatcgaacactgtcaactctatcgtaacagtcctacaggacgacgatagcgaagaccatcgtgagaatacccaacgggaccactcgcgaaatatgtggatggcagtggactag

SEQ ID NO: 6921 - protein, 768 aa, Muscodor strobelii
  misc_feature: SGI Peptide ID NO. 562061
  misc_feature (3)..(738): NCBI GI: 169615058 Blast Desc: SNOG_10683 [Phaeosphaeria nodorum SN15] gi|111060957|gb|EAT82077.1| SNOG_10683 [Phaeosphaeria nodorum SN15]
  misc_feature (2)..(657): NCBI GI: 189194015 Blast Desc: conserved [Pyrenophora tritici-repentis Pt-1C-BFP] gi|187978910|gb|EDU45536.1| conserved [Pyrenophora tritici-repentis Pt-1C-BFP]
  misc_feature (6)..(660): NCBI GI: 115399382 Blast Desc: [Aspergillus terreus NIH2624] gi|114192163|gb|EAU33863.1| [Aspergillus terreus NIH2624]
  misc_feature (6)..(638): NCBI GI: 70986226 Blast Desc: conserved [Aspergillus fumigatus Af293] gi|66846236|gb|EAL86569.1| conserved [Aspergillus fumigatus Af293]
  misc_feature (6)..(638): NCBI GI: 159128250 Blast Desc: conserved [Aspergillus fumigatus A1163]
  misc_feature (6)..(662): NCBI GI: 119474227 Blast Desc: NFIA_004500 [Neosartorya fischeri NRRL 181] gi|119407142|gb|EAW17092.1| conserved [Neosartorya fischeri NRRL 181]
  misc_feature (6)..(640): NCBI GI: 169772941 Blast Desc: [Aspergillus oryzae RIB40] gi|83768800|dbj|BAE58937.1| protein product [Aspergillus oryzae]
  misc_feature (5)..(624): NCBI GI: 121699395 Blast Desc: ACLA_082720 [Aspergillus clavatus NRRL 1] gi|119396149|gb|EAW06581.1| ACLA_082720 [Aspergillus clavatus NRRL 1]
  misc_feature (4)..(624): NCBI GI: 169618215 Blast Desc: SNOG_12297 [Phaeosphaeria nodorum SN15] gi|160703576|gb|EAT80110.2| SNOG_12297 [Phaeosphaeria nodorum SN15]
  misc_feature (5)..(435): NCBI GI: 115433432 Blast Desc: [Aspergillus terreus NIH2624] gi|114189705|gb|EAU31405.1| [Aspergillus terreus NIH2624]
  misc_feature: Useful for introducing or modulating the production of volatile compounds
MENSQVYLGVWTNYSKGKILGVTLTTTQQQGALLIAFTAFLIPFVASRFWKLLCIFLHQIYSTTEPRNAIHHQRQVILRNSSSPDSGLATLLQMLWTWQRFGARKDVLTSIMPIIFYAFSCILIFSSAGGLSSQISISAGKEVLLKGQDCGIPQVLSFGQLPSIADERNTLGDAANYAQQCYNPNGSSILSCNTFVTKTLPTVSFQYDAHCPFEAGICRGNNTAVHFDTGYVHSNHDLGFNLPLDEAFAYRQVATCAPLITEGHTTNFYIGNISSVRYDYGGFVSKKNGIRNYTYESVDLATQYLANNFHGVAVPPYNYLLAILVSLTFQGEPVIGTGFFIPSSSISREDGDVSIIFLSGNGVLFSGTPMDDEWYRATKPAVNVSGSGLLNQTVMTYQATEAASPLGCVQQYQWCNGEHPNVNNCGPLASFYDAAYGAAAMFNLTKEDLDPSRPSSETATGTRFIWPWLIVSTPANDITTVLGSLGAQSLASQSVLDSGFQYPLPKNQWQIDVTKWWNLSLASTQYAFIKTALGTAPAKWPPLNDEERKLCRSQKILSSGYSSFNLFALLFTYIVSGVIITFSFITEPILGYLSRRRKIKEYEYLEWTANESLQLHRLAQEERGPEEWFGGSDKIPTTSVDNMLAHLDISNSQHPILSRHQLGMSTTGETKPEGSQTGEDQRPDTMMSSNGETNAANSVTTIHANHDSDCHAESSHPGENEPASKLISSHGGSNTVNSIVTVLQDDDSEDHRENTQRDHSRNMWMAVD

SEQ ID NO: 6922 - DNA, 2593 bp, Muscodor strobelii
  misc_feature: SGI EST ID NO. CUFF.17238.0
  misc_feature: Variant of the nucleotide sequence at SEQ ID NO 6920
tttcacttctacctatatccgctacttggccttgacaaattttcctcgaagatggaaaatagtcaagtttatctgggcgtatggacaaattactcgaaagggaaaatcttaggcgtaacacttacaacgacgcaacagcaaggcgctcttttaattgcctttactgctttccttattccatttgtggcatcgaggttctggaaattattatgtatatttcttcatcaaatttactcaaccacggaacctcgcaatgctattcatcatcaacgccaggtcatccttcgaaactcatcgtcgcctgattctggcctggcgacattacttcagatgctatggacttggcagcggttcggtgctcgaaaagacgtacttacaagtatcatgccgattattttctacgcattcagttgtatattaatatttagctctgccggcggactctcttcgcagatctcgatttctgcaggcaaagaagtcctcctgaagggtcaggattgcggaattccacaggttctgtcattcggccagctcccatcaatagcggacgagcggaacacattgggtgatgcggccaattatgcccaacaatgctacaatccgaacggctccagcattctaagctgcaacacctttgttactaaaactttaccgactgtgtcgtttcagtacgatgcgcactgtccttttgaggctggtatctgccgaggaaacaatactgcggtccattttgacactggatacgttcacagtaaccatgatcttggtttcaacttaccattagacgaggcatttgcatatcgacaagtcgcaacatgcgcgccccttatcaccgaaggccatacaaccaacttttatatcgggaatatttcatccgtgcgatatgactatggcggttttgtaagcaaaaaaaatggaattaggaactacacctacgagtcggtagatttagcgacccagtacttggccaacaatttccatggggtcgctgttcctccatataactacttgttagccatacttgtttctttaacatttcaaggtgagcctgtaatagggacaggcttttttatcccgagctctagcatctcacgtgaagatggggacgtctcgattatattcttgtctgggaatggtgtcctgttttctggtacaccaatggatgacgagtggtatcgagccaccaagccagcagtgaatgttagtggctcaggacttttgaatcaaacagtgatgacatatcaggctacagaagcagcaagcccattgggatgcgtacagcaatatcaatggtgtaatggagagcatccaaacgtcaataattgcggacctcttgcgagcttttacgatgcagcttacggcgcggccgctatgttcaacttgactaaagaagatttagatccttcgaggccgtcttcggaaacagctactggaacgcggttcatctggccgtggcttattgtgtcaactccggccaacgatatcactaccgtactgggctctttaggggctcagtccctagcatctcaaagcgtcctagattctggatttcaatacccattacctaaaaatcaatggcaaatcgatgtcacaaagtggtggaacttgtcgctggctagcacacaatacgcctttattaaaacagcattagggacagccccggccaaatggccaccactcaatgacgaagagcgaaagctatgtcgtagccagaaaattctgagcagcggatactcctcgttcaatcttttcgcactactctttacctacatcgtaagcggggtgataataacgttctctttcatcactgaaccaattcttggttatctttctcgacgccggaaaattaaagagtacgagtatctggaatggacggccaacgagtctttgcaacttcatcgcctggcgcaagaggagagaggaccggaagagtggtttggtggttcggacaagatcccaaccacttcagtggataacatgcttgcacatctcgacatcagcaactcgcaacatcccatcttatctcgccaccagctcgggatgtctacaacgggagagaccaagcctgaaggtagtcagacaggagaggatcagcgacccgacacgatgatgagctcaaatggcgaaacaaatgctgccaattctgttacgacaatacatgcaaaccatgacagcgactgccatgctgaaagtagccacccgggagagaacgagccagccagcaagctcatcagctctcatggcggatcgaacactgtcaactctatcgtaacagtcctacaggacgacgatagcgaagaccatcgtgagaatacccaacgggaccactcgcgaaatatgtggatggcagtggactagatattgcagaccatttctagtcgtattcctaaattcgaagcatgtgtggtgatcacctgtatctgcgtacgcgaaaacgaaaagatattgggagaagaattgggctttaagttttactcagtttgacttctcttatgacgaaatagcttttcctatgagtgttctatacaactgtcattggcagggttgcatttctaatctgcgaaaatggccaataatactatcttacttgctt

SEQ ID NO: 6923 - DNA, 987 bp, Muscodor strobelii
  misc_feature: SGI cDNA ID NO. 562062
  misc_feature: Elevated expression when VOC is produced
  misc_feature: Encodes the peptide sequence at SEQ ID NO 6924
atgttcaacttgactaaagaagatttagatccttcgaggccgtcttcggaaacagctactggaacgcggttcatctggccgtggcttattgtgtcaactccggccaacgatatcactaccgtactgggctctttaggggctcagtccctagcatctcaaagcgtcctagattctggatttcaatacccattacctaaaaatcaatggcaaatcgatgtcacaaagtggtggaacttgtcgctggctagcacacaatacgcctttattaaaacagcattagggacagccccggccaaatggccaccactcaatgacgaagagcgaaagctatgtcgtagccagaaaattctgagcagcggatactcctcgttcaatcttttcgcactactctttacctacatcgtaagcggggtgataataacgttctctttcatcactgaaccaattcttggttatctttctcgacgccggaaaattaaagagtacgagtatctggaatggacggccaacgagtctttgcaacttcatcgcctggcgcaagaggagagaggaccggaagagtggtttggtggttcggacaagatcccaaccacttcagtggataacatgcttgcacatctcgacatcagcaactcgcaacatcccatcttatctcgccaccagctcgggatgtctacaacgggagagaccaagcctgaaggtagtcagacaggagaggatcagcgacccgacacgatgatgagctcaaatggcgaaacaaatgctgccaattctgttacgacaatacatgcaaaccatgacagcgactgccatgctgaaagtagccacccgggagagaacgagccagccagcaagctcatcagctctcatggcggatcgaacactgtcaactctatcgtaacagtcctacaggacgacgatagcgaagaccatcgtgagaatacccaacgggaccactcgcgaaatatgtggatggcagtggactag

SEQ ID NO: 6924 - protein, 328 aa, Muscodor strobelii
  misc_feature: SGI Peptide ID NO. 562062
  misc_feature (23)..(217): NCBI GI: 189194015 Blast Desc: conserved [Pyrenophora tritici-repentis Pt-1C-BFP] gi|187978910|gb|EDU45536.1| conserved [Pyrenophora tritici-repentis Pt-1C-BFP]
  misc_feature (25)..(298): NCBI GI: 169615058 Blast Desc: SNOG_10683 [Phaeosphaeria nodorum SN15] gi|111060957|gb|EAT82077.1| SNOG_10683 [Phaeosphaeria nodorum SN15]
  misc_feature (46)..(200): NCBI GI: 238490874 Blast Desc: conserved [Aspergillus flavus NRRL3357] gi|220697087|gb|EED53428.1| conserved [Aspergillus flavus NRRL3357]
  misc_feature (46)..(200): NCBI GI: 169772941 Blast Desc: [Aspergillus oryzae RIB40] gi|83768800|dbj|BAE58937.1| protein product [Aspergillus oryzae]
  misc_feature (64)..(219): NCBI GI: 115399382 Blast Desc: [Aspergillus terreus NIH2624] gi|114192163|gb|EAU33863.1| [Aspergillus terreus NIH2624]
  misc_feature (46)..(184): NCBI GI: 121699395 Blast Desc: ACLA_082720 [Aspergillus clavatus NRRL 1] gi|119396149|gb|EAW06581.1| ACLA_082720 [Aspergillus clavatus NRRL 1]
  misc_feature (64)..(198): NCBI GI: 159128250 Blast Desc: conserved [Aspergillus fumigatus A1163]
  misc_feature (64)..(198): NCBI GI: 70986226 Blast Desc: conserved [Aspergillus fumigatus Af293] gi|66846236|gb|EAL86569.1| conserved [Aspergillus fumigatus Af293]
  misc_feature (64)..(204): NCBI GI: 119474227 Blast Desc: NFIA_004500 [Neosartorya fischeri NRRL 181] gi|119407142|gb|EAW17092.1| conserved [Neosartorya fischeri NRRL 181]
  misc_feature (60)..(216): NCBI GI: 256723662 Blast Desc: NECHADRAFT_86728 [Nectria haematococca mpVI 77-13-4]
  misc_feature: Useful for introducing or modulating the production of volatile compounds
MFNLTKEDLDPSRPSSETATGTRFIWPWLIVSTPANDITTVLGSLGAQSLASQSVLDSGFQYPLPKNQWQIDVTKWWNLSLASTQYAFIKTALGTAPAKWPPLNDEERKLCRSQKILSSGYSSFNLFALLFTYIVSGVIITFSFITEPILGYLSRRRKIKEYEYLEWTANESLQLHRLAQEERGPEEWFGGSDKIPTTSVDNMLAHLDISNSQHPILSRHQLGMSTTGETKPEGSQTGEDQRPDTMMSSNGETNAANSVTTIHANHDSDCHAESSHPGENEPASKLISSHGGSNTVNSIVTVLQDDDSEDHRENTQRDHSRNMWMAVD

SEQ ID NO: 6925 - DNA, 2593 bp, Muscodor strobelii; identical to SEQ ID NO: 6922
  misc_feature: SGI EST ID NO. CUFF.17238.0
  misc_feature: Variant of the nucleotide sequence at SEQ ID NO 6923

SEQ ID NO: 6926 - DNA, 333 bp, Muscodor strobelii
  misc_feature: SGI cDNA ID NO. 562063
  misc_feature: Encodes the peptide sequence at SEQ ID NO 6927
atggttctgattctcgccgctgtgtctaagactatggatggtagtgctactcagggtcagggacaaggtcaaacacaatcttcgagttcgactggaagttcaacgtcaggaacacccaatgtgaagtcagactcgacctcatcgactacagacacgacaaagaagtcgtcggatgatgttccagttatatttgtctcggatgattcgactgaagatcaagaatccgttgaggagcaagaaccatcagatgactcaactcaaggggctgaagaaccatctgatgggtcggagcaatcttctaacacacaagaccctagcgattcgagtcagtga

SEQ ID NO: 6927 - protein, 110 aa, Muscodor strobelii
  misc_feature: SGI Peptide ID NO. 562063
MVLILAAVSKTMDGSATQGQGQGQTQSSSSTGSSTSGTPNVKSDSTSSTTDTTKKSSDDVPVIFVSDDSTEDQESVEEQEPSDDSTQGAEEPSDGSEQSSNTQDPSDSSQ

SEQ ID NO: 6928 - DNA, 576 bp, Muscodor strobelii
  misc_feature: SGI cDNA ID NO. 562064
  misc_feature: Encodes the peptide sequence at SEQ ID NO 6929
atgggcagcgccgatcagccctctggacaggacgaagcagatgaggcaaacaagtctattctggccatccgtggcttaaaatgcaagaccgacatctccggcctgactctatatctactcgcggatgtcgccctcaagaaccagaacgttctcgccggactactcaatttcgagccgttctacttttttctctacgataaccagcagtttcccgaattgctaggcgccctctgcgacatgggcagcgacgagctcacaattcgtcaaggagcttacgccttgggttgggaatgcaagtggtggagtgcatatcctgcccttatacctagcgagaagacgaatgaagttggtggcaccctgtggcgctgtgagaagtatcaagatgtcattcgtcttgctcaacaggaaggtcctgcttatcgtctggcctattgcaatgttcgcgttccgaaagaagatggtcccggtgatgagatcatccaggatgttcgtgtctttgtcagtgtgtacgataaggagaatctggcagattatcctacggtattggatgaggacacggatgaggacgatgtctag

SEQ ID NO: 6929 - protein, 191 aa, Muscodor strobelii
  misc_feature: SGI Peptide ID NO. 562064
  misc_feature (57)..(166): NCBI GI: 189197967 Blast Desc: conserved [Pyrenophora tritici-repentis Pt-1C-BFP] gi|187981269|gb|EDU47895.1| conserved [Pyrenophora tritici-repentis Pt-1C-BFP]
  misc_feature (62)..(177): NCBI GI: 145249948 Blast Desc: An14g06900 [Aspergillus niger] gi|134081998|emb|CAK46683.1| protein product [Aspergillus niger]
  misc_feature (57)..(166): NCBI GI: 169604170 Blast Desc: SNOG_05095 [Phaeosphaeria nodorum SN15] gi|111066366|gb|EAT87486.1| SNOG_05095 [Phaeosphaeria nodorum SN15]
  misc_feature (58)..(177): NCBI GI: 255936045 Blast Desc: Pc13g06150 [Penicillium chrysogenum Wisconsin 54-1255] gi|211583669|emb|CAP91684.1| Pc13g06150 [Penicillium chrysogenum Wisconsin 54-1255]
  misc_feature (62)..(147): NCBI GI: 255942641 Blast Desc: Pc18g02450 [Penicillium chrysogenum Wisconsin 54-1255] gi|211586822|emb|CAP94469.1| Pc18g02450 [Penicillium chrysogenum Wisconsin 54-1255]
  misc_feature (59)..(177): NCBI GI: 261358393 Blast Desc: conserved [Verticillium albo-atrum VaMs.102]
  misc_feature (62)..(177): NCBI GI: 261358392 Blast Desc: conserved [Verticillium albo-atrum VaMs.102]
MGSADQPSGQDEADEANKSILAIRGLKCKTDISGLTLYLLADVALKNQNVLAGLLNFEPFYFFLYDNQQFPELLGALCDMGSDELTIRQGAYALGWECKWWSAYPALIPSEKTNEVGGTLWRCEKYQDVIRLAQQEGPAYRLAYCNVRVPKEDGPGDEIIQDVRVFVSVYDKENLADYPTVLDEDTDEDDV

SEQ ID NO: 6930 - DNA, 5685 bp, Muscodor strobelii
  misc_feature: SGI cDNA ID NO. 562065
  misc_feature: Encodes the peptide sequence at SEQ ID NO 6931
atggcatccaggctcgatcgtcttgtgacgatcctggaaacagggagcacaaaactaatcaaagacactgctgtcaatcagctggccgactggcagaagcaacaccccgaggagctcttcaatctactttcccgtgttgtgccatatcttcgccacaaagattgggacactcgatctaccgcagcaaaggccctgggtaaaattattgagaatgccgcgttctatgacccaaacgaggatgaagactcaaatggcttgcagaaagaggaaccgaagacagagaatggggtagtcaaaaaggaagaagaatcaagcactgccattctctcagatgaccactatagcctggagtcattggatgtctcgaccatcctcagatttggccggcaattactccgtactggtgctaacgtcgattatggtcttgcaagtctcgatccccaggcccgactgacgcacctgaaaaaaacactcaacgggcgcttgggcctattaggtcgacaatttgaggatgatgagatccctcttgtctttgaaaagtctgccagcccgtccacgccaatggacacagctctaatgaatggcttggcccgccaggggagcacggcaagttcaggcccaagtcaaaatactgaagatacaggattaagtgcaagacagaaaaatgccctgaaacgaaagcgtaaaatggaagcgaagaaagctgcacagggcaaaggtggctttggcgatctctcaattcgtcgatcgttcacgggaggttctgacgcgttcgacgagacacccatgccagacaatgaagtcaagaagaatggcaaaaacgattattttaccttggagaggcctgcagacgttgacgaagatacgaaagtcgtttccgactacaagggcccggttgttccgataaaatctgaaattgaagccgacgaggaattgcaaggttgcgaatggccatatgagcggctttgcgagtttttgaaactcgacatcctcgatccacaatgggaaactcggcatggtgccgcgcttggtttgcgagaaattcttcgagtgcatggcgctggtgctgggcgtttgagaggcaaatccagaccggagaacgacgctctcaatcgcaaatggttagatgacatggcgtgtcgactgtgttgtgtactgatgctggatcgtttcaccgattatgcttccgatacaagcgtcgcgccgatccgggagaccgttggtcagaccttaggtgctttcttgaagcatctcccggctggctctgtacacaatatctatcaaatactattgcgaatggttatgcaacaggacctgggtctcgataggcccatctgggcagtctgccacggtggcatggttggattacgctacgtggttgctgtgaggaaggatctgcttcttcaagataaccaaatgattgatggtgtagtccaagctgtgatgaagggccttggggacaacgacgatgacgtgaggtccgtgagcgccgcaaccctgatccctatggcacaagaattcgttcagcttcgacctggcgctttggacgaactcatcggcatagtgtgggagagtttgtccagcctgggtgacgacttgagtgccagtacaggcaaaattatggatttgcttgctacactctgtagtttccccgaggtcctacaagctatgaaacgatcagctgagcatgatgaggaacgatcattcacactcttggtaccaagactctatcctttcttacgacatactatcacgtccgttcggctggcagtcctcaaagctctcgtgacattcgtcaatctgggagaagattctcaaggctggcttgatggcaagatactacgattagtgttccaaaacattcttgtggagcgagaccaggagactctgaagatgtcgatgcagctgtggaccgcccttgtgaagtgtttggctcagactccagatcgtcttgctagcgaatttgcaccacacattgatgctctcatgcagctgacgcttcatcctgttggggttccgcgtaacccaattcctatgaacggattcttgtttcagaagccatcaggtggcacgtatactgtacccggagtcatgcccatcgccccgcgtaagctctcagatgctgagggtggagagaggcccagcaaaagacgcagaaagtctgcgaagcttgatgagacgcctaccacaactcactcgcacgatcttgatggtcacatgatgcaaggtgatgtggacctcgtcggcatggataccttgatccgctctcgcgtgactgcggcaacagccatgggtctgattatgtcttctgtgcctacatcaactctggatatttacgatgccattctcataccaggcctagggtcatcatatgcctcaacgcaacttacagcatgcatagtcatagatgaatatgcaagaggttgtacaacttcgctagaaaccgcaggtacgagatatacatatcagttgcaaaatatcatcgacagtgagcggcctccacaatatcgcgacctagttagctatgtacaacgagctcgatcgcaatgccagcagctcatgaatcttttccgggaccatggaaaagtatctcaacatagactgccaacgctggcagtggtagtacaaggagaagctgaagctggccctggagccttctctctcacaaatgctgagaaatgcgtcaatgaagactatgaccggctcaaaaaggctatggcgcctgcgcagcgtcttattgccagccagcagctaaacgaagcccgcttggacactgtatcggcaattgaggaagcaaaggttgcgaaggattctcgagatatccgcattaaggctgcggcagcttgtgctctcattgctatgaaagtattacctaaaaagcctagtccgctgattaaaggcatcatggacagcatcaagcttgaagaaaaccaacagcttcagagccgctctgccgaaacaatagctcggcttgtacaattgttcaccgaaaagggccgacgtggtccggctgacaaggtcgtctcgaacctggtcaagttctcatgtgtcgaggtcgccgagacccccgaatttcctatccacgcggcgaagacaaatgtcattctctcaatgcagaaggaagaagaccgagttgaccatggatccgacgcagctaagttcgcacgtgaggccaaagccgcacgtaccacacggcgtggagctaaagaagctcttgaaatcctgtcgctgacctttggagctgagctgttcactatagtaccaagcttggaggtgttcatgggagaacccttaatcagagcttttactggcgaactacccccccaagtcagggatccgacagacaattttggccaagaagtggtcgatgccatgtccgtcatccgcacgatgacgcctactttgcacgagagtcttcgtccatttgtgatggagcaagttcctctcgtgatcaaagctcttcactccgaactatcagtcttccgctacatggctgcgaaatgtctagctactatttgtagtgtcatcaccatagaaggcatgacggcacttgttcaaaaggttcttccctccatcaataatcctctagacctcagcttccgccagggcgcgatcgaggctatctaccacctcatagcagtcatgggagatggtattcttccatatgtcattttcctcatagtgcctgtcctgggtcgaatgagcgactcggacaatgatattcgactaatcgcgaccacatcttttgccacattggttaagctcgtgccgcttgaggctggcatacccgaccctcctgggctatccgaagaacttctccgtggtcgagacagagagcggacgttcattgcgcagctactagaccccaagaaggttgagtcgtatcaaatcccggtcgcgatcaatgccgagctgcgctcttaccagcaagacggtgtcaactggctcaatttcttgaacaaatataacctacatggcattctttgtgatgacatggggctgggcaaaacacttcaaactatttgtatggttgccagcgaccactaccacagggccgaggaattcaagaagactggtgctccagatgtgcgcaggctcccttcgctgatcgtttgtccaccgacactatccggacactggcaacaagagattaagacatttgccccgtttttgagcgttacttcgttcgtaggtcctccaggagaaaggcgacctaaagcttctcaattcgccacaactgatattgtcgttacctcatatgaggtctgtcgaaacgatacagagatcttagagagacagaattggaactatatcgtgctcgatgagggtcacttgatcaagaatccaaaagccaaaatttctctcgctgtcaaaaggctaggaagtaatcaccgtttgatcctgaccggtacacctattcaaaacaacgttctcgaactgtggtcactgttcgacttcctgatgccagggttcttaggtgccgagaaggtgttcttggatcggtttgctaagcctattgctgctagccgtttcagcaaagcttcatctaaggaacaagaagcgggtgcattggcaattgaggcattgcacaaacaagtcttgccgttcttgctacgccggctcaaggaagaagttctcgatgatctaccgcccaagatcttacaaaactattattgtgacctgagcgatctacaacggaagttatttgacgatttctccaagaggcaggggaagaagctcactgaagaagctggccgcgacgacaaagacgcgaagcagcatatcttccaagctttgcagtacatgcgcaagttgtgcaattcgcctgcacttgtcatgacacctgccaacaaactttacaaggatactcaggatttactcgcaaaatcagggaccagtatcgaagatcccatccatgctcctaaactaaccgcacttaaagacttgctggttgattgtggtatcggtgtagaaggctccgatgcgaacgatcctctctaccaaccaatcaagccacatcgcgctctgatcttctgtcagatgaaggaaatgctagacatggttcaaaacacagttttgaagcgcatgctaccgtcggtatcattccttcgtctggatggctcagttgaagccggtaaacgccaagacatcgtgaacacattcaacaaagatccttcgtatgattgtctccttttgacgacaagcgttggaggcctaggtctcaaccttactggagccgacactgtaatattcgtcgaacacgactggaatcctcaacgtgatcttcaggcaatggaccgtgcacatcgcatcgggcagaagaaggtcgtaaacgtttaccgattgattaccaggggcacactggaggagaagatcttaagtcttcaagctttcaagatcgatgtcgcatcaaccgtcgttaatcaacaaaacgctggtttaggcacaatggacacagatcaaattcttgatctattcaatttcaatgattccggaacgaatctcatctcagacaaacccaaggacggaattgaaggacgcgaggaagatatggtggacgtcgagactggagaagtcagagcacccggcaagaaagcctgggcagatgacttgggagagttatgggacaaccgccaatacgaggagagttttgacctcgatggtttcctcaagacgatgaattga

SEQ ID NO: 6931 - protein, 1894 aa, Muscodor strobelii
  misc_feature: SGI Peptide ID NO. 562065
  misc_feature (37)..(72): Pfam Id: PF02985 Pfam Desc: HEAT repeat
  misc_feature (1694)..(1772): Pfam Id: PF00271 Pfam Desc: Helicase conserved C-terminal domain
  misc_feature (1308)..(1612): Pfam Id: PF00176 Pfam Desc: SNF2 family N-terminal domain
  misc_feature (1)..(1893): NCBI GI: 159130807 Blast Desc: TBP associated factor (Mot1), [Aspergillus fumigatus A1163]
  misc_feature (10)..(1893): NCBI GI: 240281557 Blast Desc: transcriptional accessory protein [Ajellomyces capsulatus H143]
  misc_feature (1)..(1893): NCBI GI: 258576739 Blast Desc: UREG_02067 [Uncinocarpus reesii 1704] gi|237902817|gb|EEP77218.1| UREG_02067 [Uncinocarpus reesii 1704]
  misc_feature (6)..(1893): NCBI GI: 169617355 Blast Desc: SNOG_11855 [Phaeosphaeria nodorum SN15] gi|160703388|gb|EAT80899.2| SNOG_11855 [Phaeosphaeria nodorum SN15]
  misc_feature (244)..(1893): NCBI GI: 238504030 Blast Desc: TBP associated factor (Mot1), [Aspergillus flavus NRRL3357] gi|220690718|gb|EED47067.1| TBP associated factor (Mot1), [Aspergillus flavus NRRL3357]
  misc_feature (14)..(1893): NCBI GI: 50557340 Blast Desc: YALI0F31053p [Yarrowia lipolytica] gi|49651948|emb|CAG78891.1| YALI0F31053p [Yarrowia lipolytica]
  misc_feature (3)..(1893): NCBI GI: 150865383 Blast Desc: transcriptional accessory protein involved in TBP (TATA-binding protein) regulation helicase MOT1 [Pichia stipitis CBS 6054] gi|149386639|gb|ABN66547.2| transcriptional accessory
  misc_feature (3)..(1893): NCBI GI: 68486386 Blast Desc: CaO19.4502 [Candida albicans SC5314] gi|68486451|ref|XP_712896.1| CaO19.11978 [Candida albicans SC5314] gi|46434315|gb|EAK93728.1| CaO19.11978 [Candida albicans
  misc_feature (3)..(1893): NCBI GI: 238882230 Blast Desc: TATA-binding protein associated factor MOT1 [Candida albicans WO-1]
  misc_feature (3)..(1893): NCBI GI: 202953094 Blast Desc: DEHA2F08470p [Debaryomyces hansenii]
MASRLDRLVTILETGSTKLIKDTAVNQLADWQKQHPEELFNLLSRVVPYLRHKDWDTRSTAAKALGKIIENAAFYDPNEDEDSNGLQKEEPKTENGVVKKEEESSTAILSDDHYSLESLDVSTILRFGRQLLRTGANVDYGLASLDPQARLTHLKKTLNGRLGLLGRQFEDDEIPLVFEKSASPSTPMDTALMNGLARQGSTASSGPSQNTEDTGLSARQKNALKRKRKMEAKKAAQGKGGFGDLSIRRSFTGGSDAFDETPMPDNEVKKNGKNDYFTLERPADVDEDTKVVSDYKGPVVPIKSEIEADEELQGCEWPYERLCEFLKLDILDPQWETRHGAALGLREILRVHGAGAGRLRGKSRPENDALNRKWLDDMACRLCCVLMLDRFTDYASDTSVAPIRETVGQTLGAFLKHLPAGSVHNIYQILLRMVMQQDLGLDRPIWAVCHGGMVGLRYVVAVRKDLLLQDNQMIDGVVQAVMKGLGDNDDDVRSVSAATLIPMAQEFVQLRPGALDELIGIVWESLSSLGDDLSASTGKIMDLLATLCSFPEVLQAMKRSAEHDEERSFTLLVPRLYPFLRHTITSVRLAVLKALVTFVNLGEDSQGWLDGKILRLVFQNILVERDQETLKMSMQLWTALVKCLAQTPDRLASEFAPHIDALMQLTLHPVGVPRNPIPMNGFLFQKPSGGTYTVPGVMPIAPRKLSDAEGGERPSKRRRKSAKLDETPTTTHSHDLDGHMMQGDVDLVGMDTLIRSRVTAATAMGLIMSSVPTSTLDIYDAILIPGLGSSYASTQLTACIVIDEYARGCTTSLETAGTRYTYQLQNIIDSERPPQYRDLVSYVQRARSQCQQLMNLFRDHGKVSQHRLPTLAVVVQGEAEAGPGAFSLTNAEKCVNEDYDRLKKAMAPAQRLIASQQLNEARLDTVSAIEEAKVAKDSRDIRIKAAAACALIAMKVLPKKPSPLIKGIMDSIKLEENQQLQSRSAETIARLVQLFTEKGRRGPADKVVSNLVKFSCVEVAETPEFPIHAAKTNVILSMQKEEDRVDHGSDAAKFAREAKAARTTRRGAKEALEILSLTFGAELFTIVPSLEVFMGEPLIRAFTGELPPQVRDPTDNFGQEVVDAMSVIRTMTPTLHESLRPFVMEQVPLVIKALHSELSVFRYMAAKCLATICSVITIEGMTALVQKVLPSINNPLDLSFRQGAIEAIYHLIAVMGDGILPYVIFLIVPVLGRMSDSDNDIRLIATTSFATLVKLVPLEAGIPDPPGLSEELLRGRDRERTFIAQLLDPKKVESYQIPVAINAELRSYQQDGVNWLNFLNKYNLHGILCDDMGLGKTLQTICMVASDHYHRAEEFKKTGAPDVRRLPSLIVCPPTLSGHWQQEIKTFAPFLSVTSFVGPPGERRPKASQFATTDIVVTSYEVCRNDTEILERQNWNYIVLDEGHLIKNPKAKISLAVKRLGSNHRLILTGTPIQNNVLELWSLFDFLMPGFLGAEKVFLDRFAKPIAASRFSKASSKEQEAGALAIEALHKQVLPFLLRRLKEEVLDDLPPKILQNYYCDLSDLQRKLFDDFSKRQGKKLTEEAGRDDKDAKQHIFQALQYMRKLCNSPALVMTPANKLYKDTQDLLAKSGTSIEDPIHAPKLTALKDLLVDCGIGVEGSDANDPLYQPIKPHRALIFCQMKEMLDMVQNTVLKRMLPSVSFLRLDGSVEAGKRQDIVNTFNKDPSYDCLLLTTSVGGLGLNLTGADTVIFVEHDWNPQRDLQAMDRAHRIGQKKVVNVYRLITRGTLEEKILSLQAFKIDVASTVVNQQNAGLGTMDTDQILDLFNFNDSGTNLISDKPKDGIEGREEDMVDVETGEVRAPGKKAWADDLGELWDNRQYEESFDLDGFLKTMN

SEQ ID NO: 6932 - DNA, 6263 bp, Muscodor strobelii
  misc_feature: SGI EST ID NO. CUFF.17251.0
  misc_feature: Variant of the nucleotide sequence at SEQ ID NO 6930
cgatcgtcttgtgacgatcctggaaacagggagcacaaaactaatcaaagacactgctgtcaatcagctggccgactggcagaagcaacaccccgaggagctcttcaatctactttcccgtgttgtgccatatcttcgccacaaagattgggacactcgatctaccgcagcaaaggccctgggtaaaattattgagaatgccgcgttctatgacccaaacgaggatgaagactcaaatggcttgcagaaagaggaaccgaagacagagaatggggtagtcaaaaaggaagaagaatcaagcactgccattctctcagatgaccactatagcctggagtcattggatgtctcgaccatcctcagatttggccggcaattactccgtactggtgctaacgtcgattatggtcttgcaagtctcgatccccaggcccgactgacgcacctgaaaaaaacactcaacgggcgcttgggcctattaggtcgacaatttgaggatgatgagatccctcttgtctttgaaaagtctgccagcccgtccacgccaatggacacagctctaatgaatggcttggcccgccaggggagcacggcaagttcaggcccaagtcaaaatactgaagatacaggattaagtgcaagacagaaaaatgccctgaaacgaaagcgtaaaatggaagcgaagaaagctgcacagggcaaaggtggctttggcgatctctcaattcgtcgatcgttcacgggaggttctgacgcgttcgacgagacacccatgccagacaatgaagtcaagaagaatggcaaaaacgattattttaccttggagaggcctgcagacgttgacgaagatacgaaagtcgtttccgactacaagggcccggttgttccgataaaatctgaaattgaagccgacgaggaattgcaaggttgcgaatggccatatgagcggctttgcgagtttttgaaactcgacatcctcgatccacaatgggaaactcggcatggtgccgcgcttggtttgcgagaaattcttcgagtgcatggcgctggtgctgggcgtttgagaggcaaatccagaccggagaacgacgctctcaatcgcaaatggttagatgacatggcgtgtcgactgtgttgtgtactgatgctggatcgtttcaccgattatgcttccgatacaagcgtcgcgccgatccgggagaccgttggtcagaccttaggtgctttcttgaagcatctcccggctggctctgtacacaatatctatcaaatactattgcgaatggttatgcaacaggacctgggtctcgataggcccatctgggcagtctgccacggtggcatggttggattacgctacgtggttgctgtgaggaaggatctgcttcttcaagataaccaaatgattgatggtgtagtccaagctgtgatgaagggccttggggacaacgacgatgacgtgaggtccgtgagcgccgcaaccctgatccctatggcacaagaattcgttcagcttcgacctggcgctttggacgaactcatcggcatagtgtgggagagtttgtccagcctgggtgacgacttgagtgccagtacaggcaaaattatggatttgcttgctacactctgtagtttccccgaggtcctacaagctatgaaacgatcagctgagcatgatgaggaacgatcattcacactcttggtaccaagactctatcctttcttacgacatactatcacgtccgttcggctggcagtcctcaaagctctcgtgacattcgtcaatctgggagaagattctcaaggctggcttgatggcaagatactacgattagtgttccaaaacattcttgtggagcgagaccaggagactctgaagatgtcgatgcagctgtggaccgcccttgtgaagtgtttggctcagactccagatcgtcttgctagcgaatttgcaccacacattgatgctctcatgcagctgacgcttcatcctgttggggttccgcgtaacccaattcctatgaacggattcttgtttcagaagccatcaggtggcacgtatactgtacccggagtcatgcccatcgccccgcgtaagctctcagatgctgagggtggagagaggcccagcaaaagacgcagaaagtctgcgaagcttgatgagacgcctaccacaactcactcgcacgatcttgatggtcacatgatgcaaggtgatgtggacctcgtcggcatggataccttgatccgctctcgcgtgactgcggcaacagccatgggtctgattatgtcttctgtgcctacatcaactctggatatttacgatgccattctcataccaggcctagggtcatcatatgcctcaacgcaacttacagcatgcatagtcatagatgaatatgcaagaggttgtacaacttcgctagaaaccgcaggtacgagatatacatatcagttgcaaaatatcatcgacagtgagcggcctccacaatatcgcgacctagttagctatgtacaacgagctcgatcgcaatgccagcagctcatgaatcttttccgggaccatggaaaagtatctcaacatagactgccaacgctggcagtggtagtacaaggagaagctgaagctggccctggagccttctctctcacaaatgctgagaaatgcgtcaatgaagactatgaccggctcaaaaaggctatggcgcctgcgcagcgtcttattgccagccagcagctaaacgaagcccgcttggacactgtatcggcaattgaggaagcaaaggttgcgaaggattctcgagatatccgcattaaggctgcggcagcttgtgctctcattgctatgaaagtattacctaaaaagcctagtccgctgattaaaggcatcatggacagcatcaagcttgaagaaaaccaacagcttcagagccgctctgccgaaacaatagctcggcttgtacaattgttcaccgaaaagggccgacgtggtccggctgacaaggtcgtctcgaacctggtcaagttctcatgtgtcgaggtcgccgagacccccgaatttcctatccacgcggcgaagacaaatgtcattctctcaatgcagaaggaagaagaccgagttgaccatggatccgacgcagctaagttcgcacgtgaggccaaagccgcacgtaccacacggcgtggagctaaagaagctcttgaaatcctgtcgctgacctttggagctgagctgttcactatagtaccaagcttggaggtgttcatgggagaacccttaatcagagcttttactggcgaactacccccccaagtcagggatccgacagacaattttggccaagaagtggtcgatgccatgtccgtcatccgcacgatgacgcctactttgcacgagagtcttcgtccatttgtgatggagcaagttcctctcgtgatcaaagctcttcactccgaactatcagtcttccgctacatggctgcgaaatgtctagctactatttgtagtgtcatcaccatagaaggcatgacggcacttgttcaaaaggttcttccctccatcaataatcctctagacctcagcttccgccagggcgcgatcgaggctatctaccacctcatagcagtcatgggagatggtattcttccatatgtcattttcctcatagtgcctgtcctgggtcgaatgagcgactcggacaatgatattcgactaatcgcgaccacatcttttgccacattggttaagctcgtgccgcttgaggctggcatacccgaccctcctgggctatccgaagaacttctccgtggtcgagacagagagcggacgttcattgcgcagctactagaccccaagaaggttgagtcgtatcaaatcccggtcgcgatcaatgccgagctgcgctcttaccagcaagacggtgtcaactggctcaatttcttgaacaaatataacctacatggcattctttgtgatgacatggggctgggcaaaacacttcaaactatttgtatggttgccagcgaccactaccacagggccgaggaattcaagaagactggtgctccagatgtgcgcaggctcccttcgctgatcgtttgtccaccgacactatccggacactggcaacaagagattaagacatttgccccgtttttgagcgttacttcgttcgtaggtcctccaggagaaaggcgacctaaagcttctcaattcgccacaactgatattgtcgttacctcatatgaggtctgtcgaaacgatacagagatcttagagagacagaattggaactatatcgtgctcgatgagggtcacttgatcaagaatccaaaagccaaaatttctctcgctgtcaaaaggctaggaagtaatcaccgtttgatcctgaccggtacacctattcaaaacaacgttctcgaactgtggtcactgttcgacttcctgatgccagggttcttaggtgccgagaaggtgttcttggatcggtttgctaagcctattgctgctagccgtttcagcaaagcttcatctaaggaacaagaagcgggtgcattggcaattgaggcattgcacaaacaagtcttgccgttcttgctacgccggctcaaggaagaagttctcgatgatctaccgcccaagatcttacaaaactattattgtgacctgagcgatctacaacggaagttatttgacgatttctccaagaggcaggggaagaagctcactgaagaagctggccgcgacgacaaagacgcgaagcagcatatcttccaagctttgcagtacatgcgcaagttgtgcaattcgcctgcacttgtcatgacacctgccaacaaactttacaaggatactcaggatttactcgcaaaatcagggaccagtatcgaagatcccatccatgctcctaaactaaccgcacttaaagacttgctggttgattgtggtatcggtgtagaaggctccgatgcgaacgatcctctctaccaaccaatcaagccacatcgcgctctgatcttctgtcagatgaaggaaatgctagacatggttcaaaacacagttttgaagcgcatgctaccgtcggtatcattccttcgtctggatggctcagttgaagccggtaaacgccaagacatcgtgaacacattcaacaaagatccttcgtatgattgtctccttttgacgacaagcgttggaggcctaggtctcaaccttactggagccgacactgtaatattcgtcgaacacgactggaatcctcaacgtgatcttcaggcaatggaccgtgcacatcgcatcgggcagaagaaggtcgtaaacgtttaccgattgattaccaggggcacactggaggagaagatcttaagtcttcaagctttcaagatcgatgtcgcatcaaccgtcgttaatcaacaaaacgctggtttaggcacaatggacacagatcaaattcttgatctattcaatttcaatgattccggaacgaatctcatctcagacaaacccaaggacggaattgaaggacgcgaggaagatatggtggacgtcgagactggagaagtcagagcacccggcaagaaagcctgggcagatgacttgggagagttatgggacaaccgccaatacgaggagagttttgacctcgatggtttcctcaagacgatgaattgatgcttgcgtcttgagaaatattttatgcctactctttcgaggatctttcagtccatcgttccgaaagtaagaagaatgaggactgcaacgtcaggccatgtatctgtatactgtacctgtatggcaacacaaaaaggaggtagcgaagaatcttgcatttaagatacgacaaagctttaatcttcccattgccttgttgttttgatgtggttattatcgccgaacgacatcaagccacctcctcggctgattggtgaattacgatgtgttcaactgttatgtaacttgctctttgccgtcattgccctttctaaaatacgacggcaaagccggtagatcatattgatgcaaaggagcaacggagtctgaaagcatactgaaaagccactctgaaaagtatgtttaccaaataagtgttttcgctggaatgcttcttttcacaatagtcagagaatcgagtcaagatcagactaatcaagagcctgctcacattgaaaaggtgcccggtcggaagattaagcaagcatgattataattgcttctatcatgtaccgcaacggtttgcaccacaaagccgtctgccacttccatc

SEQ ID NO: 6933 - DNA, 3657 bp, Muscodor strobelii
  misc_feature: SGI cDNA ID NO. 562066
  misc_feature: Encodes the peptide sequence at SEQ ID NO 6934
atgtatatcaagcagatcatcatccagggcttcaagagctacaaggaccagacggtcatggagcccttctcgcccgggacaaacgtcgtcgtcggccgcaacggctccggcaagagcaacttcttcgccgcgatccgattcgtcctcagcgacgcctacacccagatgggccgcgaagagcgccaggccctgctccacgagggttcgggctcggccgtcatgtccgcatacgtcgaggtcatcttcgacaacagcgacgaccgttttgccaccggccacaaggaagtcgtcctgcgccgcaccatcggcctaaagcgagacgaatactcaatcgacaagaaggtcgttccaaagaccgaggtcacccagcttctcgagaccgccggtttctccaagtccaacccctactacatcgtgccccagggccgggttacggccctcaccaacatgaaggagtcggagcggttgaatctgctgaaagaagtcgccggtacccaagtctacgagtcgcgccgaactgagtctctcaagatcatgaccgacacgaataacaagagagagaagattgacgagctactggactacatcaaggagcgcctgaatgaactcgaggaggagaaagaggagctccgaggctaccaggacaaagatcgggaacgccggtgcctggaatacgcatatcactatcaatcgcagaactctatcgaggaaaagctcgctgaacttgaagactcgcgtcaaggcgggatcgaggataccgacgaaaatcgcgagctctacagcgcaggcgagaaagtcatcgcatccctcgacgctgaaataaacaaactacagcagcagatggaaatgctccgcctagatcgtcagcagctaacagaagatcgccgcgaaagcgctcgagcccaagccaccgcggagctgacagtcaaggatctctctagcagcatgtccgcacaggagcaagcaaaggcagagcacgatgctgaactgaatcgtgtcaagacagctatagcgtcggaagagagtgaactgaagaagctcactcccgacttcgaaaagagaaagcgaaaagaagccgaagtcaaattggctcttgataccgccgaagccgggcgacaacgactatttacaaaacagacaagaggaactcaatttcgaaacaaagccgaacgcgatgcctacttgaagacacatattaatgatctgaacataagcatgagcacgcagaaagccactcggctcgatgctgatgagcaggtcaaagggatagaaacttccatccaagaacttgacgaggaaattgcgaatctacggcaaaacaacgaggggtttgcaggtaaccgagcagctctcgctgaggacctccataaggccagggacgttgttcataagcttcacgacgaggtgaagcttcttcgtcgggaacaacagagattggacgtacagataagcagcgaacaaggctcaaaagcgcatgcagaggataatctaagaaaagccatggactctaatacatccaggggcttggctacgatccgtcgactcaagcaacaacaggacattcccggagcctatggcactcttgcagaattgttgactgtcgacgacaactaccgtctgccagtggagcaggtggcaggtgcaagcttgttccattacgttgtagataacgaggaaacctcaacgtatctggtcaatgcattgcaaaagcagtccggcggaagagtgactttcatgcctctatcaaggctcgaaccgaaacatgccaagttccccaatgcccaagatgcaattccgctgcttagcaagatcaagtacaattctgcttacgaaagggcatttcgacaggtttttggtactacaattatttgtcgcgatttgactataggcgctcagtatgccaaaagtcacggactcaatgctgtgacgctcgaaggcgatacgacaaataaacgtggagctatgactggcggatacattgacccaaagagctccaggttggatgctgtgcacaaggtcaatgagtcaagagataggtatgaaaagttacaagaggaggcatctacaaagcaaagggaactcgagaaaaaggaccaggagctcacccatgcacgaggagaagagcataaattagagcagcggcttcggcaaatggacgacggctacgctccacttcgttcagaattacacaccaagaataaccagactgtggtggaaagagaacgactggaggacgcaatcaggcggcgagatactattgacaggcacatgaaggaattcggtgacattttaagtgcccatgaagcggagttatcgtccgatttcaagaaagctctctcggcggccgaagagaaacagctagaatcattcggcacgcaggtacagcagctccaaaaggaatggaacgaagtttctaccgcgcgacgagatttggagaaccgcaagcaaaagctcgaggtcgacctccgaacaaatctccgtcttaagctcgatcaactcactagccaagcaatcgagtccgcttctagtggaagtagcgacttgagagaagcgaaacgtgagctcaagaaggcacaagacgctgtctcttcggtagaaagtcaattagaagggaacaaccagtcattagacgaagccgagtcaaagatcaccaagctcgagaagcagaagggccagaaggaagcagagctacaagaaattgcaagagagattgcaaagcaagaaaagaggatagaaaagagcttccagaaaaaggcattgctcacggctgcgggggctgaagtcgcgaagaatattcgtgaacttggcgtagtgccagatgaggcattcagcaaatatgcccatctagatccgacaactgtgagttttgacatcccatctgtccaccttgcttgcagccaccatttcactaacgtaacgatacagattagcaaacgcctcaagaaagtatcagacgcgctaaagaagtacaagcatgtcaacaagaaagctttggaacagtacaatagtttcactgtccagcaggaacagctcatgaagcgtcgacaagagcttgacgactcgcaacagtccattgaggaactggtagagcatctagatcaacgtaaagacgaggccatcgaacgaacgttcaaacaagtgtccaaggagtttgccacaatatttgaaaggcttgtccctgctggtcatggtcgtctcgtcattcaacgtcgagccgataggcgtgcagaccccgacgaatctgacgaggaacgtcgtacgagtgttgagaactacatcggtgttggcattagtgtttcattcaattcgaaagttgctgatgagcaacaacgaattcagcagttgtctggtggccagaagagtctgtgcgccctatgcttgattttcgcgctccaacaaactgagagtagtccgatggtcatattcgacgaggtcgacgccaatctcgatgcacaataccgtacagccgttgcggggcttctcgagtccatctccaccaccgcaggaacgcagttcatctgcaccaccttccgaccggaaatcgtccacgtcgctgataagtgctatggtgtcttgttcagaaataagaacagtactatcaactgtgtcagcacggaacaggctttagacttcgtcgaaggccaagcaccgaagtag

SEQ ID NO: 6934 - protein, 1218 aa, Muscodor strobelii
  misc_feature: SGI Peptide ID NO. 562066
  misc_feature (521)..(634): Pfam Id: PF06470 Pfam Desc: SMC proteins Flexible Hinge Domain
  misc_feature (2)..(1199): Pfam Id: PF02463 Pfam Desc: RecF/RecN/SMC N terminal domain
  misc_feature (1)..(1216): NCBI GI: 256733196 Blast Desc: condensin complex component SMC3 [Nectria haematococca mpVI 77-13-4]
  misc_feature (1)..(1216): NCBI GI: 46124753 Blast Desc: FG06754.1 [Gibberella zeae PH-1]
  misc_feature (1)..(1218): NCBI GI: 154292859 Blast Desc: BC1G_14462 [Botryotinia fuckeliana B05.10] gi|150845739|gb|EDN20932.1| BC1G_14462 [Botryotinia fuckeliana B05.10]
  misc_feature (1)..(1215): NCBI GI: 116207744 Blast Desc: CHGG_03165 [Chaetomium globosum CBS 148.51] gi|88183762|gb|EAQ91230.1| CHGG_03165 [Chaetomium globosum CBS 148.51]
  misc_feature (1)..(1215): NCBI GI: 171686230 Blast Desc: protein product [Podospora anserina] gi|170943076|emb|CAP68729.1| protein product [Podospora anserina]
  misc_feature (56)..(1218): NCBI GI: 156052513 Blast Desc: SS1G_06422 [Sclerotinia sclerotiorum 1980] gi|154704202|gb|EDO03941.1| SS1G_06422 [Sclerotinia sclerotiorum 1980]
  misc_feature (1)..(1215): NCBI GI: 212527382 Blast Desc: chromosome segregation protein SudA, [Penicillium marneffei ATCC 18224] gi|210073246|gb|EEA27333.1| chromosome segregation protein SudA, [Penicillium marneffei ATCC 18224]
  misc_feature (1)..(1215): NCBI GI: 242783568 Blast Desc: chromosome segregation protein SudA, [Talaromyces stipitatus ATCC 10500] gi|218720360|gb|EED19779.1| chromosome segregation protein SudA, [Talaromyces stipitatus ATCC 10500]
  misc_feature (1)..(1215): NCBI GI: 121716270 Blast Desc: chromosome segregation protein SudA, [Aspergillus clavatus NRRL 1] gi|119403901|gb|EAW14318.1| chromosome segregation protein SudA, [Aspergillus clavatus NRRL 1]
  misc_feature (1)..(1215): NCBI GI: 71002120 Blast Desc: chromosome segregation protein SudA [Aspergillus fumigatus Af293] gi|66853379|gb|EAL93703.1| chromosome segregation protein SudA, [Aspergillus fumigatus Af293] protein
MYIKQIIIQGFKSYKDQTVMEPFSPGTNVVVGRNGSGKSNFFAAIRFVLSDAYTQMGREERQALLHEGSGSAVMSAYVEVIFDNSDDRFATGHKEVVLRRTIGLKRDEYSIDKKVVPKTEVTQLLETAGFSKSNPYYIVPQGRVTALTNMKESERLNLLKEVAGTQVYESRRTESLKIMTDTNNKREKIDELLDYIKERLNELEEEKEELRGYQDKDRERRCLEYAYHYQSQNSIEEKLAELEDSRQGGIEDTDENRELYSAGEKVIASLDAEINKLQQQMEMLRLDRQQLTEDRRESARAQATAELTVKDLSSSMSAQEQAKAEHDAELNRVKTAIASEESELKKLTPDFEKRKRKEAEVKLALDTAEAGRQRLFTKQTRGTQFRNKAERDAYLKTHINDLNISMSTQKATRLDADEQVKGIETSIQELDEEIANLRQNNEGFAGNRAALAEDLHKARDVVHKLHDEVKLLRREQQRLDVQISSEQGSKAHAEDNLRKAMDSNTSRGLATIRRLKQQQDIPGAYGTLAELLTVDDNYRLPVEQVAGASLFHYVVDNEETSTYLVNALQKQSGGRVTFMPLSRLEPKHAKFPNAQDAIPLLSKIKYNSAYERAFRQVFGTTIICRDLTIGAQYAKSHGLNAVTLEGDTTNKRGAMTGGYIDPKSSRLDAVHKVNESRDRYEKLQEEASTKQRELEKKDQELTHARGEEHKLEQRLRQMDDGYAPLRSELHTKNNQTVVERERLEDAIRRRDTIDRHMKEFGDILSAHEAELSSDFKKALSAAEEKQLESFGTQVQQLQKEWNEVSTARRDLENRKQKLEVDLRTNLRLKLDQLTSQAIESASSGSSDLREAKRELKKAQDAVSSVESQLEGNNQSLDEAESKITKLEKQKGQKEAELQEIAREIAKQEKRIEKSFQKKALLTAAGAEVAKNIRELGVVPDEAFSKYAHLDPTTVSFDIPSVHLACSHHFTNVTIQISKRLKKVSDALKKYKHVNKKALEQYNSFTVQQEQLMKRRQELDDSQQSIEELVEHLDQRKDEAIERTFKQVSKEFATIFERLVPAGHGRLVIQRRADRRADPDESDEERRTSVENYIGVGISVSFNSKVADEQQRIQQLSGGQKSLCALCLIFALQQTESSPMVIFDEVDANLDAQYRTAVAGLLESISTTAGTQFICTTFRPEIVHVADKCYGVLFRNKNSTINCVSTEQALDFVEGQAPK

SEQ ID NO: 6935 - DNA, 4869 bp, Muscodor strobelii
  misc_feature: SGI EST ID NO. CUFF.17271.0
  misc_feature: Variant of the nucleotide sequence at SEQ ID NO 6933
tttcgacaactacctcgcccagcgtcgcatcccctttgaccccgggatccacggtcgtatgtgcttcgcgacacccatttgagtacaattcacgcgctgcccgtccggcagcacctgtcgcgaccatgtatatcaagcagatcatcatccagggcttcaagagctacaaggaccagacggtcatggagcccttctcgcccgggacaaacgtcgtcgtcggccgcaacggctccggcaagagcaacttcttcgccgcgatccgattcgtcctcagcgacgcctacacccagatgggccgcgaagagcgccaggccctgctccacgagggttcgggctcggccgtcatgtccgcatacgtcgaggtcatcttcgacaacagcgacgaccgttttgccaccggccacaaggaagtcgtcctgcgccgcaccatcggcctaaagcgagacgaatactcaatcgacaagaaggtcgttccaaagaccgaggtcacccagcttctcgagaccgccggtttctccaagtccaacccctactacatcgtgccccagggccgggttacggccctcaccaacatgaaggagtcggagcggttgaatctgctgaaagaagtcgccggtacccaagtctacgagtcgcgccgaactgagtctctcaagatcatgaccgacacgaataacaagagagagaagattgacgagctactggactacatcaaggagcgcctgaatgaactcgaggaggagaaagaggagctccgaggctaccaggacaaagatcgggaacgccggtgcctggaatacgcatatcactatcaatcgcagaactctatcgaggaaaagctcgctgaacttgaagactcgcgtcaaggcgggatcgaggataccgacgaaaatcgcgagctctacagcgcaggcgagaaagtcatcgcatccctcgacgctgaaataaacaaactacagcagcagatggaaatgctccgcctagatcgtcagcagctaacagaagatcgccgcgaaagcgctcgagcccaagccaccgcggagctgacagtcaaggatctctctagcagcatgtccgcacaggagcaagcaaaggcagagcacgatgctgaactgaatcgtgtcaagacagctatagcgtcggaagagagtgaactgaagaagctcactcccgacttcgaaaagagaaagcgaaaagaagccgaagtcaaattggctcttgataccgccgaagccgggcgacaacgactatttacaaaacagacaagaggaactcaatttcgaaacaaagccgaacgcgatgcctacttgaagacacatattaatgatctgaacataagcatgagcacgcagaaagccactcggctcgatgctgatgagcaggtcaaagggatagaaacttccatccaagaacttgacgaggaaattgcgaatctacggcaaaacaacgaggggtttgcaggtaaccgagcagctctcgctgaggacctccataaggccagggacgttgttcataagcttcacgacgaggtgaagcttcttcgtcgggaacaacagagattggacgtacagataagcagcgaacaaggctcaaaagcgcatgcagaggataatctaagaaaagccatggactctaatacatccaggggcttggctacgatccgtcgactcaagcaacaacaggacattcccggagcctatggcactcttgcagaattgttgactgtcgacgacaactaccgtctgccagtggagcaggtggcaggtgcaagcttgttccattacgttgtagataacgaggaaacctcaacgtatctggtcaatgcattgcaaaagcagtccggcggaagagtgactttcatgcctctatcaaggctcgaaccgaaacatgccaagttccccaatgcccaagatgcaattccgctgcttagcaagatcaagtacaattctgcttacgaaagggcatttcgacaggtttttggtactacaattatttgtcgcgatttgactataggcgctcagtatgccaaaagtcacggactcaatgctgtgacgctcgaaggcgatacgacaaataaacgtggagctatgactggcggatacattgacccaaagagctccaggttggatgctgtgcacaaggtcaatgagtcaagagataggtatgaaaagttacaagaggaggcatctacaaagcaaagggaactcgagaaaaaggaccaggagctcacccatgcacgaggagaagagcataaattagagcagcggcttcggcaaatggacgacggctacgctccacttcgttcagaattacacaccaagaataaccagactgtggtggaaagagaacgactggaggacgcaatcaggcggcgagatactattgacaggcacatgaaggaattcggtgacattttaagtgcccatgaagcggagttatcgtccgatttcaagaaagctctctcggcggccgaagagaaacagctagaatcattcggcacgcaggtacagcagctccaaaaggaatggaacgaagtttctaccgcgcgacgagatttggagaaccgcaagcaaaagctcgaggtcgacctccgaacaaatctccgtcttaagctcgatcaactcactagccaagcaatcgagtccgcttctagtggaagtagcgacttgagagaagcgaaacgtgagctcaagaaggcacaagacgctgtctcttcggtagaaagtcaattagaagggaacaaccagtcattagacgaagccgagtcaaagatcaccaagctcgagaagcagaagggccagaaggaagcagagctacaagaaattgcaagagagattgcaaagcaagaaaagaggatagaaaagagcttccagaaaaaggcattgctcacggctgcgggggctgaagtcgcgaagaatattcgtgaacttggcgtagtgccagatgaggcattcagcaaatatgcccatctagatccgacaactattagcaaacgcctcaagaaagtatcagacgcgctaaagaagtacaagcatgtcaacaagaaagctttggaacagtacaatagtttcactgtccagcaggaacagctcatgaagcgtcgacaagagcttgacgactcgcaacagtccattgaggaactggtagagcatctagatcaacgtaaagacgaggccatcgaacgaacgttcaaacaagtgtccaaggagtttgccacaatatttgaaaggcttgtccctgctggtcatggtcgtctcgtcattcaacgtcgagccgataggcgtgcagaccccgacgaatctgacgaggaacgtcgtacgagtgttgagaactacatcggtgttggcattagtgtttcattcaattcgaaagttgctgatgagcaacaacgaattcagcagttgtctggtggccagaagagtctgtgcgccctatgcttgattttcgcgctccaacaaactgagagtagtccgatggtcatattcgacgaggtcgacgccaatctcgatgcacaataccgtacagccgttgcggggcttctcgagtccatctccaccaccgcaggaacgcagttcatctgcaccaccttccgaccggaaatcgtccacgtcgctgataagtgctatggtgtcttgttcagaaataagaacagtactatcaactgtgtcagcacggaacaggctttagacttcgtcgaaggccaagcaccgaagtagacgagagagagacggctgttttatgtaccatgtatgtatgttttcaaggcgaaggagttgataccagggaatgctggctcggacatagtaaatgtttatgaggtacaaaagccaggatgctgcgctaatgctctatctaattcatgtctatattgatgttgatgatagctgttagaatggatcgcttgctgtgacaacactcattggtgattcgacagtacagagtttacagagcatcttaagaattaagcagaaactggttcgaagacccttgtcgttgtgttcacagattttatggttgcaaagaggttctaatccagtgctgggctcgtactcagtagtgccacttttgactcctgcctgacactgcattttgtgtaacaaaatgcgcaacgtgttcatggtattgtgacatacgccatcctcaagatgactatagacctcttattcatcttctcctccacagcattctttacaagtcctcaacttgtaatttgtcttttgtctgatcggcctcattacgagccgggttgtcggtgagttcaccagcaccggtatgcgaaatattttccttctttcctccatcgctttgcgcgactcatctccagattcgaggacgggaactcgactatcggcatctttgctatatgcggcatggtgctcctctattctcttccttctctcttggggttcgttctcgacccacttgcgattccaccgcctgctgcagcaaggatatataaaatctgtgatagacgaattttgatcgcaaaagaaacaataaggaatggcaaggagaattaatgcgtttccaaaataccgcctccaatcacatttttcaggctcgattaatacctcagaataaacagattcggtcgattctttgagtgagatgatatctatgacccaaacctttgtcggcgtagggagcagggcttgactgtcctcactcgggggtacatgaacagcgggagagtgatatggttgcaactgaactgaaatctgaatgctcaatttcggaattatgaaattacgcatttgtttatctcggtccacgggtataaggacctaagctctcatatcagtgtgttttcacgaatttgccttgaagggtcccaattttgaccacagagccgggcttggtgattagaag

SEQ ID NO: 6936 - DNA, 3591 bp, Muscodor strobelii
  misc_feature: SGI cDNA ID NO. 562067
  misc_feature: Encodes the peptide sequence at SEQ ID NO 6937
atgtatatcaagcagatcatcatccagggcttcaagagctacaaggaccagacggtcatggagcccttctcgcccgggacaaacgtcgtcgtcggccgcaacggctccggcaagagcaacttcttcgccgcgatccgattcgtcctcagcgacgcctacacccagatgggccgcgaagagcgccaggccctgctccacgagggttcgggctcggccgtcatgtccgcatacgtcgaggtcatcttcgacaacagcgacgaccgttttgccaccggccacaaggaagtcgtcctgcgccgcaccatcggcctaaagcgagacgaatactcaatcgacaagaaggtcgttccaaagaccgaggtcacccagcttctcgagaccgccggtttctccaagtccaacccctactacatcgtgccccagggccgggttacggccctcaccaacatgaaggagtcggagcggttgaatctgctgaaagaagtcgccggtacccaagtctacgagtcgcgccgaactgagtctctcaagatcatgaccgacacgaataacaagagagagaagattgacgagctactggactacatcaaggagcgcctgaatgaactcgaggaggagaaagaggagctccgaggctaccaggacaaagatcgggaacgccggtgcctggaatacgcatatcactatcaatcgcagaactctatcgaggaaaagctcgctgaacttgaagactcgcgtcaaggcgggatcgaggataccgacgaaaatcgcgagctctacagcgcaggcgagaaagtcatcgcatccctcgacgctgaaataaacaaactacagcagcagatggaaatgctccgcctagatcgtcagcagctaacagaagatcgccgcgaaagcgctcgagcccaagccaccgcggagctgacagtcaaggatctctctagcagcatgtccgcacaggagcaagcaaaggcagagcacgatgctgaactgaatcgtgtcaagacagctatagcgtcggaagagagtgaactgaagaagctcactcccgacttcgaaaagagaaagcgaaaagaagccgaagtcaaattggctcttgataccgccgaagccgggcgacaacgactatttacaaaacagacaagaggaactcaatttcgaaacaaagccgaacgcgatgcctacttgaagacacatattaatgatctgaacataagcatgagcacgcagaaagccactcggctcgatgctgatgagcaggtcaaagggatagaaacttccatccaagaacttgacgaggaaattgcgaatctacggcaaaacaacgaggggtttgcaggtaaccgagcagctctcgctgaggacctccataaggccagggacgttgttcataagcttcacgacgaggtgaagcttcttcgtcgggaacaacagagattggacgtacagataagcagcgaacaaggctcaaaagcgcatgcagaggataatctaagaaaagccatggactctaatacatccaggggcttggctacgatccgtcgactcaagcaacaacaggacattcccggagcctatggcactcttgcagaattgttgactgtcgacgacaactaccgtctgccagtggagcaggtggcaggtgcaagcttgttccattacgttgtagataacgaggaaacctcaacgtatctggtcaatgcattgcaaaagcagtccggcggaagagtgactttcatgcctctatcaaggctcgaaccgaaacatgccaagttccccaatgcccaagatgcaattccgctgcttagcaagatcaagtacaattctgcttacgaaagggcatttcgacaggtttttggtactacaattatttgtcgcgatttgactataggcgctcagtatgccaaaagtcacggactcaatgctgtgacgctcgaaggcgatacgacaaataaacgtggagctatgactggcggatacattgacccaaagagctccaggttggatgctgtgcacaaggtcaatgagtcaagagataggtatgaaaagttacaagaggaggcatctacaaagcaaagggaactcgagaaaaaggaccaggagctcacccatgcacgaggagaagagcataaattagagcagcggcttcggcaaatggacgacggctacgctccacttcgttcagaattacacaccaagaataaccagactgtggtggaaagagaacgactggaggacgcaatcaggcggcgagatactattgacaggcacatgaaggaattcggtgacattttaagtgcccatgaagcggagttatcgtccgatttcaagaaagctctctcggcggccgaagagaaacagctagaatcattcggcacgcaggtacagcagctccaaaaggaatggaacgaagtttctaccgcgcgacgagatttggagaaccgcaagcaaaagctcgaggtcgacctccgaacaaatctccgtcttaagctcgatcaactcactagccaagcaatcgagtccgcttctagtggaagtagcgacttgagagaagcgaaacgtgagctcaagaaggcacaagacgctgtctcttcggtagaaagtcaattagaagggaacaaccagtcattagacgaagccgagtcaaagatcaccaagctcgagaagcagaagggccagaaggaagcagagctacaagaaattgcaagagagattgcaaagcaagaaaagaggatagaaaagagcttccagaaaaaggcattgctcacggctgcgggggctgaagtcgcgaagaatattcgtgaacttggcgtagtgccagatgaggcattcagcaaatatgcccatctagatccgacaactattagcaaacgcctcaagaaagtatcagacgcgctaaagaagtacaagcatgtcaacaagaaagctttggaacagtacaatagtttcactgtccagcaggaacagctcatgaagcgtcgacaagagcttgacgactcgcaacagtccattgaggaactggtagagcatctagatcaacgtaaagacgaggccatcgaacgaacgttcaaacaagtgtccaaggagtttgccacaatatttgaaaggcttgtccctgctggtcatggtcgtctcgtcattcaacgtcgagccgataggcgtgcagaccccgacgaatctgacgaggaacgtcgtacgagtgttgagaactacatcggtgttggcattagtgtttcattcaattcgaaagttgctgatgagcaacaacgaattcagcagttgtctggtggccagaagagtctgtgcgccctatgcttgattttcgcgctccaacaaactgagagtagtccgatggtcatattcgacgaggtcgacgccaatctcgatgcacaataccgtacagccgttgcggggcttctcgagtccatctccaccaccgcaggaacgcagttcatctgcaccaccttccgaccggaaatcgtccacgtcgctgataagtgctatggtgtcttgttcagaaataagaacagtactatcaactgtgtcagcacggaacaggctttagacttcgtcgaaggccaagcaccgaagtag

SEQ ID NO: 6937 - protein, 1196 aa, Muscodor strobelii
  misc_feature: SGI Peptide ID NO. 562067
  misc_feature (521)..(634): Pfam Id: PF06470 Pfam Desc: SMC proteins Flexible Hinge Domain
  misc_feature (2)..(1177): Pfam Id: PF02463 Pfam Desc: RecF/RecN/SMC N terminal domain
  misc_feature (1)..(1194): NCBI GI: 256733196 Blast Desc: condensin complex component SMC3 [Nectria haematococca mpVI 77-13-4]
  misc_feature (1)..(1194): NCBI GI: 46124753 Blast Desc: FG06754.1 [Gibberella zeae PH-1]
  misc_feature (1)..(1196): NCBI GI: 154292859 Blast Desc: BC1G_14462 [Botryotinia fuckeliana B05.10] gi|150845739|gb|EDN20932.1| BC1G_14462 [Botryotinia fuckeliana B05.10]
  misc_feature (1)..(1193): NCBI GI: 116207744 Blast Desc: CHGG_03165 [Chaetomium globosum CBS 148.51] gi|88183762|gb|EAQ91230.1| CHGG_03165 [Chaetomium globosum CBS 148.51]
  misc_feature (1)..(1193): NCBI GI: 171686230 Blast Desc: protein product [Podospora anserina] gi|170943076|emb|CAP68729.1| protein product [Podospora anserina]
  misc_feature (56)..(1196): NCBI GI: 156052513 Blast Desc: SS1G_06422 [Sclerotinia sclerotiorum 1980] gi|154704202|gb|EDO03941.1| SS1G_06422 [Sclerotinia sclerotiorum 1980]
  misc_feature (1)..(1193): NCBI GI: 212527382 Blast Desc: chromosome segregation protein SudA, [Penicillium marneffei ATCC 18224] gi|210073246|gb|EEA27333.1| chromosome segregation protein SudA, [Penicillium marneffei ATCC 18224]
  misc_feature (1)..(1193): NCBI GI: 242783568 Blast Desc: chromosome segregation protein SudA, [Talaromyces stipitatus ATCC 10500] gi|218720360|gb|EED19779.1| chromosome segregation protein SudA, [Talaromyces stipitatus ATCC 10500]
  misc_feature (1)..(1193): NCBI GI: 121716270 Blast Desc: chromosome segregation protein SudA, [Aspergillus clavatus NRRL 1] gi|119403901|gb|EAW14318.1| chromosome segregation protein SudA, [Aspergillus clavatus NRRL 1]
  misc_feature (1)..(1193): NCBI GI: 71002120 Blast Desc: chromosome segregation protein SudA [Aspergillus fumigatus Af293] gi|66853379|gb|EAL93703.1| chromosome segregation protein SudA, [Aspergillus fumigatus Af293] protein
MYIKQIIIQGFKSYKDQTVMEPFSPGTNVVVGRNGSGKSNFFAAIRFVLSDAYTQMGREERQALLHEGSGSAVMSAYVEVIFDNSDDRFATGHKEVVLRRTIGLKRDEYSIDKKVVPKTEVTQLLETAGFSKSNPYYIVPQGRVTALTNMKESERLNLLKEVAGTQVYESRRTESLKIMTDTNNKREKIDELLDYIKERLNELEEEKEELRGYQDKDRERRCLEYAYHYQSQNSIEEKLAELEDSRQGGIEDTDENRELYSAGEKVIASLDAEINKLQQQMEMLRLDRQQLTEDRRESARAQATAELTVKDLSSSMSAQEQAKAEHDAELNRVKTAIASEESELKKLTPDFEKRKRKEAEVKLALDTAEAGRQRLFTKQTRGTQFRNKAERDAYLKTHINDLNISMSTQKATRLDADEQVKGIETSIQELDEEIANLRQNNEGFAGNRAALAEDLHKARDVVHKLHDEVKLLRREQQRLDVQISSEQGSKAHAEDNLRKAMDSNTSRGLATIRRLKQQQDIPGAYGTLAELLTVDDNYRLPVEQVAGASLFHYVVDNEETSTYLVNALQKQSGGRVTFMPLSRLEPKHAKFPNAQDAIPLLSKIKYNSAYERAFRQVFGTTIICRDLTIGAQYAKSHGLNAVTLEGDTTNKRGAMTGGYIDPKSSRLDAVHKVNESRDRYEKLQEEASTKQRELEKKDQELTHARGEEHKLEQRLRQMDDGYAPLRSELHTKNNQTVVERERLEDAIRRRDTIDRHMKEFGDILSAHEAELSSDFKKALSAAEEKQLESFGTQVQQLQKEWNEVSTARRDLENRKQKLEVDLRTNLRLKLDQLTSQAIESASSGSSDLREAKRELKKAQDAVSSVESQLEGNNQSLDEAESKITKLEKQKGQKEAELQEIAREIAKQEKRIEKSFQKKALLTAAGAEVAKNIRELGVVPDEAFSKYAHLDPTTISKRLKKVSDALKKYKHVNKKALEQYNSFTVQQEQLMKRRQELDDSQQSIEELVEHLDQRKDEAIERTFKQVSKEFATIFERLVPAGHGRLVIQRRADRRADPDESDEERRTSVENYIGVGISVSFNSKVADEQQRIQQLSGGQKSLCALCLIFALQQTESSPMVIFDEVDANLDAQYRTAVAGLLESISTTAGTQFICTTFRPEIVHVADKCYGVLFRNKNSTINCVSTEQALDFVEGQAPK

SEQ ID NO: 6938 - DNA, 4869 bp, Muscodor strobelii; identical to SEQ ID NO: 6935
  misc_feature: SGI EST ID NO. CUFF.17271.0
  misc_feature: Variant of the nucleotide sequence at SEQ ID NO 6936

SEQ ID NO: 6939 - DNA, 1329 bp, Muscodor strobelii
  misc_feature: SGI cDNA ID NO. 562068
  misc_feature: Encodes the peptide sequence at SEQ ID NO 6940
atggcttgttgcactcacatcgattgtcccaaagcgatcgatcctagcgacgagaacatttttactacggcgccgacgtatcacaaggaatggctttctatgcaacccgacctgtccggcatacctccagtcagcatcgactatctcccaaaagacgatgccctaactcgcccgtctacgaaagatcaggtcaaagccagtagactgcacagaccaggatggaccggattcttatgcaagacctgcaatgctctcaaccagcatatactgtggtccaagcatatttgtagacgatgtgggagccagccgagtcctccacttcccctggttcgtctcccgttcgaagacgttgtcgaccagtcattcatggccctgtccgaaggcagtcatgtcccagggtgtaaggtttacaaggttggagatccagccacggaggcaatcaccagttatgatgtgaaaacaacacagaatttcatattccaaaagttcgagttcaccaaagataactttgtggcagtcgtctacccaaagcaacacatcatcaacagcccaggcgagaatccatccgaatggtacaggagatgtattgactacttcgacgatggctcggtggaaatggaacgctattccttcaaatgcgactccgggcaacggagtgcctttttcggcactaacttcggcaatcattacgacttcaaacaggatgtacgagacacgtcattcgaagacgctgacgaagtgatacgaacactgaaacagtacctggagaacgcagtggaagaggtaataggtagggcagtgagtttcaatgaatgcctagctctactatacctgaagaacagcagtatgggatggcatgccgacaatgagaaaggcatcatcggcgacgtgattgctgctgtttctctcggtggtacctgcaccatggaatttggtctcaacgaagacgcctacacgggaaagagtggcgacgaaattgtgaacacagaagccccgctgcttcggggagccgccaaaaagtttgaaaaggacagactggatgaccttcttagcaaacaagagatcagcaaagatgtgcatgacactcaggtgcgagagttgctcaaaaacgtgaagcctcccagaatgccacacaagattttacaaatcaagatccccgggaccggcgccattctccttcagtctgggcctgacatcaacagattttaccagcatcgggtgtatatgaatgaagggctacagagactgtcgttcacgtttagaacggtctatccgagtcgagaacaggataccgacagccggccacggaagaggagaaagacagggtga

SEQ ID NO: 6940 - protein, 442 aa, Muscodor strobelii
  misc_feature: SGI Peptide ID NO. 562068
  misc_feature (178)..(432): NCBI GI: 242817994 Blast Desc: TSTA_054450 [Talaromyces stipitatus ATCC 10500] gi|218713509|gb|EED12933.1| TSTA_054450 [Talaromyces stipitatus ATCC 10500]
  misc_feature (27)..(405): NCBI GI: 121712916 Blast Desc: CNH domain protein [Aspergillus clavatus NRRL 1] gi|119402222|gb|EAW12643.1| CNH domain protein [Aspergillus clavatus NRRL 1]
  misc_feature (26)..(425): NCBI GI: 226278274 Blast Desc: conserved [Paracoccidioides brasiliensis Pb01]
  misc_feature (178)..(423): NCBI GI: 67526987 Blast Desc: AN3951.2 [Aspergillus nidulans FGSC A4] gi|40740070|gb|EAA59260.1| [Aspergillus nidulans FGSC A4] gi|259481473|tpe|CBF75024.1| TPA: conserved [Aspergillus nidulans
  misc_feature (26)..(425): NCBI GI: 226291101 Blast Desc: conserved [Paracoccidioides brasiliensis Pb18]
  misc_feature (58)..(435): NCBI GI: 189192468 Blast Desc: conserved [Pyrenophora tritici-repentis Pt-1C-BFP] gi|187974179|gb|EDU41678.1| conserved [Pyrenophora tritici-repentis Pt-1C-BFP]
  misc_feature (27)..(404): NCBI GI: 119479823 Blast Desc: NFIA_079850 [Neosartorya fischeri NRRL 181] gi|119408094|gb|EAW18043.1| conserved [Neosartorya fischeri NRRL 181]
  misc_feature (215)..(425): NCBI GI: 225679379 Blast Desc: conserved [Paracoccidioides brasiliensis Pb03]
  misc_feature (26)..(423): NCBI GI: 238494548 Blast Desc: conserved [Aspergillus flavus NRRL3357] gi|220695160|gb|EED51503.1| conserved [Aspergillus flavus NRRL3357]
  misc_feature (71)..(425): NCBI GI: 238844469 Blast Desc: conserved [Microsporum canis CBS 113480]
MACCTHIDCPKAIDPSDENIFTTAPTYHKEWLSMQPDLSGIPPVSIDYLPKDDALTRPSTKDQVKASRLHRPGWTGFLCKTCNALNQHILWSKHICRRCGSQPSPPLPLVRLPFEDVVDQSFMALSEGSHVPGCKVYKVGDPATEAITSYDVKTTQNFIFQKFEFTKDNFVAVVYPKQHIINSPGENPSEWYRRCIDYFDDGSVEMERYSFKCDSGQRSAFFGTNFGNHYDFKQDVRDTSFEDADEVIRTLKQYLENAVEEVIGRAVSFNECLALLYLKNSSMGWHADNEKGIIGDVIAAVSLGGTCTMEFGLNEDAYTGKSGDEIVNTEAPLLRGAAKKFEKDRLDDLLSKQEISKDVHDTQVRELLKNVKPPRMPHKILQIKIPGTGAILLQSGPDINRFYQHRVYMNEGLQRLSFTFRTVYPSREQDTDSRPRKRRKTG

SEQ ID NO: 6941 - DNA, 1034 bp, Muscodor strobelii
  misc_feature: SGI EST ID NO. CUFF.17266.0
  misc_feature: Variant of the nucleotide sequence at SEQ ID NO 6939
gcaacacatcatcaacagcccaggcgagaatccatccgaatggtacaggagatgtattgactacttcgacgatggctcggtggaaatggaacgctattccttcaaatgcgactccgggcaacggagtgcctttttcggcactaacttcggcaatcattacgacttcaaacaggatgtacgagacacgtcattcgaagacgctgacgaagtgatacgaacactgaaacagtacctggagaacgcagtggaagaggtaataggtagggcagtgagtttcaatgaatgcctagctctactatacctgaagaacagcagtatgggatggcatgccgacaatgagaaaggcatcatcggcgacgtgattgctgctgtttctctcggtggtacctgcaccatggaatttggtctcaacgaagacgcctacacgggaaagagtggcgacgaaattgtgaacacagaagccccgctgcttcggggagccgccaaaaagtttgaaaaggacagactggatgaccttcttagcaaacaagagatcagcaaagatgtgcatgacactcaggtgcgagagttgctcaaaaacgtgaagcctcccagaatgccacacaagattttacaaatcaagatccccgggaccggcgccattctccttcagtctgggcctgacatcaacagattttaccagcatcgggtgtatatgaatgaagggctacagagactgtcgttcacgtttagaacggtctatccgagtcgagaacaggataccgacagccggccacggaagaggagaaagacagggtgatctggtcaattttatcactctttttgagtggaatagttcgagagtatcgattgagagtttcgtcatactaatgttgtacatgcgtgatgtcggaattgacgtgctgtgtatttggcttccctattatgctgtgaataatatgttaccaacatattggattttaactacgactatatatgttgtccgtaattttcatatctgggtcgaagtaaatagttatactattgcggttccc

SEQ ID NO: 6942 - DNA, 524 bp, Muscodor strobelii
  misc_feature: SGI cDNA ID NO. 562069
  misc_feature: Elevated expression when VOC is produced
  misc_feature: Encodes the peptide sequence at SEQ ID NO 6943
atggttcgacaacaggtttcagctagcgtataccttgagagctgtttggacgctcaagggcttgcgccaaaagttgctctccctttgaaaccagatggaacctttaacaaggagacatcattgagtgaaaaggggaggtatggacggagcagaatcaagaatatctgggaagcgtatctgacacgcttcccctggagtcgagtgtcagagccacggactttgatggagttcatgagaactatcggtcatggcatgagtcctcaagtatctcggagaaaaagatttcgagggggaaaggccggcccggccaccagttctctgatgcaatattttgatctccttcaatgcgtacttgtggagcaaggtgcccccattgatacaaaggttgcagaacaagtccgattgtacatccagaacgaactgcgagcggagctcaactccccgttaaccgtgcggccaagacgatggccacgaagacagcattttatctacctaatggagcagctcttagagaaggactggac

SEQ ID NO: 6943 - protein, 174 aa, Muscodor strobelii
  misc_feature: SGI Peptide ID NO. 562069
  misc_feature: Useful for introducing or modulating the production of volatile compounds
MVRQQVSASVYLESCLDAQGLAPKVALPLKPDGTFNKETSLSEKGRYGRSRIKNIWEAYLTRFPWSRVSEPRTLMEFMRTIGHGMSPQVSRRKRFRGGKAGPATSSLMQYFDLLQCVLVEQGAPIDTKVAEQVRLYIQNELRAELNSPLTVRPRRWPRRQHFIYLMEQLLEKDW

SEQ ID NO: 6944 - DNA, 1004 bp, Muscodor strobelii
  misc_feature: SGI EST ID NO. CUFF.17387.0
  misc_feature: Variant of the nucleotide sequence at SEQ ID NO 6942
cagtgcaatggcatcctttctgcttccggactcacatagttggatgatactcagagatacctcattctacagaagattgtggccgaggtaccgcaagatacctgaggtccagatatggaatacagcattcgtgccgtctctcaagcatccaagaatctcctccctgtccaaaacctgaacatggctcctacacgccgcgcaaatccgcaattggctcaccaacgacccaagcgtcttcgccctcgaattcaggatggccgaggaagcaaatcaggctcctggagccgataccgcgtcgagacttgtatcgcattccggctctcgtataaattagcgaaccggcagagcagaaattcctattcaatgattcatccaccaggcttccttgcagtacctgagaagcgatcttaattctcttcgtcgatacgccatggttcgacaacaggtttcagctagcgtataccttgagagctgtttggacgctcaagggcttgcgccaaaagttgctctccctttgaaaccagatggaacctttaacaaggagacatcattgagtgaaaaggggaggtatggacggagcagaatcaagaatatctgggaagcgtaagtgctatgcattcctagtaccagtttcgcagatcaactcacgccgtgataggtatctgacacgcttcccctggagtcgagtgtcagagccacggactttgatggagttcatgagaactatcggtcatggcatgagtcctcaagtatctcggagaaaaagatttcgagggggaaaggccggcccggccaccagttctctgatgcaatattttgatctccttcaatgcgtacttgtggagcaaggtgcccccattgatacaaaggttgcagaacaagtccgattgtacatccagaacgaactgcgagcggagctcaactccccgttaaccgtgcggccaagacgatggccacgaagacagcattttatctacctaatggagcagctcttagagaaggac

SEQ ID NO: 6945 - DNA, 2532 bp, Muscodor strobelii
  misc_feature: SGI cDNA ID NO. 562070
  misc_feature: Reduced expression when VOC is produced
  misc_feature: Encodes the peptide sequence at SEQ ID NO 6946
atggccgacgacgaaaggtcgccgttactatcgccagccaacaaaagacgtggctctcacgagtctgccgagtcacagccgctgctatcaaatcactcagagacacctcgatacgacggtgacaatgctgacgatgtcgcctccatccattcccaccacagccaagcttcctccgcacccactacgaagaaacactcgagaagatggccttcgttcattgccattggattcttagctgcagtggctatcgccattattgtgctcgcgtttatcgtccccgacgccgtgcaggaatacgcgcagcaggcggcagtgctggagcccacgagcttatccatcgattccatcacccccgatggcattcgcgcccgcatacaagccaatttccggctggatggatcaaaggtcgagaacaagcatgtccggaacatcggcagagctgcgacctgggtggcaagccaagtcggaagcgaagagacacgggtcgacgtctacgtgcctgactacaagaacatgctgcttggttctgctgttgttccaccgctggttgttagcctgagagatggcaagacgacaaagtttgattttgtggccgacatccaaccgggcaacgtggatggaatgcgcatgatcgcaaatgactggctggccggtagcctcgagaggcttcgcctcaagggccagaccgatttgacccttaaatccggcattttccctctcggaacacatgccatttctgagtcactcgtttttgaagcaaataagattcccgtcatgccaaagtacaacatcacgcgcttcaacgtgcaagacggccctgtaaaagggtctatggttgctgacgtatcgctgtctgcttttaatgagtatcccgtcgacctcaacatccccgagcttgctttcgaactcatggttcccggatgtgcatctgcggacccattgatcattgtagccgaagcatcaactggcgaaatccacgtggaaccgatgtccgacgttacagccaacgtctacgctgtcgtacatgagctccccgagtccttgacccgcgactgcccgcattcctcttcgtcaccattggacatgcttatcaagcagtatatgaatggcgaggaggcaacagtattcgttcgcggaagcagtcacccagatggcgaaacaccaaaatggatttcagatattctatcgagtgttaccgtccctgttcccttcccaggccgttcattggatggattactccgagacttctctttgactgatgtaggcttttctcttcccgacccatgggctgatgacgatgatccagccagcaagccgagagtctctggtaacattctcgttgtcgccggacttccgtccgaaatgaacttcagtctcaacgtgacaaaggtcagagctacatcagatgtctattacaaggggaagaaaatgggagaactcaatctcaagaaatggcaaagcgcaaactcaacaagagtcgaaggcaagagggatgatgggcctactcttgaaatcgaatcccgaatcatcgaggcacctctcgacatcaccgacagtgatgtatttagtgccgtcgtccaagccctgctatttggaaaccagcccgtgaacctcaagatcaatgctttggtggatgtcaaagtggaaacatcactaggagaactcgtcctcaaggaggttcctgcggagggcaagatcccagtaaaacctattccacatgacacggttggatcattgaccccgaagattgggtcattgagagtcttggatacatcttcggattcaatcacgctacaagcattggtcaatgtcaccaaccctacgtcgtacaccgctattgttccctacgttaacatccacgtcgtcgccaatggctcaattctcggcgatgccacaatagaaaacgcgaatatcgtcaaaggcgagaatgccaatcttcttgtttctgcgcgctggactcctcatagagacgggtctcatggacaaaagatcggaagagatctcatctcccagtatatatcaggatggaacacttctattactataaagccacatcttcaaagcattccgaaccagccacttctctgcgaggccctatcgcgtttcaacatcacgctacctatcccacatctcaagctccctggtgattcatcaagcggggggtcgcacttcatcagagacgcgactttccactttttatcttcaaccgccacatttacgctagtatcgccgctacagtataacacactctacctcgacttcgtaaatgcgaccgcactttataaccacaccgagcctgtgggcgagatactgtatgatctcccctttgcggctccaccaggcttgtcacaaacaccgagactaccggtggattggtccattggcagtgttggttatgatgcggtgcggagagcgatcggtggaaaactcaagctggatgcttttgcggatgtggatgtgaggttaggtaattgggaggagagactttggtatagagggaaaggcattggggccagtgttcatctcacgtga

SEQ ID NO: 6946 - protein, 843 aa, Muscodor strobelii
  misc_feature: SGI Peptide ID NO. 562070
  misc_feature (1)..(842): NCBI GI: 116204857 Blast Desc: CHGG_10312 [Chaetomium globosum CBS 148.51] gi|88176440|gb|EAQ83908.1| CHGG_10312 [Chaetomium globosum CBS 148.51]
  misc_feature (1)..(842): NCBI GI: 171689012 Blast Desc: protein product [Podospora anserina] gi|170944468|emb|CAP70579.1| protein product [Podospora anserina]
  misc_feature (2)..(842): NCBI GI: 39973505 Blast Desc: conserved [Magnaporthe grisea 70-15] gi|16565971|gb|AAL26323.1| [Magnaporthe grisea] gi|145017934|gb|EDK02213.1| conserved [Magnaporthe grisea 70-15]
  misc_feature (2)..(842): NCBI GI: 256732487 Blast Desc: NECHADRAFT_37937 [Nectria haematococca mpVI 77-13-4]
  misc_feature (1)..(842): NCBI GI: 46123805 Blast Desc: FG06280.1 [Gibberella zeae PH-1]
  misc_feature (6)..(842): NCBI GI: 189196616 Blast Desc: conserved [Pyrenophora tritici-repentis Pt-1C-BFP] gi|187980525|gb|EDU47151.1| conserved [Pyrenophora tritici-repentis Pt-1C-BFP]
  misc_feature (19)..(842): NCBI GI: 169604386 Blast Desc: SNOG_05205 [Phaeosphaeria nodorum SN15] gi|160706555|gb|EAT87596.2| SNOG_05205 [Phaeosphaeria nodorum SN15]
  misc_feature (9)..(842): NCBI GI: 226287864 Blast Desc: conserved [Paracoccidioides brasiliensis Pb18]
  misc_feature (1)..(842): NCBI GI: 261206444 Blast Desc: conserved [Ajellomyces dermatitidis SLH14081] gi|239593018|gb|EEQ75599.1| conserved [Ajellomyces dermatitidis SLH14081]
  misc_feature (9)..(842): NCBI GI: 225680223 Blast Desc: conserved [Paracoccidioides brasiliensis Pb03]
  misc_feature: Useful for introducing or modulating the production of volatile compounds
MADDERSPLLSPANKRRGSHESAESQPLLSNHSETPRYDGDNADDVASIHSHHSQASSAPTTKKHSRRWPSFIAIGFLAAVAIAIIVLAFIVPDAVQEYAQQAAVLEPTSLSIDSITPDGIRARIQANFRLDGSKVENKHVRNIGRAATWVASQVGSEETRVDVYVPDYKNMLLGSAVVPPLVVSLRDGKTTKFDFVADIQPGNVDGMRMIANDWLAGSLERLRLKGQTDLTLKSGIFPLGTHAISESLVFEANKIPVMPKYNITRFNVQDGPVKGSMVADVSLSAFNEYPVDLNIPELAFELMVPGCASADPLIIVAEASTGEIHVEPMSDVTANVYAVVHELPESLTRDCPHSSSSPLDMLIKQYMNGEEATVFVRGSSHPDGETPKWISDILSSVTVPVPFPGRSLDGLLRDFSLTDVGFSLPDPWADDDDPASKPRVSGNILVVAGLPSEMNFSLNVTKVRATSDVYYKGKKMGELNLKKWQSANSTRVEGKRDDGPTLEIESRIIEAPLDITDSDVFSAVVQALLFGNQPVNLKINALVDVKVETSLGELVLKEVPAEGKIPVKPIPHDTVGSLTPKIGSLRVLDTSSDSITLQALVNVTNPTSYTAIVPYVNIHVVANGSILGDATIENANIVKGENANLLVSARWTPHRDGSHGQKIGRDLISQYISGWNTSITIKPHLQSIPNQPLLCEALSRFNITLPIPHLKLPGDSSSGGSHFIRDATFHFLSSTATFTLVSPLQYNTLYLDFVNATALYNHTEPVGEILYDLPFAAPPGLSQTPRLPVDWSIGSVGYDAVRRAIGGKLKLDAFADVDVRLGNWEERLWYRGKGIGASVHLT

SEQ ID NO: 6947 - DNA, 3076 bp, Muscodor strobelii
  misc_feature: SGI EST ID NO. CUFF.17519.3
  misc_feature: Variant of the nucleotide sequence at SEQ ID NO 6945
gaggcttgttcgctgttccaagtttgtacctgattaaggactcggcattctagctgactcgatatctcaactttacattcttcaaaaactcgatgcagtagctcacactgcgtcggacggaactgtcattcaccattctgcggcaatctaagcccggcgcctattgattgttcagacccgggcgctaccaacccgctccattactacctatacatagtacctactaatagagacagaccggcatgtgcactacgagataagaggtaatcgccgtcatcaacatctacaatatccagcatccacaatggccgacgacgaaaggtcgccgttactatcgccagccaacaaaagacgtggctctcacgagtctgccgagtcacagccgctgctatcaaatcactcagagacacctcgatacgacggtgacaatgctgacgatgtcgcctccatccattcccaccacagccaagcttcctccgcacccactacgaagaaacactcgagaagatggccttcgttcattgccattggattcttagctgcagtggctatcgccattattgtgctcgcgtttatcgtccccgacgccgtgcaggaatacgcgcagcaggcggcagtgctggagcccacgagcttatccatcgattccatcacccccgatggcattcgcgcccgcatacaagccaatttccggctggatggatcaaaggtcgagaacaagcatgtccggaacatcggcagagctgcgacctgggtggcaagccaagtcggaagcgaagagacacgggtcgacgtctacgtgcctgactacaagaacatgctgcttggttctgctgttgttccaccgctggttgttagcctgagagatggcaagacgacaaagtttgattttgtggccgacatccaaccgggcaacgtggatggaatgcgcatgatcgcaaatgactggctggccggtagcctcgagaggcttcgcctcaagggccagaccgatttgacccttaaatccggcattttccctctcggaacacatgccatttctgagtcactcgtttttgaagcaaataagattcccgtcatgccaaagtacaacatcacgcgcttcaacgtgcaagacggccctgtaaaagggtctatggttgctgacgtatcgctgtctgcttttaatgagtatcccgtcgacctcaacatccccgagcttgctttcgaactcatggttcccggatgtgcatctgcggacccattgatcattgtagccgaagcatcaactggcgaaatccacgtggaaccgatgtccgacgttacagccaacgtctacgctgtcgtacatgagctccccgagtccttgacccgcgactgcccgcattcctcttcgtcaccattggacatgcttatcaagcagtatatgaatggcgaggaggcaacagtattcgttcgcggaagcagtcacccagatggcgaaacaccaaaatggatttcagatattctatcgagtgttaccgtccctgttcccttcccaggccgttcattggatggattactccgagacttctctttgactgatgtaggcttttctcttcccgacccatgggctgatgacgatgatccagccagcaagccgagagtctctggtaacattctcgttgtcgccggacttccgtccgaaatgaacttcagtctcaacgtgacaaaggtcagagctacatcagatgtctattacaaggggaagaaaatgggagaactcaatctcaagaaatggcaaagcgcaaactcaacaagagtcgaaggcaagagggatgatgggcctactcttgaaatcgaatcccgaatcatcgaggcacctctcgacatcaccgacagtgatgtatttagtgccgtcgtccaagccctgctatttggaaaccagcccgtgaacctcaagatcaatgctttggtggatgtcaaagtggaaacatcactaggagaactcgtcctcaaggaggttcctgcggagggcaagatcccagtaaaacgtccgtcctcgctactttgatcctctattccacatgacacggttggatcattgaccccgaagattgggtcattgagagtcttggatacatcttcggattcaatcacgctacaagcattggtcaatgtcaccaaccctacgtcgtacaccgctattgttccctacgttaacatccacgtcgtcgccaatggctcaattctcggcgatgccacaatagaaaacgcgaatatcgtcaaaggcgagaatgccaatcttcttgtttctgcgcgctggactcctcatagagacgggtctcatggacaaaagatcggaagagatctcatctcccagtatatatcaggatggaacacttctattactataaagccacatcttcaaagcattccgaaccagccacttctctgcgaggccctatcgcgtttcaacatcacgctacctatcccacatctcaagctccctggtgattcatcaagcggggggtcgcacttcatcagagacgcgactttccactttttatcttcaaccgccacatttacgctagtatcgccgctacagtataacacactctacctcgacttcgtaaatgcgaccgcactttataaccacaccgagcctgtgggcgagatactgtatgatctcccctttgcggctccaccaggcttgtcacaaacaccgagactaccggtggattggtccattggcagtgttggttatgatgcggtgcggagagcgatcggtggaaaactcaagctggatgcttttgcggatgtggatgtgaggttaggtaattgggaggagagactttggtatagagggaaaggcattggggccagtgttcatctcacgtgagggggcttggattgtaatgagggtacatggcgttagggaagtccttcgataatagagggcatggagtactggagttttcgtttcctgctctttcagtgtattttgagggtatggcaaatagcggcattttgtgtacctaattgaaattacatacatgacttacctaagcaccacatgcacaactccattgcgggtgtttagtgaccattacccact

SEQ ID NO: 6948 - DNA, 1077 bp, Muscodor strobelii
  misc_feature: SGI cDNA ID NO. 562071
  misc_feature: Reduced expression when VOC is produced
  misc_feature: Encodes the peptide sequence at SEQ ID NO 6949
atgacatcaaaaatgcgtccctcagtatgcaaagccgcaaagtcggctctaaaagccccctcactaaggacctactcaacagaatcccccaaggtccggcacttaatgacaatcggcgacctcacacccctagaattcacccaactcgtcaaaaacgcctcagccttcaagaccgccgtaaaatccggcttcgtacccgcagccctccaacagaaactcaccggccaaacaatcgccatgatgttcagcaagcgcagcacacgaacccgagtctcaacagaagccgccgtttcactgatggggggccacccaatgttcttgggaaaagacgacatccagctcggtgtcaacgagtcactatacgatacctcaaagatcatctcttccatgacatcctgcatggtggcgcgtgttggcccacatagcgatgtagcggggcttgcagaacactctgctgtgcctgttataaatgcgttgtctaatgacttccatcctttgcagaccatcgcagatttcttgactatccacgaggcgtttaacgatggacctgcaggcccaacgggtattgtgccagagaagttgaaggtagcttgggtgggcgatgcaaataacgtgcttttcgatctcgcaatcgcatgtttgaagctaggtgttcatatctcggttgctacgccagagggatatagtatccctaagacaatgctggcgtatatccaatctcatgcaaaatctaccgatacacccgggactctaacagagaccaacgtcccggaggaagcggtcaaggatgctaatgtcattgtcacggacacatggatatcgatgggtcaggaagaagagactgccaagcggctgaaggcttttgctgggttccaggtcacgaacgacttagcgaagcgtggtggtgcggctgcggactggaagttcatgcattgcctgccccgacatcctgaggaggtcgctgatgaggttatgtatggcccgaggtcgctggttttccaggagggtgagaatcgtctttgggctgctgttgctgcgctcgagggctttgttgtcaataaggggaagcttatctaa

SEQ ID NO: 6949 - protein, 358 aa, Muscodor strobelii
  misc_feature: SGI Peptide ID NO. 562071
  misc_feature (191)..(350): Pfam Id: PF00185 Pfam Desc: Aspartate/ornithine carbamoyltransferase, Asp/Orn binding domain
  misc_feature (33)..(178): Pfam Id: PF02729 Pfam Desc: Aspartate/ornithine carbamoyltransferase, carbamoyl-P binding domain
  misc_feature (192)..(350): Pfam Id: PF00185 Pfam Desc: Aspartate/ornithine carbamoyltransferase, Asp/Orn binding domain
  misc_feature (5)..(357): NCBI GI: 39973503 Blast Desc: conserved [Magnaporthe grisea 70-15] gi|16565970|gb|AAL26322.1| ornithine carbamoyltransferase precursor-like protein [Magnaporthe grisea] conserved grisea
  misc_feature (1)..(358): NCBI GI: 7800797 Blast Desc: ORNITHINE CARBAMOYLTRANSFERASE PRECURSOR [Neurospora crassa]
  misc_feature (5)..(357): NCBI GI: 46123807 Blast Desc: FG06281.1 [Gibberella zeae PH-1]
  misc_feature (5)..(357): NCBI GI: 256732940 Blast Desc: [Nectria haematococca mpVI 77-13-4]
  misc_feature (23)..(357): NCBI GI: 212528450 Blast Desc: ornithine carbamoyltransferase [Penicillium marneffei ATCC 18224] gi|210073780|gb|EEA27867.1| ornithine carbamoyltransferase [Penicillium marneffei ATCC 18224]
  misc_feature (13)..(357): NCBI GI: 258566165 Blast Desc: ornithine carbamoyltransferase [Uncinocarpus reesii 1704] gi|237907528|gb|EEP81929.1| ornithine carbamoyltransferase [Uncinocarpus reesii 1704]
  misc_feature (11)..(358): NCBI GI: 171689014 Blast Desc: protein product [Podospora anserina] gi|170944469|emb|CAP70580.1| protein product [Podospora anserina]
  misc_feature (23)..(357): NCBI GI: 242766412 Blast Desc: ornithine carbamoyltransferase [Talaromyces stipitatus ATCC 10500] gi|218724361|gb|EED23778.1| ornithine carbamoyltransferase [Talaromyces stipitatus ATCC 10500]
  misc_feature (14)..(357): NCBI GI: 67528422 Blast Desc: OTC_EMENI Ornithine carbamoyltransferase, mitochondrial precursor (OTCase) (Ornithine transcarbamylase) [Aspergillus nidulans FGSC A4] gi|40741136|gb|EAA60326.1| FGSC
  misc_feature (22)..(358): NCBI GI: 261206446 Blast Desc: ornithine carbamoyltransferase [Ajellomyces dermatitidis SLH14081] gi|239593019|gb|EEQ75600.1| ornithine carbamoyltransferase [Ajellomyces dermatitidis SLH14081] ER-3]
  misc_feature (23)..(357): SWISSPROT Homolog: EC 2.1.3.3 Ornithine carbamoyltransferase
  misc_feature: Useful for introducing or modulating the production of volatile compounds
MTSKMRPSVCKAAKSALKAPSLRTYSTESPKVRHLMTIGDLTPLEFTQLVKNASAFKTAVKSGFVPAALQQKLTGQTIAMMFSKRSTRTRVSTEAAVSLMGGHPMFLGKDDIQLGVNESLYDTSKIISSMTSCMVARVGPHSDVAGLAEHSAVPVINALSNDFHPLQTIADFLTIHEAFNDGPAGPTGIVPEKLKVAWVGDANNVLFDLAIACLKLGVHISVATPEGYSIPKTMLAYIQSHAKSTDTPGTLTETNVPEEAVKDANVIVTDTWISMGQEEETAKRLKAFAGFQVTNDLAKRGGAAADWKFMHCLPRHPEEVADEVMYGPRSLVFQEGENRLWAAVAALEGFVVNKGKLI

SEQ ID NO: 6950 - DNA, 1479 bp, Muscodor strobelii
  misc_feature: SGI EST ID NO. CUFF.17274.0
  misc_feature: Variant of the nucleotide sequence at SEQ ID NO 6948
gcttcatatggctggtagtatccatcttttgactcacttcaaaagatcgcgggtgagtcaatgaaagaggaagtgatttgaatgcaatcttgagatataaatcgtagtatcagttatcttcgtaccgaccctcgaagtgtcaattgcattccatctcacaccgctgtattgagcggcgacgatcattacatacctcaacaaatttagtctcgtgccgcctcatataatcacatttcactcttaacggcctacactcctcccctcacatccaaaatgacatcaaaaatgcgtccctcagtatgcaaagccgcaaagtcggctctaaaagccccctcactaaggacctactcaacagaatcccccaaggtccggcacttaatgacaatcggcgacctcacacccctagaattcacccaactcgtcaaaaacgcctcagccttcaagaccgccgtaaaatccggcttcgtacccgcagccctccaacagaaactcaccggccaaacaatcgccatgatgttcagcaagcgcagcacacgaacccgagtctcaacagaagccgccgtttcactgatggggggccacccaatgttcttgggaaaagacgacatccagctcggtgtcaacgagtcactatacgatacctcaaagatcatctcttccatgacatcctgcatggtggcgcgtgttggcccacatagcgatgtagcggggcttgcagaacactctgctgtgcctgttataaatgcgttgtctaatgacttccatcctttgcagaccatcgcagatttcttgactatccacgaggcgtttaacgatggacctgcaggcccaacgggtattgtgccagagaagttgaaggtagcttgggtgggcgatgcaaataacgtgcttttcgatctcgcaatcgcatgtttgaagctaggtgttcatatctcggttgctacgccagagggatatagtatccctaagacaatgctggcgtatatccaatctcatgcaaaatctaccgatacacccgggactctaacagagaccaacgtcccggaggaagcggtcaaggatgctaatgtcattgtcacggacacatggatatcgatgggtcaggaagaagagactgccaagcggctgaaggcttttgctgggttccaggtcacgaacgacttagcgaagcgtggtggtgcggctgcggactggaagttcatgcattgcctgccccgacatcctgaggaggtcgctgatgaggttatgtatggcccgaggtcgctggttttccaggagggtgagaatcgtctttgggctgctgttgctgcgctcgagggctttgttgtcaataaggggaagcttatctaagatatttagtattcaagttataggcgtacaaaaaggcggttcagagactggacattgtgcttatgagcaatataccacaggagttgaaaataatctacgataataggattcaaaaatactttaatggct

SEQ ID NO: 6951 - DNA, 933 bp, Muscodor strobelii
  misc_feature: SGI cDNA ID NO. 562072
  misc_feature: Reduced expression when VOC is produced
  misc_feature: Encodes the peptide sequence at SEQ ID NO 6952
atggcggctcgcttcttggtcccggccaattgcttccgggctgcaacctcgagcgcaaccgccaccgctactcgatggagctcgagcagctcaacttccgccatcgcctacaaggcacttcgccgccgccaggctcctctccctgtcagtcagaacccatcgtcgtggtctgcgcaggctgccgtctccaacatcctctacgagacgcccactccctccaaggacccgcctaagcgccatgtcctcaactgcttggtgcagaacgagcccggtgtgctgtcccgagtctccggtattctcgcagcccgcagcttcaacatcgattccttggtcgtctgccacaccgaagtcgaggatctatcccgcatgactattgtcctgacgggccaggacggcgttgtcgagcaagctcgtagacagctagaggatctcgtgcccgtctgggctgtgctcgactacacgagcgctcctcttgttcagcgcgaacttctcctagctaaggtcaacattctgggtcccgagtactttgaggagctcctgcagcatcatcgcgagatggcagccgagatcgacagcgcggacgctgatagcctgacgggcatgacgacggaggacttccaccctagcaagatggcaccttcccaagctctacgccataagcacgagcacttgaagagcattacgtatttgacgcatcagtttggaggcaaggtgctggatattagtactaacagttgcattgtcgaggtttccgcgaagcccgccagaatcgattcgttcatgaagttgatgacccccttcggtattctggagtcggcccgtacgggtctgatggcgttgccccggtcgcccctgtatggcgcagcggaggaggaattaattgctaaggatgctgatgaggtcgtcgatgcttcccaattgcctcccggataa

SEQ ID NO: 6952 - protein, 310 aa, Muscodor strobelii
  misc_feature: SGI Peptide ID NO. 562072
  misc_feature (80)..(146): Pfam Id: PF01842 Pfam Desc: ACT domain
  misc_feature (1)..(310): NCBI GI: 39973499 Blast Desc: conserved [Magnaporthe grisea 70-15] gi|16565968|gb|AAL26320.1| acetolactate synthase small-subunit precursor-like protein [Magnaporthe grisea] conserved grisea
  misc_feature (13)..(310): NCBI GI: 116204861 Blast Desc: conserved [Chaetomium globosum CBS 148.51] gi|88176442|gb|EAQ83910.1| conserved [Chaetomium globosum CBS 148.51]
  misc_feature (23)..(310): NCBI GI: 46123809 Blast Desc: FG06282.1 [Gibberella zeae PH-1]
  misc_feature (1)..(310): NCBI GI: 261353057 Blast Desc: acetolactate synthase small subunit [Verticillium albo-atrum VaMs.102]
  misc_feature (1)..(310): NCBI GI: 154315966 Blast Desc: BC1G_04555 [Botryotinia fuckeliana B05.10] gi|150846951|gb|EDN22144.1| BC1G_04555 [Botryotinia fuckeliana B05.10]
  misc_feature (29)..(310): NCBI GI: 156059826 Blast Desc: SS1G_03926 [Sclerotinia sclerotiorum 1980] gi|154701712|gb|EDO01451.1| SS1G_03926 [Sclerotinia sclerotiorum 1980]
  misc_feature (13)..(310): NCBI GI: 171689016 Blast Desc: protein product [Podospora anserina] gi|170944470|emb|CAP70581.1| protein product [Podospora anserina]
  misc_feature (15)..(310): NCBI GI: 256732486 Blast Desc: [Nectria haematococca mpVI 77-13-4]
  misc_feature (34)..(310): NCBI GI: 85082237 Blast Desc: acetolactate synthase small subunit, mitochondrial precursor [Neurospora crassa OR74A] gi|7800796|emb|CAB91255.1| ACETOLACTATE SYNTHASE SMALL SUBUNIT PRECURSOR [Neurospora crassa]
  misc_feature (1)..(310): NCBI GI: 189196802 Blast Desc: acetolactate synthase small subunit, mitochondrial precursor [Pyrenophora tritici-repentis Pt-1C-BFP] gi|187980618|gb|EDU47244.1| acetolactate synthase small subunit,
  misc_feature (79)..(284): SWISSPROT Homolog: EC 2.2.1.6 Acetolactate synthase
  misc_feature: Useful for introducing or modulating the production of volatile compounds
MAARFLVPANCFRAATSSATATATRWSSSSSTSAIAYKALRRRQAPLPVSQNPSSWSAQAAVSNILYETPTPSKDPPKRHVLNCLVQNEPGVLSRVSGILAARSFNIDSLVVCHTEVEDLSRMTIVLTGQDGVVEQARRQLEDLVPVWAVLDYTSAPLVQRELLLAKVNILGPEYFEELLQHHREMAAEIDSADADSLTGMTTEDFHPSKMAPSQALRHKHEHLKSITYLTHQFGGKVLDISTNSCIVEVSAKPARIDSFMKLMTPFGILESARTGLMALPRSPLYGAAEEELIAKDADEVVDASQLPPG

SEQ ID NO: 6953 - DNA, 1351 bp, Muscodor strobelii
  misc_feature: SGI EST ID NO. CUFF.17278.0
  misc_feature: Variant of the nucleotide sequence at SEQ ID NO 6951
cttcccactcatcaactttaaaccatcttttcttcttcgcagctaatagcatcgccaattgacctcacatcccacaagtcttgagttgccgacactgactgatctcacgatcaatcagcaaaatggcggctcgcttcttggtcccggccaattgcttccgggctgcaacctcgagcgcaaccgccaccgctactcgatggagctcgagcagctcaacttccgccatcgcctacaaggcacttcgccgccgccaggctcctctccctgtcagtcagaacccatcgtcgtggtctgcgcaggctgccgtctccaacatcctctacgagacgcccactccctccaaggacccgcctaagcgccatgtcctcaactgcttggtgcagaacgagcccggtgtgctgtcccgagtctccggtattctcgcagcccgcagcttcaacatcgattccttggtcgtctgccacaccgaagtcgaggatctatcccgcatgactattgtcctgacgggccaggacggcgttgtcgagcaagctcgtagacagctagaggatctcgtgcccgtctgggctgtgctcgactacacgagcgctcctcttgttcagcgcgaacttctcctagctaaggtcaacattctgggtcccgagtactttgaggagctcctgcagcatcatcgcgagatggcagccgagatcgacagcgcggacgctgatagcctgacgggcatgacgacggaggacttccaccctagcaagatggcaccttcccaagctctacgccataagcacgagcacttgaagagcattacgtatttgacgcatcagtttggaggcaaggtgctggatattagtactaacagttgcattgtcgaggtttccgcgaagcccgccagaatcgattcgttcatgaagttgatgacccccttcggtattctggagtcggcccgtacgggtctgatggcgttgccccggtcgcccctgtatggcgcagcggaggaggaattaattgctaaggatgctgatgaggtcgtcgatgcttcccaattgcctcccggataaacgcccggatagacgtccagagtgctatgggcattgacgttcggctactcattgatatggaaggaaaggtactgttacaatacttgtatttaaaatgcgaggcttcaacagagaaatgtcgtctaaacagacgtgcatgttatgaaccatgacccacgaaccatgacccacgaaccatgaaccacgaaccataaaccatataccaattacaacgcgcaacatgagatcatatgaagagtctccggattcggaaacgtttcgtcgttgtccatagtaattgatggtcgaattttcac

SEQ ID NO: 6954 - DNA, 1512 bp, Muscodor strobelii
  misc_feature: SGI cDNA ID NO. 562073
  misc_feature: Reduced expression when VOC is produced
  misc_feature: Encodes the peptide sequence at SEQ ID NO 6955
atggatgacactgaacgccgaacggccaaacggtcgcgtttcgaccagacggagcccgagcctcgtcgctctagattcgaccgtcgctcccgctcgcctgcgccccgaagatccgacactgcgcgcgaccgaagccctctgatgtctcctgacagcgctggagcagatgctaagaagagccctgtcgatgctgctgccgccgcagctgctgcggccgccaagatcaacgcacaactccaggccaggaagggcatccagcatgtcgatgtgccacctatcaagtcggcatcgaccggtgccgcgggctcgaccgagggaaagatcaacggcgaggtctacgtcgccgacggcgactacatcaaggacatcgaagtcaacgacctgcgtaaccgttacttgctgaccaaaggctccactcagaagatgattaaagaagaaaccggtgctgatgtcacgacccgaggcgaatactaccccgataagagcatggccaccgcagcggcccctcccctatacctgcatgtcacgagtacctccaaggctgggttggatgctgctgtcaagaagatcgaggagatgatgaagcaggagctgcctaaccttgttgatgagcggcgtttccgtcgacgcgagcaggagaccgtcgagcgcgatgagtacggtcgtcgtaaatggcccgaacagaagatccccatcaatcttgaacccgtccagggcttcaacctacgcgcgcagattgtcggtcatggcggtgcctatgtcaaacacatccagcaggagaccggctgccgcgtgcagatcaagggacgcggttcaggctatttcgaggcatcaaccaaccaggagagcgaagacgacatgtatctacatgtagctggccccgaccctaagatggtcgaaaaggcaaaggagctctgcgaggatctggtcggcaaggtcagagaggaatacgaggagttcaagtcccgcccgcctcgtcaacactacggaggccatcatggcggcggcggcggcggtggctacggagatcgatcctatggcggtggtgaccgatacagcggtggtggcggcggtggtgatcgctatgaccgatccaatagccaatctggctcgtacggtggatatggcggctacaacaactcatctgcggctggtggtggtacggcgtcgcctgctgctgctgctggtgcgggcagcgcgcctggcgcatctagtgactacgctgcccagtatgctcagtactatggcggtcaagacccctatgccgcatacggcggctatcaaggatatgtgcaatactatcaatactatgcggctcaacaggcagcccagcaaggcggagctgcggcccctgcggcccctggcgcttcagcttcacctcccccgccgccgcctccagctgaagctcctcccccgcctcccccgggtggtggtgctcctcctcctccgcctccgccgtccggccctcctggagcatcatacggcgccgttcccccgccccctggtctttga

SEQ ID NO: 6955 - protein, 503 aa, Muscodor strobelii
  misc_feature: SGI Peptide ID NO. 562073
  misc_feature (239)..(305): Pfam Id: PF00013 Pfam Desc: KH domain
  misc_feature (246)..(305): Pfam Id: PF00013 Pfam Desc: KH domain
  misc_feature (1)..(450): NCBI GI: 85082234 Blast Desc: NCU01665 [Neurospora crassa OR74A] gi|16944432|emb|CAD11430.1| conserved [Neurospora crassa] gi|28917951|gb|EAA27635.1| conserved [Neurospora crassa OR74A]
  misc_feature (1)..(431): NCBI GI: 46123811 Blast Desc: FG06283.1 [Gibberella zeae PH-1]
  misc_feature (1)..(431): NCBI GI: 154315964 Blast Desc: BC1G_04554 [Botryotinia fuckeliana B05.10] gi|150846950|gb|EDN22143.1| BC1G_04554 [Botryotinia fuckeliana B05.10]
  misc_feature (1)..(431): NCBI GI: 156059824 Blast Desc: SS1G_03925 [Sclerotinia sclerotiorum 1980] gi|154701711|gb|EDO01450.1| SS1G_03925 [Sclerotinia sclerotiorum 1980]
  misc_feature (1)..(348): NCBI GI: 261353055 Blast Desc: KH domain-containing protein [Verticillium albo-atrum VaMs.102]
  misc_feature (1)..(336): NCBI GI: 256732939 Blast Desc: NECHADRAFT_37787 [Nectria haematococca mpVI 77-13-4]
  misc_feature (1)..(426): NCBI GI: 242766427 Blast Desc: KH domain protein [Talaromyces stipitatus ATCC 10500] gi|218724364|gb|EED23781.1| KH domain protein [Talaromyces stipitatus ATCC 10500]
  misc_feature (1)..(417): NCBI GI: 11288453 Blast Desc: KH domain protein [Talaromyces stipitatus ATCC 10500] gi|218724364|gb|EED23781.1| KH domain protein [Talaromyces stipitatus ATCC 10500]
  misc_feature (7)..(330): NCBI GI: 171689018 Blast Desc: protein product [Podospora anserina] gi|170944471|emb|CAP70582.1| protein product [Podospora anserina]
  misc_feature (1)..(426): NCBI GI: 212528444 Blast Desc: KH domain protein [Penicillium marneffei ATCC 18224] gi|210073777|gb|EEA27864.1| KH domain protein [Penicillium marneffei ATCC 18224]
  misc_feature: Useful for introducing or modulating the production of volatile compounds
MDDTERRTAKRSRFDQTEPEPRRSRFDRRSRSPAPRRSDTARDRSPLMSPDSAGADAKKSPVDAAAAAAAAAAKINAQLQARKGIQHVDVPPIKSASTGAAGSTEGKINGEVYVADGDYIKDIEVNDLRNRYLLTKGSTQKMIKEETGADVTTRGEYYPDKSMATAAAPPLYLHVTSTSKAGLDAAVKKIEEMMKQELPNLVDERRFRRREQETVERDEYGRRKWPEQKIPINLEPVQGFNLRAQIVGHGGAYVKHIQQETGCRVQIKGRGSGYFEASTNQESEDDMYLHVAGPDPKMVEKAKELCEDLVGKVREEYEEFKSRPPRQHYGGHHGGGGGGGYGDRSYGGGDRYSGGGGGGDRYDRSNSQSGSYGGYGGYNNSSAAGGGTASPAAAAGAGSAPGASSDYAAQYAQYYGGQDPYAAYGGYQGYVQYYQYYAAQQAAQQGGAAAPAAPGASASPPPPPPPAEAPPPPPPGGGAPPPPPPPSGPPGASYGAVPPPPGL

SEQ ID NO: 6956 - DNA, 2859 bp, Muscodor strobelii
  misc_feature: SGI EST ID NO. CUFF.17475.0
  misc_feature: Variant of the nucleotide sequence at SEQ ID NO 6954
tctgccactgcccattattttgctgtcaactttacttgcaactgcctgcctcgagatcgactccagtgtcggctcttgctgcatctgcattgtctttcctaacatctccatctctggggactgtgccttttctttgcgttgcatttcacatcaccatcgcgactgttgttctgatactgcgacacatcgtcactgttgcccttgcctcgtttgcccatcctcaaccatggatgacactgaacgccgaacggccaaacggtcgcgtttcgaccagacggagcccgagcctcgtcgctctagattcgaccgtcgctcccgctcgcctgcgccccgaagatccgacactgcgcgcgaccgaagccctctgatgtctcctgacagcgctggagcagatgctaagaagagccctgtcgatgctgctgccgccgcagctgctgcggccgccaagatcaacgcacaactccaggccaggaagggcatccagcatgtcgatgtgccacctatcaagtcggcatcgaccggtgccgcgggctcgaccgagggaaagatcaacggcgaggtctacgtcgccgacggcgactacatcaaggacatcgaagtcaacgacctgcgtaaccgttacttgctgaccaaaggctccactcagaagatggtaaataatatccttgtgtcaatcactactgatttacttcagactccatacatatatctatggcctcttctgcttccttgtcgtgttcggacattgtcgcttacactcaagcttcatagctcgcacacgacacccctctgtggcatctgctgacctccgctgcgtgatctagattaaagaagaaaccggtgctgatgtcacgacccgaggcgaatactaccccgataagagcatggccaccgcagcggcccctcccctatacctgcatgtcacgagtacctccaaggctgggttggatgctgctgtcaagaagatcgaggagatgatgaagcaggagctgcctaaccttgttgatgagcggcgtttccgtcgacgcgagcaggagaccgtcgagcgcgatgagtacggtcgtcgtaaatggcccgaacagaagatccccatcaatcttgaacccgtccagggcttcaacctacgcgcgcagattgtcggtcatggcggtgcctatgtcaaacacatccagcaggagaccggctgccgcgtgcagatcaagggacgcggttcaggctatttcgaggcatcaaccaaccaggagagcgaagacgacatgtatctacatgtagctggccccgaccctaagatggtcgaaaaggcaaaggagctctgcgaggatctggtcggcaaggtcagagaggaatacgaggagttcaagtcccgcccgcctcgtcaacactacggaggccatcatggcggcggcggcggcggtggctacggagatcgatcctatggcggtggtgaccgatacagcggtggtggcggcggtggtgatcgctatgaccgatccaatagccaatctggctcgtacggtggatatggcggctacaacaactcatctgcggctggtggtggtacggcgtcgcctgctgctgctgctggtgcgggcagcgcgcctggcgcatctagtgactacgctgcccagtatgctcagtactatggcggtcaagacccctatgccgcatacggcggctatcaaggatatgtgcaatactatcaatactatgcggctcaacaggcagcccagcaaggcggagctgcggcccctgcggcccctggcgcttcagcttcacctcccccgccgccgcctccagctgaagctcctcccccgcctcccccgggtggtggtgctcctcctcctccgcctccgccgtccggccctcctggagcatcatacggcgccgttcccccgccccctggtctttgagtggacttcgagctgagtacgtggcccgggctgaacgtatagttagtcccgtgaagaagcaagaatcttccttgttatttgattgtcaaaagaccatctcagggaaagagaaccgaagtcgtattaggctgggaaaagtttcgctgtgtgtctgattcaagacgtaatgaatccagtcacaaatgatggcccgatgctgtggacgtggctggagaccattgatcaaaagcatgtatgatgctaactcagaggtgtctgaaggttacatgtctgagcgttaggtgatggatgatgttaattgtcgagattatcatctcctatcgatgacacagatgccactcaatcataaaatcgctgttgccaatccgacgataggtctggcagaataatcacatcattcactaagtgcctaacaccaaattacgatgccatatcgcgtgatcgcatccttgattcccgattgtttgtatgcatgggccagtcgctgtttgtaccggttgctagtcagggacaaggccgtaatttgagtcactgtgtcttagaggacagttgtacctctagtatgtcactgaattctgacaccaagtatatgactatatactctgatgtggtgactattttactagatttgcgggagtatttggtcattttatgggtgtttcgccacataacatctgaagcagtgttctgagggatatgattatacttttccgaggttctacattagttttcaatagtagctgggatgcagttgcttgagtgtgcgagagaggatagacaggtttggtgttggtagggttggtgtattgtgaaaaggcataaggtgatgagttcatagtaaaaaggggttgatgtaagtacctggaagtaaccgttaactacatgtatatgtacagagactaaatcacatagacgagacaaagcgacacaccatagcggtagcattttg

SEQ ID NO: 6957 - DNA, 999 bp, Muscodor strobelii
  misc_feature: SGI cDNA ID NO. 562074
  misc_feature: Encodes the peptide sequence at SEQ ID NO 6958
atgagccaccaacgcttcccttcgatcgatccgaaggaaccacactccatctccctcaaggtccttagattatcgcgaccctcccttgtagtgcaacatcctctcccaaacccgctatctccccaagatgcgacacctattgaggcctcgctggcctacaagagcgaccacgggacgaatcccgcacccttcccactcacccccatcctcaacctaccaccgtctttcggatctgcatatgtaggcgagacattcagctgtaccctctgcgcgaaccacgacatacccccacctgccgagggcgaagttgcgaaacagaagttcatcaaagaagtgcgcatcgaagccgagatgaagacaccgggcaccaccgccgttcagaaactcacactctcacccactgatgagccgaaacagggcgatggggaaaaggaaaagccaagcggcgaagatttggagcccggtgagacgctgcagaagatcgtcaacttcgagctccgcgaagaaggaaatcacgtcctgagcgtcactgtgagctactacgaagctaccgagacaagtggacgaatcaggacgttcaggaagctgtaccagttcatgtgcaaaggctcgctcatcgtgcggacgaaaattggcaccctaccgcctccactcaaagcgtcagtggccaggagatggatcatggaagcccagctcgaaaactgcagcgaagacgtcatgcaactccagcgtgttgggttggagttagagcctggtttgaagtataaggacttgaattgggaggtcagtggcagcgctaagcctgtgctgaagcctggcgaggttgagcaggtctgtttctttatcgaggagacgggcaaagactcagttacggtgaataaggagggcagactgattttcggtgttctcgggatcgggtggcgaagtgagatgggcaataagggctttttatctactgggaaactcggaaccagggctgttggatctactgggccgtag

SEQ ID NO: 6958 - protein, 332 aa, Muscodor strobelii
  misc_feature: SGI Peptide ID NO. 562074
  misc_feature (70)..(328): Pfam Id: PF06159 Pfam Desc: Domain of function (DUF974)
  misc_feature (1)..(327): NCBI GI: 256732939 Blast Desc: NECHADRAFT_37787 [Nectria haematococca mpVI 77-13-4]
  misc_feature (2)..(325): NCBI GI: 46123811 Blast Desc: FG06283.1 [Gibberella zeae PH-1]
  misc_feature (1)..(328): NCBI GI: 39973497 Blast Desc: conserved [Magnaporthe grisea 70-15] gi|16565967|gb|AAL26319.1| [Magnaporthe grisea] gi|145017930|gb|EDK02209.1| conserved [Magnaporthe grisea 70-15]
  misc_feature (1)..(327): NCBI GI: 116204863 Blast Desc: CHGG_10315 [Chaetomium globosum CBS 148.51] gi|88176443|gb|EAQ83911.1| CHGG_10315 [Chaetomium globosum CBS 148.51]
  misc_feature (1)..(329): NCBI GI: 261353054 Blast Desc: conserved [Verticillium albo-atrum VaMs.102]
  misc_feature (1)..(327): NCBI GI: 164428105 Blast Desc: NCU01664 [Neurospora crassa OR74A] gi|16944431|emb|CAD11429.1| conserved [Neurospora crassa] gi|157072014|gb|EAA27634.2| conserved [Neurospora crassa OR74A]
  misc_feature (1)..(326): NCBI GI: 154315960 Blast Desc: BC1G_04552 [Botryotinia fuckeliana B05.10] gi|150846948|gb|EDN22141.1| BC1G_04552 [Botryotinia fuckeliana B05.10]
  misc_feature (11)..(325): NCBI GI: 242765997 Blast Desc: DUF974 domain protein [Talaromyces stipitatus ATCC 10500] gi|218724282|gb|EED23699.1| DUF974 domain protein [Talaromyces stipitatus ATCC 10500]
  misc_feature (12)..(325): NCBI GI: 225560447 Blast Desc: DUF974 domain-containing protein [Ajellomyces capsulatus G186AR]
  misc_feature (12)..(325): NCBI GI: 240280000 Blast Desc: DUF974 domain-containing protein [Ajellomyces capsulatus H143]
MSHQRFPSIDPKEPHSISLKVLRLSRPSLVVQHPLPNPLSPQDATPIEASLAYKSDHGTNPAPFPLTPILNLPPSFGSAYVGETFSCTLCANHDIPPPAEGEVAKQKFIKEVRIEAEMKTPGTTAVQKLTLSPTDEPKQGDGEKEKPSGEDLEPGETLQKIVNFELREEGNHVLSVTVSYYEATETSGRIRTFRKLYQFMCKGSLIVRTKIGTLPPPLKASVARRWIMEAQLENCSEDVMQLQRVGLELEPGLKYKDLNWEVSGSAKPVLKPGEVEQVCFFIEETGKDSVTVNKEGRLIFGVLGIGWRSEMGNKGFLSTGKLGTRAVGSTGP

SEQ ID NO: 6959 - DNA, 1671 bp, Muscodor strobelii
  misc_feature: SGI EST ID NO. CUFF.17296.0
  misc_feature: Variant of the nucleotide sequence at SEQ ID NO 6957
ttcgccgaacatcatgtgaatattacaaccatgcacaagaccatttctaagtcaataacacacacaaaacatctctggaaacaggactacttgcagtgctatccacagacaccatgagccaccaacgcttcccttcgatcgatccgaaggaaccacactccatctccctcaaggtccttagattatcgcgaccctcccttgtagtgcaacatcctctcccaaacccgctatctccccaagatgcgacacctattgaggcctcgctggcctacaagagcgaccacgggacgaatcccgcacccttcccactcacccccatcctcaacctaccaccgtctttcggatctgcatatgtaggcgagacattcagctgtaccctctgcgcgaaccacgacatacccccacctgccgagggcgaagttgcgaaacagaagttcatcaaagaagtgcgcatcgaagccgagatgaagacaccgggcaccaccgccgttcagaaactcacactctcacccactgatgagccgaaacagggcgatggggaaaaggaaaagccaagcggcgaagatttggagcccggtgagacgctgcagaagatcgtcaacttcgagctccgcgaagaaggaaatcacgtcctgagcgtcactgtgagctactacgaagctaccgagacaagtggacgaatcaggacgttcaggaagctgtaccagttcatgtgcaaaggctcgctcatcgtgcggacgaaaattggcaccctaccgcctccactcaaagcgtcagtggccaggagatggatcatggaagcccagctcgaaaactgcagcgaagacgtcatgcaactccagcgtgttgggttggagttagagcctggtttgaagtataaggacttgaattgggaggtcagtggcagcgctaagcctgtgctgaagcctggcgaggttgagcaggtctgtttctttatcgaggagacgggcaaagactcagttacggtgaataaggagggcagactgattttcggtgttctcgggatcgggtggcgaagtgagatgggcaataagggctttttatctactgggaaactcggaaccagggctgttggatctactgggccgtaggagatccagaggctcctcgggcggctatccgagtcactcagtggtttaatgatgggtggcatggacggtacggatgagcgaaatgacactgatgagagtcctccgacgtcgtcatcggtcacctctggtcaagcgagtccgcagtggtcacacacatctagcgagctggaagaaatggccaacaagttgacatcagagatctttagcgagacggatgaggagacggattccctcatggctatggggatcatacttgggtttgcagtgaggaatccggagtaaggagtcgagcttttgcacagtcttattgtatattgtcacttggttctgggcatttggcatgagggtctgcatgggattcctggcgttagattaggagttgcttcgccgtgaaacccatctcaaagtgtttgaacgcgatgcctgagcaggctatgttagctcagcttagacagccgttgaagaagctactagatagcatgataaggtgaatcgattgattaacaactttctacttagtgtgtccgcgttgttgctcgatcatggtggtggatagagt

SEQ ID NO: 6960 - DNA, 4977 bp, Muscodor strobelii
  misc_feature: SGI cDNA ID NO. 562075
  misc_feature: Encodes the peptide sequence at SEQ ID NO 6961
atgttgcaatcagacttcacgtcaaaggctacaacgcaattgctcctacgcaaggggttctgctccaagggcccaacaccgctgagaggcgagtcgctgatatgggccactgcgaagaacgacgtcgatctggttagaaggctgattgatgagggcgctgatgtcgattcgaaacgcgaggagactggagctacgcctgcgcatcttgcggctgctagtgggttcagtgagattctggagattctgcatgatgctggggcagatttggaggcgagggacgccgatggttggacgccgatgcatttcgctgcacactttggacaactagagatgattcacaagcttgttgatcggggcttggagttggatgcgaggagtgagaacgatgagacgccgctacacgccgctgctaggaaacccgactgcgagatgattcggacgttagttgagctggggtctgatctagatgcgcaaacgaggttgggttttacgccgccgtttgttgctgtgcagaatggtcatttggaggtgatgaagttgttgattgagttggggagtgataaggagataagggcgcagggggataatacgatgttccatattgctgctatgcatagtcatctggatattttggagtatctactcgaaaatgggtatgatgcatttgagacggatgtcatgggacgaacggcgttgtgctctgctgcgcaagggaatgaaagagatgcggttgacctgtttttgcgtcatgggaaagctctcgatccaaaagtcacacgcgttgatctcgcgatgcagatggcagcacgttggggcaacaccggcattttagagctaatcgccgaacacggcattcgactcgatgaacaagacgaagatggatacaacttgctgcatgtcgcttgccaaggggatagcgaggagacaatgcaatatctcatcgagtatggcgttgatctcgaagcgcgagattgcgaggaaatgacaccattcttgagagctgttgatgtaggcagacttgactccgcggagtatttggcgaaccagggggcgaatgtgaggaaattaggtaaaggcgacttctcagctttgcactttgcgatcaaggtgaatgacaaacgcctaatccggttcttaatcagtcgcaaattggacatagaaggcagagatgataacggtcaaactccattgagtcttgcggcgaaactcggtcaccgggatatggtctctgagctactcgctgctaatgcgaataccgccacgaaatgcgatcgatcttggacaccattgcactatgcctcaaatcatggacataaaggtatcgtcgagttattgatcgaaaatggtgccgttatcgctgcaaagacaaaggatgggtacacggctcggactcttgccttgcgagagaagcatattgacatagcggcggtgtttcgggatgaaatgcctgttagcaagaggtcgctggcagatgcagatgctcaatctgagacactattcatcctggctgctgcaaatggtcatctggctgaagtcactcgtctgcttcacggaggcgttgatgtagattgtacagatatcaatggccgaagagccttgaccatggcagcagcgaatgatcagatacagatagtcgagttgctgatcaaccggggtgcttctttgaatcttcaagattccaacggagagaccgcaatttggtgggcagctcggagtggctccgacgagatcgtgcaactacttcttgaaagtgaggtcgacttcaacattgcggatgaggaaggacaaacgcctctttctgtagcatcgcaaacaggtcacgaaaacattgtcaaacgtatgctagaagctggcgccgatccaaattccaagacatcctatggctggacgccgctggcctttgccactagaggaagctaccaatctgtggtcgaatctttgatacagttcggtgccgatgtcaactacatccaacgagatggtacatcagcactgggtatcgcaaaagccatcgagaacgatgaaattatcgctatcttggagaaatacgcaactgatcctgttaagagcgggcctacggacttccgagaagagcttacaaaacatactgggcgtcttcatgttgctgccgaattcgggcgtatagcagaagttaaacgcctccttgaaatcggcatgaaagcacatggctacagagagcggccactgttttcagctgtctctagaggcatggatgctgtagtatcactattacttgatcacggtgcggatattcacgcacaggattcaagcggagcaaccgcaatgcatcgtgctgcgttatctggccacccgtccactatccacctgctgcacagcagaggatcgagactagacgatcaggacgaaacaggttgtacaccacttatgccagcatgtatgatgggcaatgaagaggcagtgaaagctctcctcgaactcggcgcgaaactggagattaaagagaagaagtggaaatctacaccactactaggagcgacgatgagaggatacctaaacatcgtcaagatgttgctcgacaaaggagctaatattaacacggggaacaaggacgggtttaccccattgtcgatggcagtgttcgacaacaaacgctcgcttgtggaactgttactcgaacggggagccaagatgcgacctgattccatcaataacatgtcgccgctgtcaatggcggccgctgcagggcgtgaggggattatcgagctcctggtcgatcacggtgcggatttgaaccatctgtctgataaccgaagcacaccactcatactggctgtgaagaaggaaaacgcgatgatagttcggatgctcattgaaatgggtgccgacatcgggatcagggacgacagcggcaggacagctttgtcttatgcaaaggacttaggagcagaacatatagtgaagcttcttacccttgcaaaggccttaagactagctgatgacagagcaacgcgaaagcagaagcaaaaggcgcttgacaagaggagacgttacgagtaccaaccacttcccaagaagcactgcattcggcttctggaattagcgcctggtaagaagggcgacatcatctcgttcgagctctacgaggttgatctctcccgcaatccttcgtacgacgctctttcatacgagtggattgagaaaagtggtactgtaccagtccaatgcgacaatgaacgattgcttattactccgaactgcaaggcagcattagagaatcttcggtcggagactgacgcgaggacgctttgggtcgacgccatatcaattaatcagaacgatgttcaagagagaaacgcacaggtggctatgatgactgatatatttcgcagagcaaagtcggtaatcatgtggattggtcccgacgagaagcacacggaccgcgcttttaaattattgccccttttgaggacactttatacgaccgtgcagaaagaccctgaagaccctcaaggcctttatattgatccagatgatttcaataccctgcctcagatcgaaagggttaagaaactagtggagaagaaggaagtcatgaacgcactgaaggatctctctgcaagacaatatttccagagatcgtggatcttccaggagattatcctcgcaggtgaacgaggcctagttacctgcggtgaatatagctgtcaatggaagacattccgagaagggctattggccttcaggggcttcaacgaaacgtcgaacacagaattccaggctacactccgaggcgaggaaatcatgcggcggcttggctcggtatcattggcatattcacttggatgtctacagagattcgatgcggaggacccacgagacaaaattttcgcagcgcttgggatctgcggtgtgaaggacccccgacttgttgctgattatacgctgactctgcgggagattctcatcaacgtgtcacgatggtttgtggatgagttccaaggagtgtacacgtggaattcagacatacagatcagcccgaagacgatgcctggattaccgacttgggtactggagtttagctcaaggaaagagacactggtcaggaatccttttcagcagccgaaggaggagttctttgcgccgtatactacgatgcctattagtacgactccagtatccttgcatacggatggatgcattttcgatcgcgtggctgcgaaagttcccatctctaaatcgaaggatgtctatagtatcctcaaagccgtgacgagaggtcttgcaagacaaggtcgagggatctacgatccctatctcattgactctcaagcggtaacacggcccagcaaaaggctaaagcgaccaagatggctattgacccaatgcactcggcttcaaaggcgaacgtggagaaggccgttcaagaaggaggtgatgacagagaatcccaaatcgctagaacagacgaacttgcatgcattcatgaagacaatcttttggccaggagcaatgttgggaatagccgacaagaagcgaaagacagcccgagagcgcgatcccaaaatttcgagtttccttgcattcaaactcgcttccgatcatcgcactccccagcgctcaagaagatcgcccaactcactccgaaacctagtgaaacgctggaaatatctacaaaaacggagcaaggactacgatataaacatcaacgcggcgatggaagacttcgtccattttgatccgttaggtaaggtcgagtttgtgctgacggagaatggatattttgggcttgcgaatgcgaatcatgcgaaaaggggcatgtcgattgcgtttttgacgggtggcgatcatccgctgctgttaaaagggggggaagatggggatggggtttggtatgaggtcacggggagactgtacttgaattatatgggaagaacggtcgagagtttggaggatctgaatgcggatgctgtgattgagaggttggaaattcgctga

SEQ ID NO: 6961 - protein, 1658 aa, Muscodor strobelii
  misc_feature: SGI Peptide ID NO. 562075
  misc_feature (594)..(626): Pfam Id: PF00023 Pfam Desc: Ankyrin repeat
  misc_feature (425)..(457): Pfam Id: PF00023 Pfam Desc: Ankyrin repeat
  misc_feature (528)..(560): Pfam Id: PF00023 Pfam Desc: Ankyrin repeat
  misc_feature (293)..(325): Pfam Id: PF00023 Pfam Desc: Ankyrin repeat
  misc_feature (897)..(929): Pfam Id: PF00023 Pfam Desc: Ankyrin repeat
  misc_feature (930)..(962): Pfam Id: PF00023 Pfam Desc: Ankyrin repeat
  misc_feature (95)..(127): Pfam Id: PF00023 Pfam Desc: Ankyrin repeat
  misc_feature (62)..(94): Pfam Id: PF00023 Pfam Desc: Ankyrin repeat
  misc_feature (128)..(160): Pfam Id: PF00023 Pfam Desc: Ankyrin repeat
  misc_feature (392)..(424): Pfam Id: PF00023 Pfam Desc: Ankyrin repeat
  misc_feature (731)..(763): Pfam Id: PF00023 Pfam Desc: Ankyrin repeat
  misc_feature (831)..(863): Pfam Id: PF00023 Pfam Desc: Ankyrin repeat
  misc_feature (561)..(593): Pfam Id: PF00023 Pfam Desc: Ankyrin repeat
  misc_feature (797)..(829): Pfam Id: PF00023 Pfam Desc: Ankyrin repeat
  misc_feature (764)..(796): Pfam Id: PF00023 Pfam Desc: Ankyrin repeat
  misc_feature (627)..(659): Pfam Id: PF00023 Pfam Desc: Ankyrin repeat
  misc_feature (1051)..(1212): Pfam Id: PF06985 Pfam Desc: Heterokaryon incompatibility protein (HET)
  misc_feature (864)..(889): Pfam Id: PF00023 Pfam Desc: Ankyrin repeat
  misc_feature (194)..(226): Pfam Id: PF00023 Pfam Desc: Ankyrin repeat
  misc_feature (161)..(193): Pfam Id: PF00023 Pfam Desc: Ankyrin repeat
  misc_feature (1051)..(1134): Pfam Id: PF06985 Pfam Desc: Heterokaryon incompatibility protein (HET)
  misc_feature (12)..(1658): NCBI GI: 46112797 Blast Desc: FG02900.1 [Gibberella zeae PH-1]
  misc_feature (705)..(1658): NCBI GI: 46120346 Blast Desc: FG04820.1 [Gibberella zeae PH-1]
  misc_feature (11)..(1016): NCBI GI: 189502738 Blast Desc: Aasi_1435 [Candidatus Amoebophilus asiaticus 5a2] gi|189498179|gb|ACE06726.1| Aasi_1435 [Candidatus Amoebophilus asiaticus 5a2]
  misc_feature (41)..(983): NCBI GI: 189502738 Blast Desc: Aasi_1435 [Candidatus Amoebophilus asiaticus 5a2] gi|189498179|gb|ACE06726.1| Aasi_1435 [Candidatus Amoebophilus asiaticus 5a2]
  misc_feature (11)..(983): NCBI GI: 115738320 Blast Desc: : similar to ankyrin 2,3/unc44 [Strongylocentrotus purpuratus] gi|115939509|ref|XP_001189781.1| : similar to ankyrin 2,3/unc44 [Strongylocentrotus purpuratus]
  misc_feature (33)..(972): NCBI GI: 123502817 Blast Desc: ankyrin repeat protein [Trichomonas vaginalis G3] gi|121911321|gb|EAY16156.1| ankyrin repeat protein, [Trichomonas vaginalis G3]
  misc_feature (33)..(983): NCBI GI: 123507472 Blast Desc: ankyrin repeat protein [Trichomonas vaginalis G3] gi|121912377|gb|EAY17199.1| ankyrin repeat protein, [Trichomonas vaginalis G3]
  misc_feature (4)..(971): NCBI GI: 123507472 Blast Desc: ankyrin repeat protein [Trichomonas vaginalis G3] gi|121912377|gb|EAY17199.1| ankyrin repeat protein, [Trichomonas vaginalis G3]
  misc_feature (4)..(983): NCBI GI: 123507472 Blast Desc: ankyrin repeat protein [Trichomonas vaginalis G3] gi|121912377|gb|EAY17199.1| ankyrin repeat protein, [Trichomonas vaginalis G3]
  misc_feature (4)..(983): NCBI GI: 123507472 Blast Desc: ankyrin repeat protein [Trichomonas vaginalis G3] gi|121912377|gb|EAY17199.1| ankyrin repeat protein, [Trichomonas vaginalis G3]
  misc_feature (33)..(836): SWISSPROT Homolog: EC 2.4.2.30 NAD(+) ADP-ribosyltransferase
MLQSDFTSKATTQLLLRKGFCSKGPTPLRGESLIWATAKNDVDLVRRLIDEGADVDSKREETGATPAHLAAASGFSEILEILHDAGADLEARDADGWTPMHFAAHFGQLEMIHKLVDRGLELDARSENDETPLHAAARKPDCEMIRTLVELGSDLDAQTRLGFTPPFVAVQNGHLEVMKLLIELGSDKEIRAQGDNTMFHIAAMHSHLDILEYLLENGYDAFETDVMGRTALCSAAQGNERDAVDLFLRHGKALDPKVTRVDLAMQMAARWGNTGILELIAEHGIRLDEQDEDGYNLLHVACQGDSEETMQYLIEYGVDLEARDCEEMTPFLRAVDVGRLDSAEYLANQGANVRKLGKGDFSALHFAIKVNDKRLIRFLISRKLDIEGRDDNGQTPLSLAAKLGHRDMVSELLAANANTATKCDRSWTPLHYASNHGHKGIVELLIENGAVIAAKTKDGYTARTLALREKHIDIAAVFRDEMPVSKRSLADADAQSETLFILAAANGHLAEVTRLLHGGVDVDCTDINGRRALTMAAANDQIQIVELLINRGASLNLQDSNGETAIWWAARSGSDEIVQLLLESEVDFNIADEEGQTPLSVASQTGHENIVKRMLEAGADPNSKTSYGWTPLAFATRGSYQSVVESLIQFGADVNYIQRDGTSALGIAKAIENDEIIAILEKYATDPVKSGPTDFREELTKHTGRLHVAAEFGRIAEVKRLLEIGMKAHGYRERPLFSAVSRGMDAVVSLLLDHGADIHAQDSSGATAMHRAALSGHPSTIHLLHSRGSRLDDQDETGCTPLMPACMMGNEEAVKALLELGAKLEIKEKKWKSTPLLGATMRGYLNIVKMLLDKGANINTGNKDGFTPLSMAVFDNKRSLVELLLERGAKMRPDSINNMSPLSMAAAAGREGIIELLVDHGADLNHLSDNRSTPLILAVKKENAMIVRMLIEMGADIGIRDDSGRTALSYAKDLGAEHIVKLLTLAKALRLADDRATRKQKQKALDKRRRYEYQPLPKKHCIRLLELAPGKKGDIISFELYEVDLSRNPSYDALSYEWIEKSGTVPVQCDNERLLITPNCKAALENLRSETDARTLWVDAISINQNDVQERNAQVAMMTDIFRRAKSVIMWIGPDEKHTDRAFKLLPLLRTLYTTVQKDPEDPQGLYIDPDDFNTLPQIERVKKLVEKKEVMNALKDLSARQYFQRSWIFQEIILAGERGLVTCGEYSCQWKTFREGLLAFRGFNETSNTEFQATLRGEEIMRRLGSVSLAYSLGCLQRFDAEDPRDKIFAALGICGVKDPRLVADYTLTLREILINVSRWFVDEFQGVYTWNSDIQISPKTMPGLPTWVLEFSSRKETLVRNPFQQPKEEFFAPYTTMPISTTPVSLHTDGCIFDRVAAKVPISKSKDVYSILKAVTRGLARQGRGIYDPYLIDSQAVTRPSKRLKRPRWLLTQCTRLQRRTWRRPFKKEVMTENPKSLEQTNLHAFMKTIFWPGAMLGIADKKRKTARERDPKISSFLAFKLASDHRTPQRSRRSPNSLRNLVKRWKYLQKRSKDYDININAAMEDFVHFDPLGKVEFVLTENGYFGLANANHAKRGMSIAFLTGGDHPLLLKGGEDGDGVWYEVTGRLYLNYMGRTVESLEDLNADAVIERLEIR

SEQ ID NO: 6962 - DNA, 3107 bp, Muscodor strobelii
  misc_feature: SGI EST ID NO. CUFF.17302.0
  misc_feature: Variant of the nucleotide sequence at SEQ ID NO 6960
agctctcttctcccgtttcacaatcgcacttaccatcaaatgtaactccagtactttaagaatcttaggtccatggctcttctttcttcgcaaggcaaaatctctaccgtgggaactattttcgggtcatattgccttgcgctattatacgatttctgcaggaccatgcatgatatctcacccgctaagccccagcgggggtttgcattaggttgcctctcgccgtctgctttacagcctatatagacgccgcgagaaggcgtgtgcaactccaaaatgcagaaacgcaggtacacatgcagccaagcaagccaagcgacatttcttgagcgatgttgcaatcagacttcacgtcaaaggctacaacgcaattgctcctacgcaaggggttctgctccaagggcccaacaccgctgagaggcgagtcgctgatatgggccactgcgaagaacgacgtcgatctggttagaaggctgattgatgagggcgctgatgtcgattcgaaacgcgaggagactggagctacgcctgcgcatcttgcggctgctagtgggttcagtgagattctggagattctgcatgatgctggggcagatttggaggcgagggacgccgatggttggacgccgatgcatttcgctgcacactttggacaactagagatgattcacaagcttgttgatcggggcttggagttggatgcgaggagtgagaacgatgagacgccgctacacgccgctgctaggaaacccgactgcgagatgattcggacgttagttgagctggggtctgatctagatgcgcaaacgaggttgggttttacgccgccgtttgttgctgtgcagaatggtcatttggaggtgatgaagttgttgattgagttggggagtgataaggagataagggcgcagggggataatacgatgttccatattgctgctatgcatagtcatctggatattttggagtatctactcgaaaatgggtatgatgcatttgagacggatgtcatgggacgaacggcgttgtgctctgctgcgcaagggaatgaaagagatgcggttgacctgtttttgcgtcatgggaaagctctcgatccaaaagtcacacgcgttgatctcgcgatgcagatggcagcacgttggggcaacaccggcattttagagctaatcgccgaacacggcattcgactcgatgaacaagacgaagatggatacaacttgctgcatgtcgcttgccaaggggatagcgaggagacaatgcaatatctcatcgagtatggcgttgatctcgaagcgcgagattgcgaggaaatgacaccattcttgagagctgttgatgtaggcagacttgactccgcggagtatttggcgaaccagggggcgaatgtgaggaaattaggtaaaggcgacttctcagctttgcactttgcgatcaaggtgaatgacaaacgcctaatccggttcttaatcagtcgcaaattggacatagaaggcagagatgataacggtcaaactccattgagtcttgcggcgaaactcggtcaccgggatatggtctctgagctactcgctgctaatgcgaataccgccacgaaatgcgatcgatcttggacaccattgcactatgcctcaaatcatggacataaaggtatcgtcgagttattgatcgaaaatggtgccgttatcgctgcaaagacaaaggatgggtacacggctcggactcttgccttgcgagagaagcatattgacatagcggcggtgtttcgggatgaaatgcctgttagcaagaggtcgctggcagatgcagatgctcaatctgagacactattcatcctggctgctgcaaatggtcatctggctgaagtcactcgtctgcttcacggaggcgttgatgtagattgtacagatatcaatggccgaagagccttgaccatggcagcagcgaatgatcagatacagatagtcgagttgctgatcaaccggggtgcttctttgaatcttcaagattccaacggagagaccgcaatttggtgggcagctcggagtggctccgacgagatcgtgcaactacttcttgaaagtgaggtcgacttcaacattgcggatgaggaaggacaaacgcctctttctgtagcatcgcaaacaggtcacgaaaacattgtcaaacgtatgctagaagctggcgccgatccaaattccaagacatcctatggctggacgccgctggcctttgccactagaggaagctaccaatctgtggtcgaatctttgatacagttcggtgccgatgtcaactacatccaacgagatggtacatcagcactgggtatcgcaaaagccatcgagaacgatgaaattatcgctatcttggagaaatacgcaactgatcctgttaagagcgggcctacggacttccgagaagagcttacaaaacatactgggcgtcttcatgttgctgccgaattcgggcgtatagcagaagttaaacgcctccttgaaatcggcatgaaagcacatggctacagagagcggccactgttttcagctgtctctagaggcatggatgctgtagtatcactattacttgatcacggtgcggatattcacgcacaggattcaagcggagcaaccgcaatgcatcgtgctgcgttatctggccacccgtccactatccacctgctgcacagcagaggatcgagactagacgatcaggacgaaacaggttgtacaccacttatgccagcatgtatgatgggcaatgaagaggcagtgaaagctctcctcgaactcggcgcgaaactggagattaaagagaagaagtggaaatctacaccactactaggagcgacgatgagaggatacctaaacatcgtcaagatgttgctcgacaaaggagctaatattaacacggggaacaaggacgggtttaccccattgtcgatggcagtgttcgacaacaaacgctcgcttgtggaactgttactcgaacggggagccaagatgcgacctgattccatcaataacatgtcgccgctgtcaatggcggccgctgcagggcgtgaggggattatcgagctcctggtcgatcacggtgcggatttgaac

SEQ ID NO: 6963 - DNA, 2037 bp, Muscodor strobelii
  misc_feature: SGI cDNA ID NO. 562076
  misc_feature: Encodes the peptide sequence at SEQ ID NO 6964
atggccgaagtattaagcatcgttgcgagcggcatcgcagtagccgaagtagcggttaaagctggtggtctctgggaggaggtcaagattgtcccggagactatctccgatttgatggatcagatcgattgtctcgatccaacactatgggacgcagagtatcagttcagccacagccaactccccccggaactatggagtaactcaacagcagtgaagagcttagccgcttgccgtaaagccatgtcgaagctatctgatattgcatgtgaactgtcaaagatgatacagtcgaagaagaaagttgatcgagcgaaaggtcgcgtgaaagtcattctaaaaaagaatgaactgcaagtactcgagcagcggctgagaacggccgtcatgatgctgcagagcgcgcaaatgggtcatttgatgtcgcttgcacaagttcagcctgacattatagctgaaaagctgatctcttgcttgaaaggaggtcatgatacgaaagagatatcagaaaccttctcttccagtttaggacttattcagggtgtatcgaagtcacttgggagcgatcagggaaatgaagcggtcaatgggactgtacaacgccacaaagtgttgatggaataccacgacgattcagttagcgcgcaaaaagccccgaagtacacatactacaccccctgggaaaaagcttcgctatggggacggttcaagatcaagaagacggacacaggctatacgacaagaattcagtctccctcgtggttttcaagcgctacacgagtatggtcgttaagttatacgcgtaatgcgtatgcaggctggacatatctactgcgttcctataatattaggcccaggactgctccagtcttcgaggcagtggaacacaacaatgtacctcagcttcaggccttgttcaaatcaggcgaaggcagcccttatgaccgcaacgagggcggtctgactctattacactacgccgcccgctacctcgccgcagaaacatactgtttcttagatgatatgaaccttcaacttgatgcccctgatgaagatgaccagacatcgcttgacgtaatgggctggggacctcccaaacgtggcaaccgcacatccaaagaaatagatcttctcaataccatgtactatcgtgctgcgcgtgctagagcccttatccttgatgacgaagagcttcaacatagctgtaggtgccctgtcctggaagactggtcgctattccaatcattacaacctcagcagtgcccagcgcacacagagacctcttttgggagtcgcctcaaaaaggcataccataccatctactttagatttccagtcgaagtggaacagatcaagtttatcctcggtacagactgggcagagcacacaaacgcactttgcagtcaacctatcgacgttatggaattttctgtccttcataccatcgccattgcgatatcacgattttctgaatttacagagacacattctgctgtctttgtcgattcttggcgtgaatttatttgcgaagttattcagagaacagcaaatattcattcttcatgctggaaggagcccatagggggtagatggattgggtcttcctgggtcggtgtcgattatgagatcgaggaagaatgttccctgttattactatgtatgataactgcatccattgatgaggtcatgaccagatggcaagcaggtcgaaacttagcactgaccctccagcactggcttgttatactggagcgggctggcgttgatctcatccactatggacatcgggaaaacaagctgctacgcaacatggagaaacccatcgtgcgacggatcaagcccatctacgtttctcgcagggactacgatatcagccattattggataggcgagtcgtatttatatggttacaaagttggccctctgcctgcagactgggaatgtttttggagcgagccgactgacgaatttgccggacaattttgggatttgattgaagaccctatccgatgtctaccaggtgcatggatcgactaa

SEQ ID NO: 6964 - protein, 678 aa, Muscodor strobelii
  misc_feature: SGI Peptide ID NO. 562076
  misc_feature (1)..(327): NCBI GI: 256724871 Blast Desc: NECHADRAFT_77012 [Nectria haematococca mpVI 77-13-4]
  misc_feature (1)..(315): NCBI GI: 261359203 Blast Desc: [Verticillium albo-atrum VaMs.102]
  misc_feature (1)..(328): NCBI GI: 156050379 Blast Desc: [Sclerotinia sclerotiorum 1980] gi|154692177|gb|EDN91915.1| [Sclerotinia sclerotiorum 1980]
  misc_feature (1)..(328): NCBI GI: 154318556 Blast Desc: [Botryotinia fuckeliana B05.10] gi|150857797|gb|EDN32989.1| [Botryotinia fuckeliana B05.10]
  misc_feature (1)..(280): NCBI GI: 261359910 Blast Desc: [Verticillium albo-atrum VaMs.102]
  misc_feature (274)..(676): NCBI GI: 46108132 Blast Desc: FG00948.1 [Gibberella zeae PH-1]
  misc_feature (1)..(135): NCBI GI: 154317802 Blast Desc: [Botryotinia fuckeliana B05.10] gi|150843542|gb|EDN18735.1| [Botryotinia fuckeliana B05.10]
  misc_feature (575)..(678): NCBI GI: 154317802 Blast Desc: [Botryotinia fuckeliana B05.10] gi|150843542|gb|EDN18735.1| [Botryotinia fuckeliana B05.10]
  misc_feature (1)..(156): NCBI GI: 255947028 Blast Desc: Pc22g02370 [Penicillium chrysogenum Wisconsin 54-1255] gi|211591298|emb|CAP97525.1| Pc22g02370 [Penicillium chrysogenum Wisconsin 54-1255]
  misc_feature (505)..(678): NCBI GI: 261359910 Blast Desc: [Verticillium albo-atrum VaMs.102]
MAEVLSIVASGIAVAEVAVKAGGLWEEVKIVPETISDLMDQIDCLDPTLWDAEYQFSHSQLPPELWSNSTAVKSLAACRKAMSKLSDIACELSKMIQSKKKVDRAKGRVKVILKKNELQVLEQRLRTAVMMLQSAQMGHLMSLAQVQPDIIAEKLISCLKGGHDTKEISETFSSSLGLIQGVSKSLGSDQGNEAVNGTVQRHKVLMEYHDDSVSAQKAPKYTYYTPWEKASLWGRFKIKKTDTGYTTRIQSPSWFSSATRVWSLSYTRNAYAGWTYLLRSYNIRPRTAPVFEAVEHNNVPQLQALFKSGEGSPYDRNEGGLTLLHYAARYLAAETYCFLDDMNLQLDAPDEDDQTSLDVMGWGPPKRGNRTSKEIDLLNTMYYRAARARALILDDEELQHSCRCPVLEDWSLFQSLQPQQCPAHTETSFGSRLKKAYHTIYFRFPVEVEQIKFILGTDWAEHTNALCSQPIDVMEFSVLHTIAIAISRFSEFTETHSAVFVDSWREFICEVIQRTANIHSSCWKEPIGGRWIGSSWVGVDYEIEEECSLLLLCMITASIDEVMTRWQAGRNLALTLQHWLVILERAGVDLIHYGHRENKLLRNMEKPIVRRIKPIYVSRRDYDISHYWIGESYLYGYKVGPLPADWECFWSEPTDEFAGQFWDLIEDPIRCLPGAWID

SEQ ID NO: 6965 - DNA, 1730 bp, Muscodor strobelii
  misc_feature: SGI EST ID NO. CUFF.17318.0
  misc_feature: Variant of the nucleotide sequence at SEQ ID NO 6963
cagaaaccttctcttccagtttaggacttattcagggtgtatcgaagtcacttgggagcgatcagggaaatgaagcggtcaatgggactgtacaacgccacaaagtgttgatggaataccacgacgattcagttagcgcgcaaaaagccccgaagtacacatactacaccccctgggaaaaagcttcgctatggggacggttcaagatcaagaagacggacacaggctatacgacaagaattcagtctccctcgtggttttcaagcgctacacgagtatggtcgttaagttatacgcgtaatgcgtatgcaggctggacatatctactgcgttcctataatattaggcccaggactgctccagtcttcgaggcagtggaacacaacaatgtacctcagcttcaggccttgttcaaatcaggcgaaggcagcccttatgaccgcaacgagggcggtctgactctattacactacgccgcccgctacctcgccgcagaaacatactgtttcttagatgatatgaaccttcaacttgatgcccctgatgaagatgaccagacatcgcttgacgtaatgggctggggacctcccaaacgtggcaaccgcacatccaaagaaatagatcttctcaataccatgtactatcgtgctgcgcgtgctagagcccttatccttgatgacgaagagcttcaacatagctgtaggtgccctgtcctggaagactggtcgctattccaatcattacaacctcagcagtgcccagcgcacacagagacctcttttgggagtcgcctcaaaaaggcataccataccatctactttagatttccagtcgaagtggaacagatcaagtttatcctcggtacagactgggcagagcacacaaacgcactttgcagtcaacctatcgacgttatggaattttctgtccttcataccatcgccattgcgatatcacgattttctgaatttacagagacacattctgctgtctttgtcgattcttggcgtgaatttatttgcgaagttattcagagaacagcaaatattcattcttcatgctggaaggagcccatagggggtagatggattgggtcttcctgggtcggtgtcgattatgagatcgaggaagaatgttccctgttattactatgtatgataactgcatccattgatgaggtcatgaccagatggcaagcaggtcgaaacttagcactgaccctccagcactggcttgttatactggagcgggctggcgttgatctcatccactatggacatcgggaaaacaagctgctacgcaacatggagaaacccatcgtgcgacggatcaagcccatctacgtttctcgcagggactacgatatcagccattattggataggcgagtcgtatttatatggttacaaagttggccctctgcctgcagactgggaatgtttttggagcgagccgactgacgaatttgccggacaattttgggatttgattgaagaccctatccgatgtctaccaggtgcatggatcgactaagttggaattgttttcaatgtacgagaccgaaagctgatcagaagatgtatgaagtgctattgacatgggttcggtctctttgagtagcatgattgatgaatcactggatgcgcttcaaagctaggtacagattgaaattatggaagtcaacgagctttgaaacatgtaattgaatcaatgttatatatgcaactgatc

SEQ ID NO: 6966 - DNA, 957 bp, Muscodor strobelii
  misc_feature: SGI cDNA ID NO. 562077
  misc_feature: Elevated expression when VOC is produced
  misc_feature: Encodes the peptide sequence at SEQ ID NO 6967
atgtatcgccttcgcaatagcaacactgtcgctcgcgtatcaaagtcgtgccagcaaatccaaccgcgcgtacagtcacgattccctcgactttctgctcaggcgcatcctcgagccctagtcctcgggagcagacctctcgaggactgggcgcgctcttcaacaagacagctacctagaaagctcttcagcagctatgcgcccgtaataagcgactggggcattcggctacccaaaggagcacccgagttcgcgcatatcaaggcctattcagcatgtcctgagttcgtcgacgaagtctgggggttcgtggtctatcgttgtgccgagtccgacgaagcaacctggcgccgcatgctgcagcatatctacgatgcaattgagggcacactgaagtattacggccaggagggcttgatgtgtttctatggagccactacgcaccaggtgcgagagcatttccgagcctgggcatccaaagatgtcacaaacaggctcagacccgatgcaggaaagaccatcgaggacttaatgggctggagaccggagacacacacggcacgttataaaaattgtttattcatcgacacgatctgccttgaatcgctcgattatacggaaggtgttccgggcagtattcactttcccgtggtcaagctagttaacaaggattggccagtacccagccccagtcctgaggaaaggcgagagctagtagaacagcctgatattgacgacgttgagatgcctgaagactattgcaacgaagaggatgtcggatggatgtacatgcctctctatcaatacgtgggctggtacgactcgctgtgcgatccgacccactgggatcttacatgcttgagaccgccgtatatctgggagggcagctgtgacgagaagtggctccccggctactggaggaggtcagaggtcgaggggaatgaaccaagcaaatag

SEQ ID NO: 6967 - protein, 318 aa, Muscodor strobelii
  misc_feature: SGI Peptide ID NO. 562077
  misc_feature (98)..(312): NCBI GI: 226277866 Blast Desc: conserved [Paracoccidioides brasiliensis Pb01]
  misc_feature (100)..(318): NCBI GI: 226293140 Blast Desc: conserved [Paracoccidioides brasiliensis Pb18]
  misc_feature (100)..(318): NCBI GI: 225683776 Blast Desc: PABG_04271 [Paracoccidioides brasiliensis Pb03]
  misc_feature (100)..(293): NCBI GI: 238844942 Blast Desc: conserved [Microsporum canis CBS 113480]
  misc_feature (1)..(318): NCBI GI: 261189217 Blast Desc: conserved [Ajellomyces dermatitidis SLH14081] gi|239591805|gb|EEQ74386.1| conserved [Ajellomyces dermatitidis SLH14081]
  misc_feature (1)..(318): NCBI GI: 239614722 Blast Desc: conserved [Ajellomyces dermatitidis ER-3]
  misc_feature (98)..(308): NCBI GI: 115398462 Blast Desc: [Aspergillus terreus NIH2624] gi|114191703|gb|EAU33403.1| [Aspergillus terreus NIH2624]
  misc_feature (97)..(292): NCBI GI: 116207952 Blast Desc: [Chaetomium globosum CBS 148.51] gi|88183866|gb|EAQ91334.1| [Chaetomium globosum CBS 148.51]
  misc_feature (142)..(310): NCBI GI: 115401030 Blast Desc: [Aspergillus terreus NIH2624] gi|114190044|gb|EAU31744.1| [Aspergillus terreus NIH2624]
  misc_feature (99)..(293): NCBI GI: 256723488 Blast Desc: NECHADRAFT_94069 [Nectria haematococca mpVI 77-13-4]
  misc_feature: Useful for introducing or modulating the production of volatile compounds
MYRLRNSNTVARVSKSCQQIQPRVQSRFPRLSAQAHPRALVLGSRPLEDWARSSTRQLPRKLFSSYAPVISDWGIRLPKGAPEFAHIKAYSACPEFVDEVWGFVVYRCAESDEATWRRMLQHIYDAIEGTLKYYGQEGLMCFYGATTHQVREHFRAWASKDVTNRLRPDAGKTIEDLMGWRPETHTARYKNCLFIDTICLESLDYTEGVPGSIHFPVVKLVNKDWPVPSPSPEERRELVEQPDIDDVEMPEDYCNEEDVGWMYMPLYQYVGWYDSLCDPTHWDLTCLRPPYIWEGSCDEKWLPGYWRRSEVEGNEPSK

SEQ ID NO: 6968 - DNA, 2079 bp, Muscodor strobelii
  misc_feature: SGI EST ID NO. CUFF.17323.0
  misc_feature: Variant of the nucleotide sequence at SEQ ID NO 6966
taaggaccgaattagcgcaaccttattgcatatttgtgacacagctccaagctcgcgtttcacgtatcaggtctcaagacataccaccagctttaaccgctacttcggctactgcgatgccgctcgcaacgatgcttaatacttcggccatgatggcgcgttatctcaacaagagatctcaatatagcatcaccgctgatcagggagacaggtaataaagtaaggctgggagttcattgtcaatcaatatagagcagcatcaacgccgtcagcagagctctttgaggtagcattcggcatgcgggcgttggggctgtgtgcaggcatatgtgcgtaggacgagatgcctcgcctcgtctgggacgccacttgcccaacatgggcgctcatcttaggagcaaacattcaataagtctgtgctacccgcattgaggccagagtttgtttgttctgtggattgcatcttgtactcgcaatgattctacctgttgaaacaataatcaacaaatccaaaaagagaggtaacatctcaacacccggccgaaaagtaaacttaaagtataaactagaataaaaatgcaacccagctcaaacttcgattctttattgactactgtctaccggattcaagtcgaagagcgagagcagacaaaagcttgaagattgtggtcattcgcgaggtacctaggcagtgagtaggactggttcactaacaacccgcctaacggcccctagacacgcataggctcaatcccctgatgctccactatctcaatccactgcattcgctcgcagtctcgactacacggtgtttttgattcctgatttccagtaaatttctcaattttatgtatcgccttcgcaatagcaacactgtcgctcgcgtatcaaagtcgtgccagcaaatccaaccgcgcgtacagtcacgattccctcgactttctgctcaggcgcatcctcgagccctagtcctcgggagcagacctctcgaggactgggcgcgctcttcaacaagacagctacctagaaagctcttcagcagctatgcgcccgtaataagcgactggggcattcggctacccaaaggagcacccgagttcgcgcatatcaaggcctattcagcatgtcctgagttcgtcgacgaagtctgggggttcgtggtctatcgttgtgccgagtccgacgaagcaacctggcgccgcatgctgcagcatatctacgatgcaattgagggcacactgaagtattacggccaggagggcttgatggttcatcacaaattgcacgtagtcgacgacaaaaccttatagtggagccactacgcaccaggtgcgagagcatttccgagcctgggcatccaaagatgtcacaaacaggctcagacccgatgcaggaaagaccatcgaggacttaatgggctggagaccggagacacacacggcacgttataaaaattgtttattcatcgacacgatctgccttgaatcgctcgattatacggaaggtgttccgggcagtattcactttcccgtggtcaagctagttaacaaggattggccagtacccagccccagtcctgaggaaaggcgagagctagtagaacagcctgatattgacgacgttgagatgcctgaagactattgcaacgaagaggatgtcggatggatgtacatgcctctctatcaatacgtgggctggtacgactcgctgtgcgatccgacccactgggatcttacatgcttgagaccgccgtatatctgggagggcagctgtgacgagaagtggctccccggctactggaggaggtcagaggtcgaggggaatgaaccaagcaaatagaaggggcgcatagtcgcgcgagtacctttcagtagatagcatatcgttgcttcactatatccatcgcagcgtttgagatttgataacaaggcaagctacctctgacttcaatctcttgccccaacatgcttcccgtgcatgtaatagccctatatttacaaccgcacttaccggtacaataccgtgaagacaagtagctggccgagctctgcgtagttggtgatatctacgctactaagg

SEQ ID NO: 6969 - DNA, 1584 bp, Muscodor strobelii
  misc_feature: SGI cDNA ID NO. 562078
  misc_feature: Elevated expression when VOC is produced
  misc_feature: Encodes the peptide sequence at SEQ ID NO 6970
atggctacacaatcagacatgaaggagtcgtcgcttgacgagcagcccaaagatagcggtttcaacaaagatgaaactgcgtatcatgagcatatctccgttcacagcggcgaggacattcttggtatgcaggatcttgaccctgtgttgaacgccaagatgcatctcgtcaacaacgctattgatgagattggatggacgaactaccattggaaacttttcgttttgaacgggtttggttacgctgtcgattctatgatcaccctcatccagagcaacgtcgcagcaccagctttcaaggaattcggctcaagtggatacgcaaatggccttagcattgcttcttactctggattactcgccggtgctctgttctggggattcggtgccgacatcattggccgccgatgggctttcaatctctcgctcttcatctgttctgctgcagctattgtggctgggtcctctcccaattggcctgttcttggactattcgtcgctcttgttggatttggcggcggtggcaatcttatcttggatactgccgtcttcctcgagtttcttcctggtaaccgacaatggatgttgacccttatggcttgttggtggggcttcggccaggccatcaccggattcatctgctggggatttctagtccccacgcaatggaactgcgacctcagtgatgttgatggcgactgttcaaagtctggcaacatgggctggagatatgtctactttacttctggagctctcgtcttcgtactgtctctcttgcgcattactatcgttcgcctgaaggaaacaccaaagtactgtctcggcgccggagacgacgctgcggttgtcaatacccttcaagatatggcaaagaaatacaatcgcacatgctcattgactcttgaacaacttcaggcatgtggaaagatacaaagcgcccacagcgaatcacgtttctctttcagcgaattcaaggttcatctgtcgggcttgtttgcaacgaggaagataggaatatctactgttctgaactggctttcatggacgctcattggtcttgcttacccgctcttctatgtcttcctatccacatatctcaagggtcgcggcgtggaaagctcgacgagccctttcatcgtctggcgaaattacacactaaccaatatctccggtattcctgggcccatcctcgctggtttcttgtgcaacataaagcttctcggtcgcaaatacaccatggtcattggcgcgctcctctcgatggttttcttcttcgcctacactgcgattacgacggaagatcaaaacgtcgggttcagttgcgttatcgctttttgcatcaacatctactacggttgcttgtatgcatatacaccagaagtcctgccgagtccacaccgcacaactggaaacggggttgcagtcgcactcaatcggatcatgggtattgtctcagctgttgttgctaccgaagcggatacctcgacgtcagtcccgatctatattaccgcagcgctctacgccgtgatggctatcgtcgcggccagcttcccgtttgagccgtacgggcgacgaagttcatag

SEQ ID NO: 6970 - protein, 527 aa, Muscodor strobelii
  misc_feature: SGI Peptide ID NO. 562078
  misc_feature (73)..(486): Pfam Id: PF07690 Pfam Desc: Major Facilitator Superfamily
  misc_feature (241)..(486): Pfam Id: PF07690 Pfam Desc: Major Facilitator Superfamily
  misc_feature (10)..(527): NCBI GI: 171677177 Blast Desc: protein product [Podospora anserina] gi|170936656|emb|CAP61315.1| protein product [Podospora anserina]
  misc_feature (7)..(527): NCBI GI: 85090302 Blast Desc: NCU09767 [Neurospora crassa OR74A] gi|28919707|gb|EAA29115.1| conserved [Neurospora crassa OR74A]
  misc_feature (7)..(527): NCBI GI: 189202284 Blast Desc: membrane transporter [Pyrenophora tritici-repentis Pt-1C-BFP] gi|187984577|gb|EDU50065.1| membrane transporter [Pyrenophora tritici-repentis Pt-1C-BFP]
  misc_feature (24)..(527): NCBI GI: 212536810 Blast Desc: conserved [Penicillium marneffei ATCC 18224] gi|210070960|gb|EEA25050.1| conserved [Penicillium marneffei ATCC 18224]
  misc_feature (22)..(527): NCBI GI: 67904604 Blast Desc: AN9289.2 [Aspergillus nidulans FGSC A4] gi|40747200|gb|EAA66356.1| AN9289.2 [Aspergillus nidulans FGSC A4] gi|259488123|tpe|CBF87339.1| TPA: conserved [Aspergillus FGSC
  misc_feature (13)..(527): NCBI GI: 115383778 Blast Desc: conserved [Aspergillus terreus NIH2624] gi|114196128|gb|EAU37828.1| conserved [Aspergillus terreus NIH2624]
  misc_feature (15)..(527): NCBI GI: 242796963 Blast Desc: sugar transporter, [Talaromyces stipitatus ATCC 10500] gi|218719501|gb|EED18921.1| sugar transporter, [Talaromyces stipitatus ATCC 10500]
  misc_feature (8)..(527): NCBI GI: 119495773 Blast Desc: MFS transporter, [Neosartorya fischeri NRRL 181] gi|119412826|gb|EAW22767.1| MFS transporter, [Neosartorya fischeri NRRL 181]
  misc_feature (7)..(527): NCBI GI: 256722397 Blast Desc: NECHADRAFT_44393 [Nectria haematococca mpVI 77-13-4]
  misc_feature (16)..(527): NCBI GI: 255948892 Blast Desc: Pc22g12700 [Penicillium chrysogenum Wisconsin 54-1255] gi|211592230|emb|CAP98558.1| Pc22g12700 [Penicillium chrysogenum Wisconsin 54-1255]
  misc_feature: Useful for introducing or modulating the production of volatile compounds
MATQSDMKESSLDEQPKDSGFNKDETAYHEHISVHSGEDILGMQDLDPVLNAKMHLVNNAIDEIGWTNYHWKLFVLNGFGYAVDSMITLIQSNVAAPAFKEFGSSGYANGLSIASYSGLLAGALFWGFGADIIGRRWAFNLSLFICSAAAIVAGSSPNWPVLGLFVALVGFGGGGNLILDTAVFLEFLPGNRQWMLTLMACWWGFGQAITGFICWGFLVPTQWNCDLSDVDGDCSKSGNMGWRYVYFTSGALVFVLSLLRITIVRLKETPKYCLGAGDDAAVVNTLQDMAKKYNRTCSLTLEQLQACGKIQSAHSESRFSFSEFKVHLSGLFATRKIGISTVLNWLSWTLIGLAYPLFYVFLSTYLKGRGVESSTSPFIVWRNYTLTNISGIPGPILAGFLCNIKLLGRKYTMVIGALLSMVFFFAYTAITTEDQNVGFSCVIAFCINIYYGCLYAYTPEVLPSPHRTTGNGVAVALNRIMGIVSAVVATEADTSTSVPIYITAALYAVMAIVAASFPFEPYGRRSS

SEQ ID NO: 6971 - DNA, 1232 bp, Muscodor strobelii
  misc_feature: SGI EST ID NO. CUFF.17336.0
  misc_feature: Variant of the nucleotide sequence at SEQ ID NO 6969
caatcttatcttggatactgccgtcttcctcgagtttcttcctggtaaccgacaatggatgttgacccttatggcttgttggtggggcttcggccaggccatcaccggattcatctgctggggatttctagtccccacgcaatggaactgcgacctcagtgatgttgatggcgactgttcaaagtctggcaacatgggctggagatatgtctactttacttctggagctctcgtcttcgtactgtctctcttgcgcattactatcgttcgcctgaaggaaacaccaaagtactgtctcggcgccggagacgacgctgcggttgtcaatacccttcaagatatggcaaagaaatacaatcgcacatgctcattgactcttgaacaacttcaggcatgtggaaagatacaaagcgcccacagcgaatcacgtttctctttcagcgaattcaaggttcatctgtcgggcttgtttgcaacgaggaagataggaatatctactgttctgaactggctttcatggacgctcattggtcttgcttacccgctcttctatgtcttcctatccacatatctcaagggtcgcggcgtggaaagctcgacgagccctttcatcgtctggcgaaattacacactaaccaatatctccggtattcctgggcccatcctcgctggtttcttgtgcaacataaagcttctcggtcgcaaatacaccatggtcattggcgcgctcctctcgatggttttcttcttcgcctacactgcgattacgacggaagatcaaaacgtcgggttcagttgcgttatcgctttttgcatcaacatctactacggttgcttgtatgcatatacaccagaagtcctgccgagtccacaccgcacaactggaaacggggttgcagtcgcactcaatcggatcatgggtattgtctcagctgttgttgctaccgaagcggatacctcgacgtcagtcccgatctatattaccgcagcgctctacgccgtgatggctatcgtcgcggccagcttcccgtttgagccgtacgggcgacgaagttcataggttatactacggatgctggtcaccacatgttggattgcatgattcggcgaagggaaatgtcagcaaacaagggttggtttgcatttgtttcgcaggagcttgatatcacggagtttcacaaacgtcacgcgacctttaagatacccaatcaacaaagtaattttgattcttg

SEQ ID NO: 6972 - DNA, 666 bp, Muscodor strobelii
  misc_feature: SGI cDNA ID NO. 562079
  misc_feature: Encodes the peptide sequence at SEQ ID NO 6973
atggctgcccctgacgctaaaacgcgcatcatgtcccacatgaacaaggaacatggtgcagaactcaagcaatatctgcgagcgttcaatgggctctcttcctctgcggccgccgatgcagagctcgtagacttgtctcttgatacgctcagcatcaagtctgcctctgggctacacaaagttcgtgtatcgccgcccatgaagacgctagcagacgcacgtgttcggctcgtcgatatggcacaaaccgcgcagcagaaactcggccttagcaacatacggataaatgagttcaaggggccacgaggcgttggtattgtctcattcatcggcgtcagcttctatttcacgagtgccctagccttgagcttcggcttactacgccctggcacgacagcttggacgattctggacaaccgcttcccctatggcgcagaggggtttgcatggctagtcaatgcaatcgcgatccctgttctgattattcacgtcactgaggcctggtggatggcccgtggcagactagcgactcacgggatcgaggtcgggagtactctttggctcctttgggtttgccaagtattcctcgagggttatcccgccatggcgcgattcgatggcctcgtcgcagaggagaaaaagaagaaagagagcgcaaagcattaa

SEQ ID NO: 6973 - protein, 221 aa, Muscodor strobelii
  misc_feature: SGI Peptide ID NO. 562079
  misc_feature (1)..(221): NCBI GI: 261353025 Blast Desc: conserved [Verticillium albo-atrum VaMs.102]
  misc_feature (2)..(221): NCBI GI: 256734668 Blast Desc: NECHADRAFT_75164 [Nectria haematococca mpVI 77-13-4]
  misc_feature (1)..(216): NCBI GI: 46108164 Blast Desc: FG00964.1 [Gibberella zeae PH-1]
  misc_feature (7)..(217): NCBI GI: 171688936 Blast Desc: protein product [Podospora anserina] gi|170944430|emb|CAP70541.1| protein product [Podospora anserina]
  misc_feature (7)..(218): NCBI GI: 156043397 Blast Desc: SS1G_10702 [Sclerotinia sclerotiorum 1980] gi|154695089|gb|EDN94827.1| SS1G_10702 [Sclerotinia sclerotiorum 1980]
  misc_feature (2)..(209): NCBI GI: 119496923 Blast Desc: integral membrane protein, [Neosartorya fischeri NRRL 181] gi|119413396|gb|EAW23337.1| integral membrane protein, [Neosartorya fischeri NRRL 181]
  misc_feature (7)..(220): NCBI GI: 70990660 Blast Desc: integral membrane protein [Aspergillus fumigatus Af293] gi|66847811|gb|EAL88141.1| integral membrane protein, [Aspergillus fumigatus Af293] gi|159130656|gb|EDP55769.1| A1163]
  misc_feature (7)..(209): NCBI GI: 154316638 Blast Desc: BC1G_04250 [Botryotinia fuckeliana B05.10] gi|150846050|gb|EDN21243.1| BC1G_04250 [Botryotinia fuckeliana B05.10]
  misc_feature (6)..(220): NCBI GI: 238486346 Blast Desc: integral membrane protein, [Aspergillus flavus NRRL3357] gi|220699290|gb|EED55629.1| integral membrane protein, [Aspergillus flavus NRRL3357]
  misc_feature (6)..(220): NCBI GI: 169771133 Blast Desc: [Aspergillus oryzae RIB40] gi|83767895|dbj|BAE58034.1| protein product [Aspergillus oryzae]
MAAPDAKTRIMSHMNKEHGAELKQYLRAFNGLSSSAAADAELVDLSLDTLSIKSASGLHKVRVSPPMKTLADARVRLVDMAQTAQQKLGLSNIRINEFKGPRGVGIVSFIGVSFYFTSALALSFGLLRPGTTAWTILDNRFPYGAEGFAWLVNAIAIPVLIIHVTEAWWMARGRLATHGIEVGSTLWLLWVCQVFLEGYPAMARFDGLVAEEKKKKESAKH

SEQ ID NO: 6974 - DNA, 1565 bp, Muscodor strobelii
  misc_feature: SGI EST ID NO. CUFF.17341.0
  misc_feature: Variant of the nucleotide sequence at SEQ ID NO 6972
gcgacagcctagccccctgttcgaactgacaatgaaccaagatctttgacttctacgctgttcactaatgcaggcccaagaacgcaatcgacctagtctaccacccgagactgagtagcaattccctgacgacgatacagtctagtgtgcctttatttattaagtggactattggtagatgcctgcctagtaattggcttgacatggcaaagagggaaagagggaatatcggtctcctctctgacacttgtccgtccatgcttcgcgaagttttatatgatcatattcaatgcgatttcacgacgattcacgttttgaaatgccttgccgatgaacgatgctgtacgaggtcgagtctgactcagatacctggctccgacatgtcggaaaccgctgtgaatacataatgcgggttagttgcatatttggactttgccttttcgatgggaggatcttccgaacctcggcatggtgaaatggcacctcactggagctcataagacacacattcatcaagagtcactggtgttcgcatcgtatccttccataggagtgtccctttcaaccccttcaccggcgatacatagatttcaaggtcacttagcgtcaacttcgtcctctccgacaaaatggctgcccctgacgctaaaacgcgcatcatgtcccacatgaacaaggaacatggtgcagaactcaagcaatatctgcgagcgttcaatgggctctcttcctctgcggccgccgatgcagagctcgtagacttgtctcttgatacgctcagcatcaagtctgcctctgggctacacaaagttcgtgtatcgccgcccatgaagacgctagcagacgcacgtgttcggctcgtcgatatggcacaaaccgcgcagcagaaactcggccttagcaacatacggataaatgagttcaaggggccacgaggcgttggtattgtctcattcatcggcgtcagcttctatttcacgagtgccctagccttgagcttcggcttactacgccctggcacgacagcttggacgattctggacaaccgcttcccctatggcgcagaggggtttgcatggctagtcaatgcaatcgcgatccctgttctgattattcacgtcactgaggcctggtggatggcccgtggcagactagcgactcacgggatcgaggtcgggagtactctttggctcctttgggtttgccaagtattcctcgagggttatcccgccatggcgcgattcgatggcctcgtcgcagaggagaaaaagaagaaagagagcgcaaagcattaatcatgaggattatgagcatcatcagcgtgttgcatttacagtggatattggggtacgggacatgaacatttatagaacatcacgctttcatcatatagaaatcttatttccttctaagtgcgtattgatctagctcgggtgtgactaaaccgttgcaacgctttcggcgataaaggatgatgtttaaatgatgctctatgcacacatccggatttttgttaggcacgcgcatcgtaattcgcgtcggcgcagggcacagcaacacaggtg

SEQ ID NO: 6975 - DNA, 1761 bp, Muscodor strobelii
  misc_feature: SGI cDNA ID NO. 562080
  misc_feature: Encodes the peptide sequence at SEQ ID NO 6976
atggagtacactggggattattccatctttgatcagcccatcatgggctaccagagacgtcgagcaccacaggaaagcagctttgacgacggtcacagtcacatgatgccgtcgcggcagagcccggccctccagccggtgtttttcgacaatcagtccttttctgggcttggtgcgcagtttgcccttcagactcagcttgttcagcagcctatggttcagtggccgagtctccccatttctctgaatagagatgtcgacccgatgcatcagtattttgctttgcagcatccttctgatcagcatcctcctggcaatatcagccacttagcgggcgccgaattcaacattgctgagcagttcagcgaacagccgcagctcccaatctctaaccaccaagctccatcacatgctccgctgttgcatcacggtcataccgacaatgcatacgacgattacattcagaaacaagatgctggccagcatagtgcaaacgatgaggagaagaacctgtacatttccccagatcagcttcattcagccactcaggagcagatagaaccgctgtctcaggtgtcaagcgagccgaccgttaggcatgatgattgggacgctaccctggcgtccattagtgatgatgagtgggcggctctattctccccgatctcaggtgatgttctcgtggaaacacatcaaccccaattcgttgccgaggaggaaacacctcaggtagtcgaccttcaggcacaggtcgaaccagctctgttacctggcgagccgatcattactgaacatgattgggaagttctccacgccccgatcgaaggtgatattccagtgcagaacgtaatggacctccaggcacaggtcgaaccagctctgttatctggcgagccgatcattgatgcacatgattgggcggctcgactgcaaccggtcgcggattggacattaaagcagcaaacgccagaacaacagcctcaattgtctgacgaagagataatcgaccaagcagttaagctttcgctacagagcggaatacctgctgcgcccgaaccagagcagccagcccccaaatcaaagaaacgcaaggcggccactgctattgaaggagaacagccatcgtcaaaaaagccaagaaaggtcggaaccaattcatgcgatcgttgcagaaagggcaaaatgcggtgcgtctttcctgaaggttctcaggagtgcacttgctgcatgaaaaagggctgcggatgcagtggtccagcaactgtcgacaagagaaccaacaacacgaatgagagagatctgaagtgcttcctcgtagcattgaaaagatcgatcaacaattctctgactctcctctgccgcttggggaacggagaacctgggatgttcgagatgtgctgcgaccatccttacgaggacattgagggactacaactaatcgatttccccgacccgcctcagctcgctcgctttgatagccaacatgaattgctcagtgagaagagaagagcattcgacgaggctatcgaagatggtcagaagatttggactttcctctgcctaattcgtgagggtattgcccaaggggaagaaagcttttggatcagtcgtgcttctgaagaatggcttcagcatggtttcaaagtagacgaagagtttcttacagataagaaccatccgttttgggccgaatttagagctgaaggttggaaaaagttcaacgcgcgattccacgaccttctacccgaccgggcaaagtaa

SEQ ID NO: 6976 - protein, 586 aa, Muscodor strobelii
  misc_feature: SGI Peptide ID NO. 562080
  misc_feature (322)..(427): NCBI GI: 50312375 Blast Desc: protein product [Kluyveromyces lactis] gi|49645357|emb|CAG98929.1| KLLA0F25630p [Kluyveromyces lactis]
MEYTGDYSIFDQPIMGYQRRRAPQESSFDDGHSHMMPSRQSPALQPVFFDNQSFSGLGAQFALQTQLVQQPMVQWPSLPISLNRDVDPMHQYFALQHPSDQHPPGNISHLAGAEFNIAEQFSEQPQLPISNHQAPSHAPLLHHGHTDNAYDDYIQKQDAGQHSANDEEKNLYISPDQLHSATQEQIEPLSQVSSEPTVRHDDWDATLASISDDEWAALFSPISGDVLVETHQPQFVAEEETPQVVDLQAQVEPALLPGEPIITEHDWEVLHAPIEGDIPVQNVMDLQAQVEPALLSGEPIIDAHDWAARLQPVADWTLKQQTPEQQPQLSDEEIIDQAVKLSLQSGIPAAPEPEQPAPKSKKRKAATAIEGEQPSSKKPRKVGTNSCDRCRKGKMRCVFPEGSQECTCCMKKGCGCSGPATVDKRTNNTNERDLKCFLVALKRSINNSLTLLCRLGNGEPGMFEMCCDHPYEDIEGLQLIDFPDPPQLARFDSQHELLSEKRRAFDEAIEDGQKIWTFLCLIREGIAQGEESFWISRASEEWLQHGFKVDEEFLTDKNHPFWAEFRAEGWKKFNARFHDLLPDRAK

SEQ ID NO: 6977 - DNA, 4401 bp, Muscodor strobelii
  misc_feature: SGI cDNA ID NO. 562081
  misc_feature: Encodes the peptide sequence at SEQ ID NO 6978
atggctagttctcctgagcctaagccaatatatgactcggaaacacttgatatagatgattttgatccaatcagccttgatgtcgctcccgatggatcctttactcctcctgcccaacgggaagcgacgatacatgctcgagcatatcaactagagatgcttgaagcaagtctcaaagagaacattattgtagttatggatacaggcagtgggaagactcaagttgcagtccttcggatcaaagcagagcttgagaagccgtctaacaagatgatctggttccttgcgccaacagtcaccctgtgtgagcaacaacacaaagtcctcacctcacaaataggagcagttcagatcaaactccttagtggtacagatgatgttgatacatggtctgatcaacagatatgggatgattacttgtggaatgtacgagtcattgtttcgactcatcaggtcttgtttgatgctgtatcccatggctttgtgaagatcagcgggctctcccttattgtatttgatgaagcccataactgcattggaaaacaccctgggagtaagctcatggagcgttatcgtatctctaagtccgcggggttgccttgcccttctatccttggtctcactgcaagccctatcatgaaatctcacattgactctattgaaatcattgagagaacgcttgatgccatttgcaagacgccttctattcacagagccgaactacttgctgcagtcaacctccctagagtaagctacattgcacttccagaagtctttatgccggttgcgaccgatgctatggtcagcctgagtcgtgctctccacaacctggacatcaccatggatccttccatattgcggcttcgaaaagaggcgacggagaagagtcttataaagctcgcaagggcttttgcaaccgaagataccctcatccagaaccagatgaaatcactggtaagaacgagcaccgccatcctcgctcaactaggcagttgggccgcagactactacatctattgctctctgcaaagggctcgaggattcaacaacaacgatgttcctttggcaggaaaatggacccccgaagagtctcagtacttggccgatatcttacaacaggtgaaggtagacgaaccaaaagaattcgactatgttccagatgaaatgatatctccaaagttccagattctggtccaacgactcctggagactcctgaagatgggatgtgcatcgtcttcgtccaggaacgatgtacagttgccatcatgaactatatgctttcagcacacccatccatcaggagtcgctttcgagtgggcagaatgatcggcactagtaacggttcgaagcggaaatatgatcttggaggtttcgacacaaccaaagatactcttgatctggaggatttccgagcgggaagactgaatttactcctggcgaccagtatcctcgaggaaggcatcgatgtgccagcctgtaactttgtgttctgtttcgacgaaccgacaaacctgaagtccttcattcagagacgaggcagagcaagaatgcccgaatcagagcttgttgtgatgctgaacgggacactggacaagcatacggcattgatagatctagagaaggaaatgaaactgcgctacgaagacgagcagagagcaatctctgaaatggctgtgctcgaagctaaagaggaaaacaccactgtggccccgttgattgttgctagtacgggtgctcgtcttgatatcgatcaggcaaagccgcatcttgagcacttctgcaacaacgtaacagcaaacaagtacgtcgaccatcgcccattctatattaagaagatcgaagaatcgtcagaacccggccatcccaatatcaaagcaactgtagttttgccctcaacactgcctcagagcattcgtcgagtggatggagtcggactctggtattccgagaaaaatgccttcaaggacgcggcacttcaagcaatcaaggctatttacgagctcggcttactcaactccaacctgctgccgatcactggtgaaccatataaggacgtaattgagcagaggacgaagctagaaaccgtcaacggtgtcaggagcccttggcctaggattgctcgcctgtggcgcgagtcaacggaggtggtacagagacgtgtacagctgaaggacaacgatacagtgatctgcgagttcgacgtgtcactgccactcacgttcccaaatatcccggagtttcccatctattggggtgagaacaccacgtggaccgttgctacaagcgctgaagccaatgtccttccggttacagacttgatgaaggaccaaagtcctgctttgcttgctctggcatatggttatcgcctccaaggtatcgaagattctcaacaggttatgcacgtacagtcttcgtatgttatcgactttgccaatgcatccctgaagcgtatcaaagacaacgtcggtccaattgtgagagaaaatctccattcacgctccattgtgcgatttgatgggactgtaccacatctcttccacgagtggctcgaatcgatgcccgacatggagctggttcagcgaaaaccgcatccccaattcaaggagccatcgttggcttcttccccttgggtagcagtaaagaaatggccgagacggttcactttcctcacgccccagaatgacgaggacttgtcgttgacggcgactaagaagacgtactacaagatcatccctgcgtcgcattgtatgatagaaacagtcgaaagagctaagatcttcttcggcgtgactatcccttcttttatgcacgtgatcgacctttatcttggagccgaggagctctgtaacagcattttgccaaaagtcgcctttgttgatcgttctctcgtggtaactgccattagttcgtctgctaccagtggtatggtcaactatgagaggttagagttcctcggagacactattctaaaggcatttgcaacgatagcagtgatggtgcagtatcccatttaccccgagggctacctctcccatgaaaaggggcgcatagtgacgaacgctacattatataaagtcgccatcaagtgcggactagacaagtttatccgcgtcgaaaagtacaacgccaataaatggagaccaacatacataaaggattacgacatcactaccgaggctattccagagacacggaggatgtcgtcgaagacgcttgcagatgtggtggaagctctgatcggagctgcacaccaagatggtggcatgtcaaaagcgttgacatgcttacgatctttcataccgaaagtgccttggaaaagtttggaagaaggtcgccaagctctgttcgatcgaaagatgatgtcaacagacgtcccggtcgacttggaacacctcgagagactcattggttacacgttccagaacaagactctattgattgaagcgatcacacatgcttcatcgaatctcgtcggcgcaaaccaggagtgcatggaacgactagagttccttggtgacgcaatactggatatcatcattgtcgaactgatctgggactcggaacgcaaattctccaacaaggaaatgcatcttcttaaacaagccgtcgccaatgagtatatcctcggcttcttgatcatgcaatggtgcgacgaagaagtagtcaccgagatcgaccctgaagacaagtcgacacgtgtcaataactttgcccgacccatctggaagttcatgaaatcgaactcgatggcagtaacgactgctagcctcgcggccgaggagcgatatcgtgccgaccgagaacagatcaatgatctactaaagaatgacaaggagtatccctgggctgagcttatgcatctcgacctacctaaattcttctgtgacatgttcgagtcgcttgccggtgctgtctggatcgactcgggatctctggaggaggttgagggactcgcggagcgaattggtctactgccgcttcttagacgcctgatcgatgacgaggtcgagctcagacaccccaagaacaagctgctcgaactcacgagcaaagagaagaaggaaatgagctaccgaggcgacattagatacaagaatggagtcaaggactggtactgccaggtctttgtggatggagagatgatcgtcgacgtggaccagggtatgaaccagcgtgaaatcgaggctcgagctacggaacaggcttggaggatcctgaagaacaagccggtggtgaagaggaagagagaggagtccatgcaagttgatggcgatggcgaggaggatgagcaggacatacgtcgagcagtcgctaaagataatgttgaggcgatgcatagacagcaggcggagcaggatctagttgatcgagtgatcaaagacctggatatagagaactga

SEQ ID NO: 6978 - protein, 1466 aa, Muscodor strobelii
  misc_feature: SGI Peptide ID NO. 562081
  misc_feature (47)..(219): Pfam Id: PF00270 Pfam Desc: DEAD/DEAH box helicase
  misc_feature (432)..(518): Pfam Id: PF00271 Pfam Desc: Helicase conserved C-terminal domain
  misc_feature (43)..(213): Pfam Id: PF04851 Pfam Desc: Type III restriction enzyme, res subunit
  misc_feature (980)..(1088): Pfam Id: PF00636 Pfam Desc: RNase3 domain
  misc_feature (1166)..(1310): Pfam Id: PF00636 Pfam Desc: RNase3 domain
  misc_feature (467)..(518): Pfam Id: PF00271 Pfam Desc: Helicase conserved C-terminal domain
  misc_feature (44)..(1406): NCBI GI: 256729474 Blast Desc: NECHADRAFT_95770 [Nectria haematococca mpVI 77-13-4]
  misc_feature (36)..(1353): NCBI GI: 158705874 Blast Desc: NECHADRAFT_95770 [Nectria haematococca mpVI 77-13-4]
  misc_feature (24)..(1409): NCBI GI: 121807816 Blast Desc: DCL2_CRYPA RecName: Full=Dicer-like protein 2; Includes: RecName: Full=Endoribonuclease DCL-2; Includes: RecName: Full=ATP-dependent helicase DCL-2 dicer-like protein 2
  misc_feature (40)..(1408): NCBI GI: 156044530 Blast Desc: SS1G_10369 [Sclerotinia sclerotiorum 1980] gi|154694757|gb|EDN94495.1| SS1G_10369 [Sclerotinia sclerotiorum 1980]
  misc_feature (41)..(1428): NCBI GI: 171689324 Blast Desc: protein product [Podospora anserina] gi|170944624|emb|CAP70735.1| protein product [Podospora anserina]
  misc_feature (47)..(1414): NCBI GI: 154300125 Blast Desc: BC1G_10438 [Botryotinia fuckeliana B05.10] gi|150856727|gb|EDN31919.1| BC1G_10438 [Botryotinia fuckeliana B05.10]
  misc_feature (44)..(1423): NCBI GI: 46117132 Blast Desc: FG04408.1 [Gibberella zeae PH-1]
  misc_feature (36)..(1353): NCBI GI: 145612483 Blast Desc: MGG_12357 [Magnaporthe grisea 70-15] gi|145019642|gb|EDK03870.1| MGG_12357 [Magnaporthe grisea 70-15]
  misc_feature (42)..(1407): NCBI GI: 161783812 Blast Desc: DCL2_NEUCR RecName: Full=Dicer-like protein 2; Includes: RecName: Full=Endoribonuclease dcl-2; Includes: RecName: Full=ATP-dependent helicase dcl-2 related to RNA CAF
  misc_feature (47)..(1406): NCBI GI: 158706446 Blast Desc: DCL2_NEUCR RecName: Full=Dicer-like protein 2; Includes: RecName: Full=Endoribonuclease dcl-2; Includes: RecName: Full=ATP-dependent helicase dcl-2 related to RNA CAF
MASSPEPKPIYDSETLDIDDFDPISLDVAPDGSFTPPAQREATIHARAYQLEMLEASLKENIIVVMDTGSGKTQVAVLRIKAELEKPSNKMIWFLAPTVTLCEQQHKVLTSQIGAVQIKLLSGTDDVDTWSDQQIWDDYLWNVRVIVSTHQVLFDAVSHGFVKISGLSLIVFDEAHNCIGKHPGSKLMERYRISKSAGLPCPSILGLTASPIMKSHIDSIEIIERTLDAICKTPSIHRAELLAAVNLPRVSYIALPEVFMPVATDAMVSLSRALHNLDITMDPSILRLRKEATEKSLIKLARAFATEDTLIQNQMKSLVRTSTAILAQLGSWAADYYIYCSLQRARGFNNNDVPLAGKWTPEESQYLADILQQVKVDEPKEFDYVPDEMISPKFQILVQRLLETPEDGMCIVFVQERCTVAIMNYMLSAHPSIRSRFRVGRMIGTSNGSKRKYDLGGFDTTKDTLDLEDFRAGRLNLLLATSILEEGIDVPACNFVFCFDEPTNLKSFIQRRGRARMPESELVVMLNGTLDKHTALIDLEKEMKLRYEDEQRAISEMAVLEAKEENTTVAPLIVASTGARLDIDQAKPHLEHFCNNVTANKYVDHRPFYIKKIEESSEPGHPNIKATVVLPSTLPQSIRRVDGVGLWYSEKNAFKDAALQAIKAIYELGLLNSNLLPITGEPYKDVIEQRTKLETVNGVRSPWPRIARLWRESTEVVQRRVQLKDNDTVICEFDVSLPLTFPNIPEFPIYWGENTTWTVATSAEANVLPVTDLMKDQSPALLALAYGYRLQGIEDSQQVMHVQSSYVIDFANASLKRIKDNVGPIVRENLHSRSIVRFDGTVPHLFHEWLESMPDMELVQRKPHPQFKEPSLASSPWVAVKKWPRRFTFLTPQNDEDLSLTATKKTYYKIIPASHCMIETVERAKIFFGVTIPSFMHVIDLYLGAEELCNSILPKVAFVDRSLVVTAISSSATSGMVNYERLEFLGDTILKAFATIAVMVQYPIYPEGYLSHEKGRIVTNATLYKVAIKCGLDKFIRVEKYNANKWRPTYIKDYDITTEAIPETRRMSSKTLADVVEALIGAAHQDGGMSKALTCLRSFIPKVPWKSLEEGRQALFDRKMMSTDVPVDLEHLERLIGYTFQNKTLLIEAITHASSNLVGANQECMERLEFLGDAILDIIIVELIWDSERKFSNKEMHLLKQAVANEYILGFLIMQWCDEEVVTEIDPEDKSTRVNNFARPIWKFMKSNSMAVTTASLAAEERYRADREQINDLLKNDKEYPWAELMHLDLPKFFCDMFESLAGAVWIDSGSLEEVEGLAERIGLLPLLRRLIDDEVELRHPKNKLLELTSKEKKEMSYRGDIRYKNGVKDWYCQVFVDGEMIVDVDQGMNQREIEARATEQAWRILKNKPVVKRKREESMQVDGDGEEDEQDIRRAVAKDNVEAMHRQQAEQDLVDRVIKDLDIEN

SEQ ID NO: 6979 - DNA, 1264 bp, Muscodor strobelii
  misc_feature: SGI EST ID NO. CUFF.17372.0
  misc_feature: Variant of the nucleotide sequence at SEQ ID NO 6977
gagcattcgtcgagtggatggagtcggactctggtattccgagaaaaatgccttcaaggacgcggcacttcaagcaatcaaggctatttacgagctcggcttactcaactccaacctgctgccgatcactggtgaaccatataaggacgtaattgagcagaggacgaagctagaaaccgtcaacggtgtcaggagcccttggcctaggattgctcgcctgtggcgcgagtcaacggaggtggtacagagacgtgtacagctgaaggacaacgatacagtgatctgcgagttcgacgtgtcactgccactcacgttcccaaatatcccggagtttcccatctattggggtgagaacaccacgtggaccgttgctacaagcgctgaagccaatgtccttccggttacagacttgatgaaggaccaaagtcctgctttgcttgctctggcatatggttatcgcctccaaggtatcgaagattctcaacaggttatgcacgtacagtcttcgtatgttatcgactttgccaatgcatccctgaagcgtatcaaagacaacgtcggtccaattgtgagagaaaatctccattcacgctccattgtgcgatttgatgggactgtaccacatctcttccacgagtggctcgaatcgatgcccgacatggagctggttcagcgaaaaccgcatccccaattcaaggagccatcgttggcttcttccccttgggtagcagtaaagaaatggccgagacggttcactttcctcacgccccagaatgacgaggacttgtcgttgacggcgactaagaagacgtactacaagatcatccctgcgtcgcattgtatgatagaaacagtcgaaagagctaagatcttcttcggcgtgactatcccttcttttatgcacgtgatcgacctttatcttggagccgaggagctctgtaacagcattttgccaaaagtcgcctttgttgatcgttctctcgtggtaactgccattagttcgtctgctaccagtggtatggtcaactatgagaggttagagttcctcggagacactattctaaaggcatttgcaacgatagcagtgatggtgcagtatcccatttaccccgagggctacctctcccatgaaaaggggcgcatagtgacgaacgctacattatataaagtcgccatcaagtgcggactagacaagtttatccgcgtcgaaaagtacaacgccaataaatggagaccaacatacataaaggattacgacatcact

SEQ ID NO: 6980 - DNA, 915 bp, Muscodor strobelii
  misc_feature: SGI cDNA ID NO. 562082
  misc_feature: Elevated expression when VOC is produced
  misc_feature: Encodes the peptide sequence at SEQ ID NO 6981
atggaactactagcaacaggcttcaacgcctggaatcaattgactttcgtgacgcccaacgaagaaggaggagagccagatgacatctcatcatttcaaagagtgctatcagataaactcattgaagtcctacatatttcactttctagtactatcgtcagaacctcagccggcctaaaacatgccggatatgaggatgcgaccctcagacacccagggttagcggagaagctcttctcatcaactgctgccatcgctgggaatggatcccttgccatctacgacggaaaccaaacaataacccagcacgcctccatagcagcattcacgacatcccaagcacagcatacgttcaccgacctcaaagagatcaaacaactagtatcctacgagacagggttcgctgccttaacgggggacggacaagtgctcacctggggcgatgagcgctatgctgcttgtctcggacgagacatcacagcttcattaccagctgagaaaccaggtgtagtagaagacttgctcgagctcccctcaggaaagatcaccaaaatcgcagcatccggatatctactatgtgccacgacgtcagataatgacctctacgcctggggcggacatccaggtcgtgcaccaatactagatgcactgccagccagcccgagcccagttgtgatcgaagaacatgacattacagatgtagcggtaggcgagagccacgtcatcgccctcacaaccacaggtgaagtctacgtaatcgggtcaaaccataatggtcagttaggtctacctgacgtagacaaagctaccacatggacacaagtcccaatatcactcaaacaaggggagagaatcacacatgtaagagctggaccgcgtagttcattcatcataacagcacgcagttcatcataa

SEQ ID NO: 6981 - protein, 304 aa, Muscodor strobelii
  misc_feature: SGI Peptide ID NO. 562082
  misc_feature (1)..(302): NCBI GI: 256729282 Blast Desc: NECHADRAFT_101404 [Nectria haematococca mpVI 77-13-4]
  misc_feature (1)..(298): NCBI GI: 156044566 Blast Desc: SS1G_10387 [Sclerotinia sclerotiorum 1980] gi|154694775|gb|EDN94513.1| SS1G_10387 [Sclerotinia sclerotiorum 1980]
  misc_feature (1)..(263): NCBI GI: 46117134 Blast Desc: FG04409.1 [Gibberella zeae PH-1]
  misc_feature (100)..(299): NCBI GI: 145612481 Blast Desc: [Magnaporthe grisea 70-15] gi|145019641|gb|EDK03869.1| [Magnaporthe grisea 70-15]
  misc_feature (1)..(242): NCBI GI: 154290327 Blast Desc: BC1G_15794 [Botryotinia fuckeliana B05.10] gi|150847778|gb|EDN22971.1| BC1G_15794 [Botryotinia fuckeliana B05.10]
  misc_feature (117)..(298): NCBI GI: 85110595 Blast Desc: NCU06765 [Neurospora crassa OR74A] gi|18376025|emb|CAB91759.2| [Neurospora crassa] gi|28925220|gb|EAA34301.1| [Neurospora crassa OR74A]
  misc_feature (82)..(299): NCBI GI: 270001313 Blast Desc: hect domain and RLD 2-like protein [Tribolium castaneum]
  misc_feature (82)..(299): NCBI GI: 189241718 Blast Desc: : similar to hect domain and RLD 2 [Tribolium castaneum]
  misc_feature (135)..(298): NCBI GI: 213409582 Blast Desc: RCC1 domain-containing protein [Schizosaccharomyces japonicus yFS275] gi|212003608|gb|EEB09268.1| RCC1 domain-containing protein [Schizosaccharomyces japonicus yFS275]
  misc_feature (135)..(296): NCBI GI: 196007790 Blast Desc: TRIADDRAFT_57518 [Trichoplax adhaerens] gi|190584165|gb|EDV24235.1| TRIADDRAFT_57518 [Trichoplax adhaerens]
  misc_feature (123)..(299): SWISSPROT Homolog: EC 2.7.11.1 Non-specific serine/threonine protein kinase
  misc_feature: Useful for introducing or modulating the production of volatile compounds
MELLATGFNAWNQLTFVTPNEEGGEPDDISSFQRVLSDKLIEVLHISLSSTIVRTSAGLKHAGYEDATLRHPGLAEKLFSSTAAIAGNGSLAIYDGNQTITQHASIAAFTTSQAQHTFTDLKEIKQLVSYETGFAALTGDGQVLTWGDERYAACLGRDITASLPAEKPGVVEDLLELPSGKITKIAASGYLLCATTSDNDLYAWGGHPGRAPILDALPASPSPVVIEEHDITDVAVGESHVIALTTTGEVYVIGSNHNGQLGLPDVDKATTWTQVPISLKQGERITHVRAGPRSSFIITARSSS

SEQ ID NO: 6982 - DNA, 1668 bp, Muscodor strobelii
  misc_feature: SGI EST ID NO. CUFF.17490.0
  misc_feature: Variant of the nucleotide sequence at SEQ ID NO 6980
gcgaccctcagacacccagggttagcggagaagctcttctcatcaactgctgccatcgctgggaatggatcccttgccatctacgacggaaaccaaacaataacccagcacgcctccatagcagcattcacgacatcccaagcacagcatacgttcaccgacctcaaagagatcaaacaactagtatcctacgagacagggttcgctgccttaacgggggacggacaagtgctcacctggggcgatgagcgctatgctgcttgtctcggacgagacatcacagcttcattaccagctgagaaaccaggtgtagtagaagacttgctcgagctcccctcaggaaagatcaccaaaatcgcagcatccggatatctactatgtgccacgacgtcagataatgacctctacgcctggggcggacatccaggtcgtgcaccaatactagatgcactgccagccagcccgagcccagttgtgatcgaagaacatgacattacagatgtagcggtaggcgagagccacgtcatcgccctcacaaccacaggtgaagtctacgtaatcgggtcaaaccataatggtcagttaggtctacctgacgtagacaaagctaccacatggacacaagtcccaatatcactcaaacaaggggagagaatcacacatgtaagagctggaccgcgtagttcattcatcataacagcacgcagttcatcataacgttgcttcatcgtctagcttgattttgggaatcctatttcgcaagttttgacccctctaatcatgcctgcccattgctctatgatacacgccaggctgttcgccaaactcgaaaccgaaacgtctaagagagatcacaaattcgtcaggtaatcctcaatctcctgcggcgtcagcttccggaagcggggacccgttgcgccctcgacaccctcgatgccgaggaggtggtcggctggtggtccaacgatgcctggtcctcatcagtatatcgttatttgcatgaaatatcgaaagtggcttaccgatctcgatcgtctctccgttcatctcgccctcgatcgtctccttcagtgtaagcagtgcaatgtggacagcgtcctccagctccaggccctccgtatatcgcttctccaggaaagtcttggcagtcgtggcgctcttgccgatggctgtggccttccaggggaagtaggctcctgagggatcgacctggtacaacatggggccgcccttgtgaataccacccgtcttgccggagggcttctttgcctctccctctgtcgtctcgcccttctcgccctcaatagtagcctgctcatcgggcatgataccctcatcccagccggcaatcaagagggagacaccgtagggacggacgcctccggactgagtggcctcctgcatgactctggcgacatcctggactaatatccgggtcggggggtactcgttgtagacgcgcttgtagtttgtgtgggagaccttgcgggccttgtcgacgaggacgcggtagtctgggcccatgccggcgtataccatgccgaggttgggggtgatgaggctgatcttggagagggaggccgggtcggtgaggggcgaggacgacttcttctcggtggctaggacgattccattggtggctataaatagtcaatatatatgtctgag

SEQ ID NO: 6983 - DNA, 852 bp, Muscodor strobelii
  misc_feature: SGI cDNA ID NO. 562083
  misc_feature: Encodes the peptide sequence at SEQ ID NO 6984
atggccgaccgatattcattctccctcacgaccttctcccccagcgggaagctggtacaaattgagtatgctctgaacgcagtcaaccagggtgtcaccgccctaggtatcaaagccaccaatggaatcgtcctagccaccgagaagaagtcgtcctcgcccctcaccgacccggcctccctctccaagatcagcctcatcacccccaacctcggcatggtatacgccggcatgggcccagactaccgcgtcctcgtcgacaaggcccgcaaggtctcccacacaaactacaagcgcgtctacaacgagtaccccccgacccggatattagtccaggatgtcgccagagtcatgcaggaggccactcagtccggaggcgtccgtccctacggtgtctccctcttgattgccggctgggatgagggtatcatgcccgatgagcaggctactattgagggcgagaagggcgagacgacagagggagaggcaaagaagccctccggcaagacgggtggtattcacaagggcggccccatgttgtaccaggtcgatccctcaggagcctacttcccctggaaggccacagccatcggcaagagcgccacgactgccaagactttcctggagaagcgatatacggagggcctggagctggaggacgctgtccacattgcactgcttacactgaaggagacgatcgagggcgagatgaacggagagacgatcgagatcggcatcgttggaccaccagccgaccacctcctcggcatcgagggtgtcgagggcgcaacgggtccccgcttccggaagctgacgccgcaggagattgaggattacctgacgaatttgtga

SEQ ID NO: 6984 - protein, 283 aa, Muscodor strobelii
  misc_feature: SGI Peptide ID NO. 562083
  misc_feature (28)..(247): Pfam Id: PF00227 Pfam Desc: Proteasome A-type and B-type
  misc_feature (28)..(141): Pfam Id: PF00227 Pfam Desc: Proteasome A-type and B-type
  misc_feature (171)..(247): Pfam Id: PF00227 Pfam Desc: Proteasome A-type and B-type
  misc_feature (1)..(283): NCBI GI: 145612479 Blast Desc: conserved [Magnaporthe grisea 70-15] gi|145019640|gb|EDK03868.1| conserved [Magnaporthe grisea 70-15]
  misc_feature (1)..(283): NCBI GI: 171689320 Blast Desc: protein product [Podospora anserina] gi|170944622|emb|CAP70733.1| protein product [Podospora anserina]
  misc_feature (1)..(283): NCBI GI: 154290329 Blast Desc: 20S proteasome subunit Y7 [Botryotinia fuckeliana B05.10] gi|150847779|gb|EDN22972.1| 20S proteasome subunit Y7 [Botryotinia fuckeliana B05.10]
  misc_feature (1)..(283): NCBI GI: 121711615 Blast Desc: proteasome component Pre8, [Aspergillus clavatus NRRL 1] gi|119401574|gb|EAW11997.1| proteasome component Pre8, [Aspergillus clavatus NRRL 1]
  misc_feature (1)..(283): NCBI GI: 169766092 Blast Desc: [Aspergillus oryzae RIB40] gi|238482725|ref|XP_002372601.1| proteasome component Pre8, [Aspergillus flavus NRRL3357] gi|83765372|dbj|BAE55515.1| protein
  misc_feature (1)..(283): NCBI GI: 67541112 Blast Desc: PSA2_NEUCR proteasome subunit alpha type 2 [Aspergillus nidulans FGSC A4] gi|40739354|gb|EAA58544.1| PSA2_NEUCR proteasome subunit alpha type 2 [Aspergillus nidulans
  misc_feature (1)..(283): NCBI GI: 115399872 Blast Desc: proteasome component Y7 [Aspergillus terreus NIH2624] gi|114191191|gb|EAU32891.1| proteasome component Y7 [Aspergillus terreus NIH2624]
  misc_feature (1)..(283): NCBI GI: 189199430 Blast Desc: proteasome subunit alpha type-2 [Pyrenophora tritici-repentis Pt-1C-BFP] gi|187983151|gb|EDU48639.1| proteasome subunit alpha type-2 [Pyrenophora tritici-repentis
  misc_feature (1)..(283): NCBI GI: 159123308 Blast Desc: proteasome component Pre8, [Aspergillus fumigatus A1163]
  misc_feature (1)..(283): NCBI GI: 238841648 Blast Desc: proteasome component Y7 [Microsporum canis CBS 113480]
  misc_feature (1)..(283): SWISSPROT Homolog: EC 3.4.25.1 Proteasome endopeptidase complex
MADRYSFSLTTFSPSGKLVQIEYALNAVNQGVTALGIKATNGIVLATEKKSSSPLTDPASLSKISLITPNLGMVYAGMGPDYRVLVDKARKVSHTNYKRVYNEYPPTRILVQDVARVMQEATQSGGVRPYGVSLLIAGWDEGIMPDEQATIEGEKGETTEGEAKKPSGKTGGIHKGGPMLYQVDPSGAYFPWKATAIGKSATTAKTFLEKRYTEGLELEDAVHIALLTLKETIEGEMNGETIEIGIVGPPADHLLGIEGVEGATGPRFRKLTPQEIEDYLTNL

SEQ ID NO: 6985 - DNA, 1812 bp, Muscodor strobelii
  misc_feature: SGI EST ID NO. CUFF.17491.1
  misc_feature: Variant of the nucleotide sequence at SEQ ID NO 6983
ggatagcaagagctacctggaaggtacaatgtaccccaccgtagctcccactgacgcgcactggcgatgcctggagctcccaacgccgccgccgtagacacagcaacatctccatcgtcagacctcatcaccgggcttcacaaagccgcatacacttcaatttctgccgctccctccgacctttacccaacggccaaccttctgtcataactgcgaccaacacatagtaccacaagaatggccgaccgatattcattctccctcacgaccttctcccccaggtgagctcccatcccatcaaaggcggctcatccgtttgtgcctgcaagcttcgggatgttccaaatattcgcataagctaacttaattatagcgggaagctggtacaaattggtacgctcgtctctgtgatttctctccctcggaatacgagagcccctccatctacaaccaccccccgccatgcatatcagctaacaaatggatggcagagtatgctctgaacgcagtcaaccagggtgtcaccgccctaggtatcaaagccaccaatggaatcgtcctagccaccgagaagaagtcgtcctcgcccctcaccgacccggcctccctctccaagatcagcctcatcacccccaacctcggcatggtatacgccggcatgggcccagactaccgcgtcctcgtcgacaaggcccgcaaggtctcccacacaaactacaagcgcgtctacaacgagtaccccccgacccggatattagtccaggatgtcgccagagtcatgcaggaggccactcagtccggaggcgtccgtccctacggtgtctccctcttgattgccggctgggatgagggtatcatgcccgatgagcaggctactattgagggcgagaagggcgagacgacagagggagaggcaaagaagccctccggcaagacgggtggtattcacaagggcggccccatgttgtaccaggtcgatccctcaggagcctacttcccctggaaggccacagccatcggcaagagcgccacgactgccaagactttcctggagaagcgatatacggagggcctggagctggaggacgctgtccacattgcactgcttacactgaaggagacgatcgagggcgagatgaacggagagacgatcgagatcggcatcgttggaccaccagccgaccacctcctcggcatcgagggtgtcgagggcgcaacgggtccccgcttccggaagctgacgccgcaggagattgaggattacctgacgaatttgtgatctctcttagacgtttcggtttcgagtttggcgaacagcctggcgtgtatcatagagcaatgggcaggcatgattagaggggtcaaaacttgcgaaataggattcccaaaatcaagctagacgatgaagcaacgttatgatgaactgcgtgctgttatgatgaatgaactacgcggtccagctcttacatgtgtgattctctccccttgtttgagtgatattgggacttgtgtccatgtggtagctttgtctacgtcaggtagacctaactgaccattatggtttgacccgattacgtagacttcacctgtggttgtgagggcgatgacgtggctctcgcctaccgctacatctgtaatgtcatgttcttcgatcacaactgggctcgggctggctggcagtgcatctagtattggtgcacgacctggatgtccgccccaggcgtagaggtcattatctgacgtcgtggcacatagtagatatccggatgctgcgattttggtgatctttcctgaggggagctcgagcaagtc

SEQ ID NO: 6986 - DNA, 930 bp, Muscodor strobelii
  misc_feature: SGI cDNA ID NO. 562084
  misc_feature: Encodes the peptide sequence at SEQ ID NO 6987
atgcaggcggccacgtccggatggagctggggcgatggtatcccagactcgttccccgaaacaaatgccagtgaagacacagcttctacgcctcgcgatgagagcccgccagttgaagagccgcagccccctctcaattcttatggggaaccaaaagacagccggaggtgccggatatgtcttgaatgggtgcggcccacatatgaagaggccagcatgctcgatggaattcgacatcgtcgtcccaagagacattacatcaatgaggaaggcgatcgattgatcagtccatgtctatgcaaaggttctatcaagtacatgcatgagggatgcttgaagatatggatgaatgagaacccgtcaaagggctacaagtgcgatatctgcggatacacatacaaaatcgagcgattgtcatgggctcagcggctgcgaagtcccttcatctcccttctcatgacattggcgatcctcttcatcacgatctttttactaggtttcgtcgctgacccgatcctcggcctgtggcttgaccccgtgggcaccgtaacagacactcttggttccgggtcgaagttccgagagtatgaagacctttacgaggaggaggatggttggcttgaacatcttctcaagggcgtattctctcttggactactgggcttcgtcaaggcgtttctggccatgagcccttggcaatggtggaatttgcgcaccagcggcatcgttagtggcggggctcgtcgagcaggaacagggcgagagaggatggagaacatcaacttgacgttggttgtcattggagttctgacgtttctctgggctgtgtggaaaacaacgaggaagtatacggagcggactcttgatagagccagccagaagatcttgaacgttcaggagaatgacgacactgacgatgaggatgagtaa

SEQ ID NO: 6987 - protein, 309 aa, Muscodor strobelii
  misc_feature: SGI Peptide ID NO. 562084
  misc_feature (57)..(129): Pfam Id: PF00097 Pfam Desc: Zinc finger, C3HC4 type (RING finger)
  misc_feature (8)..(298): NCBI GI: 70986874 Blast Desc: RING finger domain protein [Aspergillus fumigatus Af293] gi|66846554|gb|EAL86886.1| RING finger domain protein [Aspergillus fumigatus Af293]
  misc_feature (2)..(309): NCBI GI: 242809976 Blast Desc: RING finger domain protein [Talaromyces stipitatus ATCC 10500] gi|218716111|gb|EED15533.1| RING finger domain protein [Talaromyces stipitatus ATCC 10500]
  misc_feature (8)..(298): NCBI GI: 119483010 Blast Desc: RING finger domain protein [Neosartorya fischeri NRRL 181] gi|119409688|gb|EAW19636.1| RING finger domain protein [Neosartorya fischeri NRRL 181]
  misc_feature (8)..(298): NCBI GI: 159123307 Blast Desc: RING finger domain protein [Aspergillus fumigatus A1163]
  misc_feature (8)..(307): NCBI GI: 121711613 Blast Desc: RING finger domain protein [Aspergillus clavatus NRRL 1] gi|119401573|gb|EAW11996.1| RING finger domain protein [Aspergillus clavatus NRRL 1]
  misc_feature (1)..(306): NCBI GI: 261356755 Blast Desc: RING finger domain-containing protein [Verticillium albo-atrum VaMs.102]
  misc_feature (55)..(309): NCBI GI: 156044562 Blast Desc: SS1G_10385 [Sclerotinia sclerotiorum 1980] gi|154694773|gb|EDN94511.1| SS1G_10385 [Sclerotinia sclerotiorum 1980]
  misc_feature (8)..(308): NCBI GI: 238841649 Blast Desc: RING finger domain-containing protein [Microsporum canis CBS 113480]
  misc_feature (8)..(308): NCBI GI: 261195596 Blast Desc: RING finger domain-containing protein [Ajellomyces dermatitidis SLH14081] gi|239588074|gb|EEQ70717.1| RING finger domain-containing protein [Ajellomyces dermatitidis SLH14081]
  misc_feature (20)..(308): NCBI GI: 240276005 Blast Desc: RING finger domain-containing protein [Ajellomyces capsulatus H143]
MQAATSGWSWGDGIPDSFPETNASEDTASTPRDESPPVEEPQPPLNSYGEPKDSRRCRICLEWVRPTYEEASMLDGIRHRRPKRHYINEEGDRLISPCLCKGSIKYMHEGCLKIWMNENPSKGYKCDICGYTYKIERLSWAQRLRSPFISLLMTLAILFITIFLLGFVADPILGLWLDPVGTVTDTLGSGSKFREYEDLYEEEDGWLEHLLKGVFSLGLLGFVKAFLAMSPWQWWNLRTSGIVSGGARRAGTGRERMENINLTLVVIGVLTFLWAVWKTTRKYTERTLDRASQKILNVQENDDTDDEDE

SEQ ID NO: 6988 - DNA, 2020 bp, Muscodor strobelii
  misc_feature: SGI EST ID NO. CUFF.17413.0
  misc_feature: Variant of the nucleotide sequence at SEQ ID NO 6986
ttgcacccaaccttcatccaccaagctgtttctcacgcataattctatttcgcgacttatcttcttacgacgtattttctgaaggcgttctcgcacaatgatcaatccatcatagaggcacctaattatctgatcatactgcccgagttgcttgcgaccaatggccgacccgcgtgacagtcgaccaacattcattccagagtgaggatgagatcatcgcagcaaacttgccattcgatgtaggaccctgcatatatcatagcctctcgcgtggagaattcggagttctaaaacattgttctcgattcttcgactcattgcaattgcttttcttagtccatcggcctttgagtgaccatctcagcctgcttgatccggccacacgtgtcctttgacctgtacaattggtttgtagcaccactaaatctaaatccgaacttggcattaggcatctcgattcacacacccatatcctcgagcctggacggatccgattacacacccgttaacgttcgagctcaatttcatttcctggatcagtatctcggcttgctagccttatatatcgcagccaaggatctttgtactcaccctgacctcctgtcatcgacagtccccgcaggacactgagctatgcaggcggccacgtccggatggagctggggcgatggtatcccagactcgttccccgaaacaaatgccagtgaagacacagcttctacgcctcgcgatgagagcccgccagttgaagagccgcagccccctctcaattcttatggggaaccaaaagacagccggaggtgccggatatgtcttgaatgggtgcggcccacatatgaagaggccagcatgctcgatggaattcgacatcgtcgtcccaagagacattacatcaatgaggaaggcgatcgattgatcagtccatgtctatgcaaaggttctatcaagtacatgcatgagggatgcttgaagatatggatgaatgagaacccgtcaaagggctacaagtgcgatatctgcggatacacatacaaaatcgagcgattgtcatgggctcagcggctgcgaagtcccttcatctcccttctcatgacattggcgatcctcttcatcacgatctttttactaggtttcgtcgctgacccgatcctcggcctgtggcttgaccccgtgggcaccgtaacagacactcttggttccgggtcgaagttccgagagtatgaagacctttacgaggaggaggatggttggcttgaacatcttctcaagggcgtattctctcttggactactgggcttcgtcaaggcgtttctggccatgagcccttggcaatggtggaatttgcgcaccagcggcatcgttagtggcggggctcgtcgagcaggaacagggcgagagaggatggagaacatcaacttgacgttggttgtcattggagttctgacgtttctctggaacgtttactaattataggtataggctgtgtggaaaacaacgaggaagtatacggagcggactcttgatagagccagccagaagatcttgaacgttcaggagaatgacgacactgacgatgaggatgagtaatgatgatgagaaatgagaatgtacgatttgacgtccggacgaaagacaaatacgatgttcttcctccccgatctttgacgcggagatcaatgagaatattatgctacgcgaagtgatgatatccatagagaccccgtctgcacactcttaagttgccctgaagctgctcctccatgcctcgtcaactagtctgtgtgcaaagatcgaaatccttgacgaagctttcgagtatagacgtcttgtctatgctcaatttggcaagtcgggagatcaaccatactaccgtctataactattgatctcttcggagattgatgagatggacaactagctagccttcgccatccgaaaggaaacgcgactttagtgtatgagggccggcactggtagtcgttgatacatacctaaatttaatatgaatgttcacgtgcgt

SEQ ID NO: 6989 - DNA, 1905 bp, Muscodor strobelii
  misc_feature: SGI cDNA ID NO. 562085
  misc_feature: Encodes the peptide sequence at SEQ ID NO 6990
atggcgagctccacagtgcgcgttctcacccgaggcacgtactttgtgcatccctatgaggtgggccaaatcgtggaagacgcggggactgctcagttctggacgcctgcggttctgctctctgtacttgacgaagagtatggactagaggatgccagacaggctttagttgagttcacaagctgggacgatgtcttctctgacgacttcagcacaactgcgatattgcaatacgaccctgacatggaaatcaacactgtgattgtccggttggtcgaaagtggccttttccagaacatacacgcgcacctatcactgtgtactgacacgtccctgcctccgggaccatacttcatccataataagtcgattcaccaggcttggaagttatatgaagacaatttcgacgcattcgtgattcctaccatcgcggacgatcctttcaatcctcaaagtttctcagtcctgcaggcagtgtcacctgatggttctttcaaatgtattgctgtgccgagtcggctgtactcaactaagaccaaagcgaagccattagctggagcccgaataaccatcaaggataatttcgatctgaagggaatacagactacaatgatgaataaagactataacggattctatccaccgcggacgacatctgcggactacgtacttaaacttattgaacttggcgcagtcatcgttggaaagaccaaaatgtctgcgttcgcatctggagaagagccagccgaccagtggattgattaccattgcccctttaatcccagaggtgatggttttcaatctccctctagcagttcagcaggcgccggtgcgtcgcttgcaggttattcatggcttgatcattcagtcggaattgatacatctggctgcatccgtaaccctgccgcgtccaacggtctttttggacttcggacctcatatgatatgatctcacgacgaggcatcgttccaagctgcaacgagtttgatacaatcgggtcacttcatacaagcctcgaagatgctagggaacttactatcggcactttgcacgtttctgactcgtacaagttcccgaaacgactactctaccctgtggactttttcccacaagcagacacagaacagcaagccatgaccgacgcattcattaccattgttgaggagcttctcggcgtcaagcgaactccaatcagtatttctcgcacttgggcctcaaaaccaccggaggaggcggctggaaagacgttgaaagagtatctgaaaatgagtgccatttggcctatgtattatgatacataccatacttttgatgatttttggcaccagtatggtgccaaaaacggaggaatgcctcgcgttggacgatatatgcatgagcggtgggctactgcgaggaagttcacgttggcgcagcgggcccaaggggtagcagagatgagagtgttcagaacctggtttgagaagaacatcattggtccagacaatcacacagtcactaatgctgtgatggtcttgccgttcggtgctgccgtcccaagataccgcgatgatgcaaaccaacttacagagactttcaaatcgtttactgtttgctacttaccagcgatgctccagacaccaacacttatcatacccatcggacaaaagtcattttactcgcaggtcacctactcgaaagagtatcttcccatcgtcagcagcctcatgggggctaaaggaagtgatgtgatgttgataaatctggcggaatccgctctgaagaaagctaaatggccaacggaggtccgcattggccgcagagcctttgaattgggagagaatgtgtgcaatgcggagcgcaattcaccctttgactatccacaggattccagtgacgatgatcatatgatgtctgatggctaa

SEQ ID NO: 6990 - protein, 634 aa, Muscodor strobelii
  misc_feature: SGI Peptide ID NO. 562085
  misc_feature (137)..(580): Pfam Id: PF01425 Pfam Desc: Amidase
  misc_feature (183)..(245): Pfam Id: PF01425 Pfam Desc: Amidase
  misc_feature (36)..(612): NCBI GI: 242761298 Blast Desc: amidase, [Talaromyces stipitatus ATCC 10500] gi|218723349|gb|EED22766.1| amidase, [Talaromyces stipitatus ATCC 10500]
  misc_feature (36)..(604): NCBI GI: 116202933 Blast Desc: CHGG_09351 [Chaetomium globosum CBS 148.51] gi|88177869|gb|EAQ85337.1| CHGG_09351 [Chaetomium globosum CBS 148.51]
  misc_feature (2)..(609): NCBI GI: 238492361 Blast Desc: glutamyl-tRNA(gln) amidotransferase subunit A, [Aspergillus flavus NRRL3357] gi|220695911|gb|EED52253.1| glutamyl-tRNA(gln) amidotransferase subunit A, [Aspergillus
  misc_feature (114)..(603): NCBI GI: 261189075 Blast Desc: amidase [Ajellomyces dermatitidis SLH14081] gi|239591954|gb|EEQ74535.1| amidase [Ajellomyces dermatitidis SLH14081]
  misc_feature (114)..(603): NCBI GI: 239609232 Blast Desc: amidase [Ajellomyces dermatitidis ER-3]
  misc_feature (115)..(625): NCBI GI: 261193419 Blast Desc: amidase [Ajellomyces dermatitidis SLH14081] gi|239588720|gb|EEQ71363.1| amidase [Ajellomyces dermatitidis SLH14081]
  misc_feature (115)..(625): NCBI GI: 239613958 Blast Desc: amidase [Ajellomyces dermatitidis ER-3]
  misc_feature (14)..(584): NCBI GI: 256720629 Blast Desc: NECHADRAFT_50177 [Nectria haematococca mpVI 77-13-4]
  misc_feature (53)..(603): NCBI GI: 242801359 Blast Desc: conserved [Talaromyces stipitatus ATCC 10500] gi|218717092|gb|EED16513.1| conserved [Talaromyces stipitatus ATCC 10500]
  misc_feature (36)..(584): NCBI GI: 255946445 Blast Desc: Pc20g15160 [Penicillium chrysogenum Wisconsin 54-1255] gi|211588725|emb|CAP86845.1| Pc20g15160 [Penicillium chrysogenum Wisconsin 54-1255]
MASSTVRVLTRGTYFVHPYEVGQIVEDAGTAQFWTPAVLLSVLDEEYGLEDARQALVEFTSWDDVFSDDFSTTAILQYDPDMEINTVIVRLVESGLFQNIHAHLSLCTDTSLPPGPYFIHNKSIHQAWKLYEDNFDAFVIPTIADDPFNPQSFSVLQAVSPDGSFKCIAVPSRLYSTKTKAKPLAGARITIKDNFDLKGIQTTMMNKDYNGFYPPRTTSADYVLKLIELGAVIVGKTKMSAFASGEEPADQWIDYHCPFNPRGDGFQSPSSSSAGAGASLAGYSWLDHSVGIDTSGCIRNPAASNGLFGLRTSYDMISRRGIVPSCNEFDTIGSLHTSLEDARELTIGTLHVSDSYKFPKRLLYPVDFFPQADTEQQAMTDAFITIVEELLGVKRTPISISRTWASKPPEEAAGKTLKEYLKMSAIWPMYYDTYHTFDDFWHQYGAKNGGMPRVGRYMHERWATARKFTLAQRAQGVAEMRVFRTWFEKNIIGPDNHTVTNAVMVLPFGAAVPRYRDDANQLTETFKSFTVCYLPAMLQTPTLIIPIGQKSFYSQVTYSKEYLPIVSSLMGAKGSDVMLINLAESALKKAKWPTEVRIGRRAFELGENVCNAERNSPFDYPQDSSDDDHMMSDG

SEQ ID NO: 6991 - DNA, 1102 bp, Muscodor strobelii
  misc_feature: SGI EST ID NO. CUFF.17402.0
  misc_feature: Variant of the nucleotide sequence at SEQ ID NO 6989
acgacatctgcggactacgtacttaaacttattgaacttggcgcagtcatcgttggaaagaccaaaatgtctgcgttcgcatctggagaagagccagccgaccagtggattgattaccattgcccctttaatcccagaggtgatggttttcaatctccctctagcagttcagcaggcgccggtgcgtcgcttgcaggttattcatggcttgatcattcagtcggaattgatagtaagtaacgttatacttccctttggagcacctgcttaactgcagaagcatctggctgcatccgtaaccctgccgcgtccaacggtctttttggacttcggacctcatatgatatgatctcacgacgaggcatcgttccaagctgcaagtaagtgcaacattgttcgtgcgcattcaagagcctgacgatatcgtacaatagcgagtttgatacaatcgggtcacttcatacaagcctcgaagatgctagggaacttactatcggcactttgcacgtttctgactcgtacaaggtgtgtaactcgatccggcccgtggtgttgtcagctctaatatttcaagttcccgaaacgactactctaccctgtggactttttcccacaagcagacacagaacagcaagccatgaccgacgcattcattaccattgttgaggagcttctcggcgtcaagcgaactccaatcagtatttctcgcacttgggcctcaaaaccaccggaggaggcggctggaaagacgttgaaagagtatctgaaaatgagtgccatttggcctatgtattatgatacataccatacttttgatgatttttggcaccagtatggtgccaaaaacggaggaatgcctcgcgttggacgatatatgcatgagcggtgggctactgcgaggaagttcacgttggcgcagcgggcccaaggggtagcagagatgagagtgttcagaacctggtttgagaagaacatcattggtccagacaatcacacagtcactaatgctgtgatggtcttgccgttcggtgctgccgtcccaagataccgcgatgatgcaaaccaacttacagagactttcaaatcgtttactgtttgctac

SEQ ID NO: 6992 - DNA, 942 bp, Muscodor strobelii
  misc_feature: SGI cDNA ID NO. 562086
  misc_feature: Encodes the peptide sequence at SEQ ID NO 6993
atgcattacgcctaccctccgcggaaggactcacatccgccgccctttcgaccgagacgatcgcgcatgcccatgatacggcgcagtcaggtcaagacgatagccctattcatagtgtttgtactcggcataatatttctattttctggaagctcgaaaccgaagtcggggtcccgcactataacgggtaaacctccagtcgtaatagtgacggtgtttgacgagaaatatgcaaacacggcgtactcgatacaaataaaagacaataggcagcaatacgccgagaaacatggatacaaattactcatagcccaagctcaagactacgagctcctaggcgcaccctcaacttgggccagggtcgtagcgatgcgacatgccatcacgaagttccccgactgcaagtacgtctggtatctcgaccagcacgccctcatcatgaacccgaacctcaaaatcgaagagcacgtcatgagcacgtcgaggctcaacgagttgatgaggcgggaccaccccgtcgtgccgcccatgagcatcatcaagacattcgagcatcagacaccaaatgacgtcgatgccgtcgtcacccaggataacgagggcataacaacgagcagtctgatcgtcaagaatggcgagtgggctaagttcttcctcgacacctggtttgaccccatgtatcggagttacaactttgctaaggcggagagacatgcgctcgaacatattgtccaatggcatcccaccatcctctccaatctagcaatcataccgcagcgggccatcaacgcgtactcgacggcgaaagcgggaggccagtacaaagaaggcgaccttgccgtcactttcgccgagtgctcgggcactggggacaacagttgtgccaaagtggcggagaagtactcgcagcagtggcggaagtcttttggcgcgaaagactga

SEQ ID NO: 6993 - protein, 313 aa, Muscodor strobelii
  misc_feature: SGI Peptide ID NO. 562086
  misc_feature (63)..(301): Pfam Id: PF05637 Pfam Desc: galactosyl transferase GMA12/MNN10 family
  misc_feature (1)..(310): NCBI GI: 171689316 Blast Desc: protein product [Podospora anserina] gi|170944620|emb|CAP70731.1| protein product [Podospora anserina]
  misc_feature (1)..(311): NCBI GI: 116205043 Blast Desc: CHGG_10405 [Chaetomium globosum CBS 148.51] gi|88176533|gb|EAQ84001.1| CHGG_10405 [Chaetomium globosum CBS 148.51]
  misc_feature (1)..(309): NCBI GI: 85110589 Blast Desc: NCU06762 [Neurospora crassa OR74A] gi|18376028|emb|CAB91762.2| related to alpha-1, 2-galactosyltransferase [Neurospora crassa] conserved [Neurospora
  misc_feature (1)..(312): NCBI GI: 156044558 Blast Desc: SS1G_10383 [Sclerotinia sclerotiorum 1980] gi|154694771|gb|EDN94509.1| SS1G_10383 [Sclerotinia sclerotiorum 1980]
  misc_feature (1)..(310): NCBI GI: 46117140 Blast Desc: FG04412.1 [Gibberella zeae PH-1]
  misc_feature (1)..(310): NCBI GI: 256729284 Blast Desc: NECHADRAFT_47684 [Nectria haematococca mpVI 77-13-4]
  misc_feature (1)..(307): NCBI GI: 261356754 Blast Desc: mannosyltransferase complex component [Verticillium albo-atrum VaMs.102]
  misc_feature (1)..(308): NCBI GI: 59802932 Blast Desc: alpha-1,2-galactosyltransferase-like protein [Magnaporthe grisea]
  misc_feature (1)..(308): NCBI GI: 39971695 Blast Desc: conserved [Magnaporthe grisea 70-15] gi|145019638|gb|EDK03866.1| conserved [Magnaporthe grisea 70-15]
  misc_feature (1)..(311): NCBI GI: 242769714 Blast Desc: alpha-1,6-mannosyltransferase subunit, [Talaromyces stipitatus ATCC 10500] gi|218725023|gb|EED24440.1| alpha-1,6-mannosyltransferase subunit, [Talaromyces stipitatus
MHYAYPPRKDSHPPPFRPRRSRMPMIRRSQVKTIALFIVFVLGIIFLFSGSSKPKSGSRTITGKPPVVIVTVFDEKYANTAYSIQIKDNRQQYAEKHGYKLLIAQAQDYELLGAPSTWARVVAMRHAITKFPDCKYVWYLDQHALIMNPNLKIEEHVMSTSRLNELMRRDHPVVPPMSIIKTFEHQTPNDVDAVVTQDNEGITTSSLIVKNGEWAKFFLDTWFDPMYRSYNFAKAERHALEHIVQWHPTILSNLAIIPQRAINAYSTAKAGGQYKEGDLAVTFAECSGTGDNSCAKVAEKYSQQWRKSFGAKD

SEQ ID NO: 6994 - DNA, 2015 bp, Muscodor strobelii
  misc_feature: SGI EST ID NO. CUFF.17429.2
  misc_feature: Variant of the nucleotide sequence at SEQ ID NO 6992
caaacttgcattccctcacttcagacgaaccaaggacgcggtggatgtaattgatgtaatccttaatgtgtgatgccggctcgacgaatatcaccgaactggtcctactattatatctcgtcaaatatcgattgttgttggaagagaaggtcgccgtcgtcttcgtctccctaatcgcattggcagatctcctttcaactctcacgatatccctattcacgcccttgccagcttcctacatgactctccccgaccgcgaaacccccaaatacctccgatacctacgatccttactgtagcccgacattcattaagacaccaagcagcaccagcaagacacgtgtacgacgcgaacaggttatccttgtttatagccagcttcgagctgagcgcccgcaatcttcgatagtcgcgacgaaacccgggtcgaagcccccatacgccatcgcgccctagagatagcataatatttttattttcgtcggaaagatcagtttacagacaccatgcattacgcctaccctccgcggaaggactcacatccgccgccctttcgaccgagacgatcgcgcatgcccatgatacggcgcagtcaggtcaagacgatagccctattcatagtgtttgtactcggcataatatttctattttctggaagctcgaaaccgaagtcggggtcccgcactataacgggtaaacctccagtcgtaatagtgacggtgtttgacgagaaatatgcaaacacggcgtactcgatacaaataaaagacaataggcagcaatacgccgagaaacatggatacaaattactcatagcccaagctcaagactacgagctcctaggcgcaccctcaacttgggccagggtcgtagcgatgcgacatgccatcacgaagttccccgactgcaagtacgtctggtatctcgaccagcacgccctcatcatgaacccgaacctcaaaatcgaagagcacgtcatgagcacgtcgaggctcaacgagttgatgaggcgggaccaccccgtcgtgccgcccatgagcatcatcaagacattcgagcatcagacaccaaatgacgtcgatgccgtcgtcacccaggataacgagggcataacaacgagcagtctgatcgtcaagaatggcgagtgggctaagttcttcctcgacacctggtttgaccccatgtatcggagttacaactttgctaaggcggagagacatgcgctcgaacatattgtccaatggcatcccaccatcctctccaatctagcaatcataccgcagcgggccatcaacgcgtactcgacggcgaaagcgggaggccagtacaaagaaggcgaccttgccgtcactttcgccgagtgctcgggcactggggacaacagttgtgccaaagtggcggagaagtactcgcagcagtggcggaagtcttttggcgcgaaagactgaaatgcaagtaaggaaacaggaaataattggggagaggtcgacttaacataaagacataagaaacaagacggagcgaaactgaaggcatttggcgtttctaggaccttgggtgtcccggggctcatggagggccagatagacaggaaaacactggcatttgacaggtgcatggagtatcttgcgatgcaatacacactaccgccgcttcttacaacaggcttgttgagatgatggccatcaaatgcggctagctaattaaggtagcctttacatatatcactctctgttagaggggatcatgtgattgaatgagttgaagatgttctttcatgaagggaaaagaagggagaaatagaataacgattgcctacatctatcgtgtattagatgactacacatctaacgttgatagagctggtgctcaactaatccacgcatcccccctctggtttgcctacctaccttatgtaggtctggcaaggaaaggactctcgcatagactagcgaataaagacgctcatacgtcatggtggtttttttccggaatacgagttcatgagtgacaag

SEQ ID NO: 6995 - DNA, 1707 bp, Muscodor strobelii
  misc_feature: SGI cDNA ID NO. 562087
  misc_feature: Reduced expression when VOC is produced
  misc_feature: Encodes the peptide sequence at SEQ ID NO 6996
atgccgggcacttcacgcatgcccgtgagcctgcgcgagagcttgaatagtgtcaagcgctcgaggcctgtgaacacgctgcagtcgcttcaatttctcaatctcgacttattccgcaacatagtcttcttcctcttctgcctgcggatcgtccggcgcacattttggaagctcaaagggcgcggattaatcggcaccatcgtcgagctctacaccgatctgcggcgcatactctatggctacttccttcgcgcgccgggcgtccggacgcaggtccgtaagcaagttcaagattcccttgcgaagatccaagagaagatgatcaagcccgatcgcatccgatacctggctctgccgaaagaaggatggacggacgaggcactgcgcaccgaactaacggctcttgctactatggatcatacaagatgggaggatggatttgtgagcggtgctgtgtatcatggcgaagacgagctgctgcagttgcagactgaggcttatggaaagttcactgttgcgaaccccatccatcctgatgtcttccctggtgtgcggaagatggaggccgaggtcgtggctatggtgctgagcatgttccatgctcctcctaacgcggctggagtttcgacgagtggtggaacggagagtatcttgatggcgtgttacagtgcgcgccagaaggcgtatgctgagaggggtgttactgagcctgagatgatcctcccagagacaggccacacagcattccgcaaagcaggcgaatatttcaagatcaaagtccatctggtaccctgcccagcgccatctcaccaagtagacgtccaccgcgtatcccgcctaatcaacagcaacaccgtccttctcgtcggctcagcgcccaacttcccacacggaataatggacgatatctccgcgctctccaaacttgccctcaagcgcaaactacctctccacgtagactgctgtctaggttctttccttgttcccttcctagataaagcaggattcgaaaccgagcccttcgatttcagacttaagggcgtgacgagtatctcttgcgatacacataaatacggattcgcacccaagggaaactccaccgttctctaccgaacccaggaactacggacctaccaatattttgtcagcccagattggtcaggtggtgtatacggctctcccggaatcgctggctcaagacctggcgctctgatagcaggctgctggacgagcatgatgcgcgtcggtgaagcgggatacttagattcttgcgtgaagattgtgggctgcaccaagaagatcgccgaacatatcacgacctcccctgccctcgccgcggaactggacatcattgggcgacctctcgtctccgttgtggctttcacggctcgaaacctgaatatttacgatattgccgatgcgatgagcgcgaaagggtggcatttgaacgcccttcagaatccgcccgcgatgcatgtggcggttactatgccgattgtcaaggtttgggagaaactcgttgcggacttggaggcagttgttgagggtgagagggagaaggagagggttcgcgctgtggagggcaaagctaggggaaaggctacgggtgatacggcagcgctttatggtgtggcgggaagtctgccgaataagagtgttgttgttgatcttgcgactgggtttttggacttgatgtacaaggcatag

SEQ ID NO: 6996 - protein, 568 aa, Muscodor strobelii
  misc_feature: SGI Peptide ID NO. 562087
  misc_feature (139)..(464): Pfam Id: PF00282 Pfam Desc: Pyridoxal-dependent decarboxylase conserved domain
  misc_feature (1)..(568): NCBI GI: 261356753 Blast Desc: sphingosine-1-phosphate lyase [Verticillium albo-atrum VaMs.102]
  misc_feature (1)..(568): NCBI GI: 171689314 Blast Desc: protein product [Podospora anserina] gi|170944619|emb|CAP70730.1| protein product [Podospora anserina]
  misc_feature (1)..(568): NCBI GI: 116205041 Blast Desc: conserved [Chaetomium globosum CBS 148.51] gi|88176532|gb|EAQ84000.1| conserved [Chaetomium globosum CBS 148.51]
  misc_feature (1)..(568): NCBI GI: 85110587 Blast Desc: sphingosine-1-phosphate lyase [Neurospora crassa OR74A] gi|18376029|emb|CAB91763.2| sphingosine-1-phosphate lyase [Neurospora crassa] gi|28925216|gb|EAA34297.1| lyase [Neurospora
  misc_feature (1)..(567): NCBI GI: 39971693 Blast Desc: MGG_07162 [Magnaporthe grisea 70-15] gi|145019637|gb|EDK03865.1| MGG_07162 [Magnaporthe grisea 70-15]
  misc_feature (1)..(568): NCBI GI: 256729285 Blast Desc: [Nectria haematococca mpVI 77-13-4]
  misc_feature (5)..(568): NCBI GI: 46117142 Blast Desc: FG04413.1 [Gibberella zeae PH-1]
  misc_feature (1)..(568): NCBI GI: 156044556 Blast Desc: SS1G_10382 [Sclerotinia sclerotiorum 1980] gi|154694770|gb|EDN94508.1| SS1G_10382 [Sclerotinia sclerotiorum 1980]
  misc_feature (1)..(568): NCBI GI: 169609116 Blast Desc: SNOG_07644 [Phaeosphaeria nodorum SN15] gi|160701786|gb|EAT85110.2| SNOG_07644 [Phaeosphaeria nodorum SN15]
  misc_feature (1)..(568): NCBI GI: 189200016 Blast Desc: sphingosine-1-phosphate lyase 1 [Pyrenophora tritici-repentis Pt-1C-BFP] gi|187983444|gb|EDU48932.1| sphingosine-1-phosphate lyase 1 [Pyrenophora tritici-repentis
  misc_feature (36)..(567): SWISSPROT Homolog: EC 4.1.2.27 Sphinganine-1-phosphate aldolase
  misc_feature: Useful for introducing or modulating the production of volatile compounds
MPGTSRMPVSLRESLNSVKRSRPVNTLQSLQFLNLDLFRNIVFFLFCLRIVRRTFWKLKGRGLIGTIVELYTDLRRILYGYFLRAPGVRTQVRKQVQDSLAKIQEKMIKPDRIRYLALPKEGWTDEALRTELTALATMDHTRWEDGFVSGAVYHGEDELLQLQTEAYGKFTVANPIHPDVFPGVRKMEAEVVAMVLSMFHAPPNAAGVSTSGGTESILMACYSARQKAYAERGVTEPEMILPETGHTAFRKAGEYFKIKVHLVPCPAPSHQVDVHRVSRLINSNTVLLVGSAPNFPHGIMDDISALSKLALKRKLPLHVDCCLGSFLVPFLDKAGFETEPFDFRLKGVTSISCDTHKYGFAPKGNSTVLYRTQELRTYQYFVSPDWSGGVYGSPGIAGSRPGALIAGCWTSMMRVGEAGYLDSCVKIVGCTKKIAEHITTSPALAAELDIIGRPLVSVVAFTARNLNIYDIADAMSAKGWHLNALQNPPAMHVAVTMPIVKVWEKLVADLEAVVEGEREKERVRAVEGKARGKATGDTAALYGVAGSLPNKSVVVDLATGFLDLMYKA

SEQ ID NO: 6997 - DNA, 2324 bp, Muscodor strobelii
  misc_feature: SGI EST ID NO. CUFF.17423.0
  misc_feature: Variant of the nucleotide sequence at SEQ ID NO 6995
gtgatggggtgatgtcgcactggagctttccaatgcagcttgcggggagccgacgggcgccgttatccatagtagagctccagcattcctcctgcgacctacctatcttttttcgcctccaacttggtgttaacgtcttctcattccgaaagaggtggagggatataaagcagcagcttcggaccctggaactggtctgatgtctttcaattctgctctttgacctgctgagacatttctcgagggacctcggacgggaaattattatatccttttactcgttgcgatacgcctcggctcgccatcatgccgggcacttcacgcatgcccgtgagcctgcgcgagagcttgaatagtgtcaagcgctcgaggcctgtgaacacgctgcagtcgcttcaatttctcaatctcgacttattccgcaacatagtcttcttcctcttctgcctgcggatcgtccggcgcacattttggaagctcaaagggcgcggattaatcggcaccatcgtcgagctctacaccgatctgcggcgcatactctatggctacttccttcgcgcgccgggcgtccggacgcaggtccgtaagcaagttcaagattcccttgcgaagatccaagagaagatgatcaagcccgatcgcatccgatacctggctctgccgaaagaaggatggacggacgaggcactgcgcaccgaactaacggctcttgctactatggatcatacaagatgggaggatggatttgtgagcggtgctgtgtatcatggcgaagacgagctgctgcagttgcagactgaggcttatggaaagttcactgttgcgaaccccatccatcctgatgtcttccctggtgtgcggaagatggaggccgaggtcgtggctatggtgctgagcatgttccatgctcctcctaacgcggctggagtttcgacgagtggtggaacggagagtatcttgatggcgtgttacagtgcgcgccagaaggcgtatgctgagaggggtgttactgagcctgagatgatcctcccagagacaggccacacagcattccgcaaagcaggcgaatatttcaagatcaaagtccatctggtaccctgcccagcgccatctcaccaagtagacgtccaccgcgtatcccgcctaatcaacagcaacaccgtccttctcgtcggctcagcgcccaacttcccacacggaataatggacgatatctccgcgctctccaaacttgccctcaagcgcaaactacctctccacgtagactgctgtctaggttctttccttgttcccttcctagataaagcaggattcgaaaccgagcccttcgatttcagacttaagggcgtgacgagtatctcttgcgatacacataaatacggattcgcacccaagggaaactccaccgttctctaccgaacccaggaactacggacctaccaatattttgtcagcccagattggtcaggtggtgtatacggctctcccggaatcgctggctcaagacctggcgctctgatagcaggctgctggacgagcatgatgcgcgtcggtgaagcgggatacttagattcttgcgtgaagattgtgggctgcaccaagaagatcgccgaacatatcacgacctcccctgccctcgccgcggaactggacatcattgggcgacctctcgtctccgttgtggctttcacggctcgaaacctgaatatttacgatattgccgatgcgatgagcgcgaaagggtggcatttgaacgcccttcagaatccgcccgcgatgcatgtggcggttactatgccgattgtcaaggtttgggagaaactcgttgcggacttggaggcagttgttgagggtgagagggagaaggagagggttcgcgctgtggagggcaaagctaggggaaaggctacgggtgatacggcagcgctttatggtgtggcgggaagtctgccgaataagagtgttgttgttgatcttgcgactgggtttttggacttgatgtacaaggcatagatgatagcatgcgacgctggtggggacaataagagatggctggaaaggggggaaaccagggaaaagattggggagagtgtatgatggctgggaaaattgcattggagtggggtgaggctattatgcctgtgtatatgttgcattttcagcaagcgtggaatatattggtcttgcattgttattgctacactcacatatcgcgatgcctcgtatacatgtggattttttgtggtgattatttcttgtggtatttgtcatttcgtgacacggaagcgagtcgcttcgtcgccccctttagatcttattaatga

SEQ ID NO: 6998 - DNA, 867 bp, Muscodor strobelii
  misc_feature: SGI cDNA ID NO. 562088
  misc_feature: Encodes the peptide sequence at SEQ ID NO 6999
atgtcagaacttgaacccaccccaactaacacaccaaaggatcccaacctactcatcaagaagcctatcgccatgttgggattcaagagcaactcggatttccagggccatgcctacatcgtcctccaggtcctgcgcttttgcaatgtcgctgttcttctcggcgtcgaggccgccaccgtgctgatgctcatatacgccaagctccctaatggttatcagttcttcgccgacgccgtgcacgctctcgtcttcgtctttgccgggctgctcatcttcactgagatcggtttctgggagaaaggtctcaggttcatcgagtctgcctatcccatgctaggatcggaccggggattcacgggactcggtgccattatggcactcatcggctgccatcttctcggcggactcgcgaacagcacctataccagcgactcggtaccctcgcaggtcccgcaagtcgttctcggcgtcggtatcgttactctcgcattcggcattttcaacatcatcgcttcgttacttttccgcaacaaggaaggcaacatgagagctcgccaggtcagggcggaaggagctagcaaaaccagcgccgctgacaactggtcacgtaacaactccctcaaaagatcaaagatcagcggtcctgtggctcatgacgtcgaggcccaacacaacgattactacgggaacagggacgatgacaagaccaccgtatacagcggggacgccaggcagagccctgttgtaccaggattagagcgtcctcctactgctttccatccgatgtatcgaccaaacacgacgtacactgccaggggtccttacgacaatgaggacgacaagccttacgagaacgctttgtaa

SEQ ID NO: 6999 - protein, 288 aa, Muscodor strobelii
  misc_feature: SGI Peptide ID NO. 562088
  misc_feature (25)..(271): NCBI GI: 261358588 Blast Desc: conserved [Verticillium albo-atrum VaMs.102]
  misc_feature (34)..(263): NCBI GI: 256729462 Blast Desc: NECHADRAFT_84056 [Nectria haematococca mpVI 77-13-4]
  misc_feature (25)..(272): NCBI GI: 171689078 Blast Desc: protein product [Podospora anserina] gi|170944501|emb|CAP70612.1| protein product [Podospora anserina]
  misc_feature (36)..(211): NCBI GI: 242766054 Blast Desc: conserved [Talaromyces stipitatus ATCC 10500] gi|218724293|gb|EED23710.1| conserved [Talaromyces stipitatus ATCC 10500]
  misc_feature (36)..(266): NCBI GI: 156043659 Blast Desc: SS1G_10833 [Sclerotinia sclerotiorum 1980] gi|154695220|gb|EDN94958.1| SS1G_10833 [Sclerotinia sclerotiorum 1980]
  misc_feature (25)..(268): NCBI GI: 116204935 Blast Desc: CHGG_10351 [Chaetomium globosum CBS 148.51] gi|88176479|gb|EAQ83947.1| CHGG_10351 [Chaetomium globosum CBS 148.51]
  misc_feature (36)..(209): NCBI GI: 212528560 Blast Desc: conserved [Penicillium marneffei ATCC 18224] gi|210073835|gb|EEA27922.1| conserved [Penicillium marneffei ATCC 18224]
  misc_feature (36)..(262): NCBI GI: 154316847 Blast Desc: BC1G_03841 [Botryotinia fuckeliana B05.10] gi|150845453|gb|EDN20646.1| BC1G_03841 [Botryotinia fuckeliana B05.10]
  misc_feature (35)..(266): NCBI GI: 46117092 Blast Desc: FG04388.1 [Gibberella zeae PH-1]
  misc_feature (36)..(265): NCBI GI: 225560427 Blast Desc: conserved [Ajellomyces capsulatus G186AR]
MSELEPTPTNTPKDPNLLIKKPIAMLGFKSNSDFQGHAYIVLQVLRFCNVAVLLGVEAATVLMLIYAKLPNGYQFFADAVHALVFVFAGLLIFTEIGFWEKGLRFIESAYPMLGSDRGFTGLGAIMALIGCHLLGGLANSTYTSDSVPSQVPQVVLGVGIVTLAFGIFNIIASLLFRNKEGNMRARQVRAEGASKTSAADNWSRNNSLKRSKISGPVAHDVEAQHNDYYGNRDDDKTTVYSGDARQSPVVPGLERPPTAFHPMYRPNTTYTARGPYDNEDDKPYENAL

SEQ ID NO: 7000 - DNA, 3547 bp, Muscodor strobelii
  misc_feature: SGI EST ID NO. CUFF.17426.0
  misc_feature: Variant of the nucleotide sequence at SEQ ID NO 6998
cgacgatcttcgtgattcacgcatcggcccgctcccactttgacatagtagctatttcatttggatggtgtgcgagccattccctaacttcagcgccgaatttctgcccctccgtcacgcgcttctggacacattcgatgagatcaattccgtccgaacaaggtaccgggatcaccatgaattgcattgaatctatggtcccggcatgatctacttagtttccataatgttccgggtttcagagctacaaacacgcgatctaaatgggtgtgaggctcaagactgatgtggatctactcggcgcttgttttgtagatcttgttgtggacgagacccaaggacgttgaacgtttcaggtagcaggcgctggattttgctacacactatagcaatctgtccatacagtcctaaaggataataattatcaatgtagatactgtggcttctgagtatctgaactgtagccttcgcccaataattgcttcgtataaataaatattgagttgttaaccctagggctaatcaatcaagccttagaacggtggcaaaacgaagtctttatgaacgacatgccatagttaaaccctttgcaagtacgggcggcaacatctaagtctatcccagcgattatccacattgataattatcatccttcaggactgtacatataggcaataggagttctttgccgtccattcggtaatggtctctttctgaaagattcgagatgcaaatcctaccgggatgacgcctgtattgaaagaaacgaagagtagcatactatgtacctaggtagctaatcacatcaatttctgatcatgagttacctgtacaactgcccatttgccttctttcgaagacgatctcgcaacaagcaaaccgtcgtcttccaaatgttccagatcttgtccagtctaaggcctctttaagtcgatgaaaagggattcgacggtggggcatagacggacgttggctaaaatgtggactgaaacagtgttggaagcctctcagccaatcgatcagccgtcaggaaccatcttctcacaatgcattgtaccccacggtctgagaaagggccttgagctagtccaccattgggcgcaacgacaatgcccttgatcatggtgtgaagagtgaagactgtgaaaactgtagatgtcaggtacctgagtcatttttgaagcatgggtgccttgcagtctggtggcaccgtagcagcgccgtcatattattgcggtacgtggattgccccgactggcgattcgcgacaagacggaaagacaactcactccacagcgaaccaccccacgcccatcatgaacttgaccagttcgacgggcccatgtggtcttcactcgtcaatggcactcctcggccgacaggttctgacagggtctatttgggtgctgatgaaggaatgagacctttcgcgcccgaccagatcgattggtcattgatgaatttgcgctgtgggaaatactgtactcctatgcgaaacattcaataacatggccatgggttcatgttgaatatctgggtctccctgcttcactgctcttacatattaaattcatccggccgcctgtaacagctcctctgaaagggatgtcctatctctcatttgtttccacttcttctcccttcaggtaacgtagagttctagagctgccggcccgccttgacaccctttcatcccaccctcgccaaccgacgaccaactcacgacacacacgtacatacactttctttgtcctcgacgggcaacaataacaacttgatcaccttgtaacccaccatctttgacatatttcgccttcattatcctgaccatccttgacacctttgacattacatcttgattgttctcacattctttgacgactccattatctacgtattcataaatatcagacccacgtcaaagtcgacactgcctacacgctctctcgatcgaccctttactcccactttaccatttccaattttgcaccttcgtttcgtgccttacgactttgcatctgctagccagatcttttcgacacaaataccaaatacattggatctacttcttaacctcctattctactcagctatcaagctattttaaacgttggtctaccacatcacaactgagaccatgtcagaacttgaacccaccccaactaacacaccaaaggatcccaacctactcatcaagaagcctatcgccatgttgggattcaagagcaactcggatttccagggccatgcctacatcgtcctccaggtcctgcgcttttgcaatgtcgctgttcttctcggcgtcgaggccgccaccgtgctgatgctcatatacgccaagctccctaatggttatcagttcttcgccgacgccgtgcacgctctcgtcttcgtctttgccgggctgctcatcttcactgagatcggtttctgggagaaaggtctcaggttcatcgagtctgcctatcccatgctaggatcggaccggggattcacgggactcggtgccattatggcactcatcggctgccatcttctcggcggactcgcgaacagcacctataccagcgactcggtaccctcgcaggtcccgcaagtcgttctcggcgtcggtatcgttactctcgcattcggcattttcaacatcatcgcttcgttacttttccgcaacaaggaaggcaacatgagagctcgccaggtcagggcggaaggagctagcaaaaccagcgccgctgacaactggtcacgtaacaactccctcaaaagatcaaagatcagcggtcctgtggctcatgacgtcgaggcccaacacaacgattactacgggaacagggacgatgacaagaccaccgtatacagcggggacgccaggcagagccctgttgtaccaggattagagcgtcctcctactgctttccatccgatgtatcgaccaaacacgacgtacactgccaggggtccttacgacaatgaggacgacaagccttacgagaacgctttgtaaagacagtcgaccacatcagtatcgaaccacatctaatcggctgcgtgttccttcggccaggcgtttgtcgagcgtagggagaaacagcattgcatttccggaggcgttactgggcttggagttttacggatttcctttaatacccgttggatttcgtagggcggtactatgacggcatttagtagcctttttgggtttgacttgattgctttcacaaatattagagacgatctagtctcggacatatcttcgcttctgctaggacaatataatattcagtggcatctttcggtgtttgaatgcggtgtgagatgctgattccttgccacagggtctgacctgcaacttgtatgcatatgtgctacctcatttccccttgtgctggtatcgggccttgctttcaatgaacattgtgaaacgtatctctagtgatacgatgcagcgtttccgctaagaagctgatgagatttacgtgtaaaataatgtgtacgtggacatgtaaggacattatatgagacaggtgcttgagtaggtcacccattc

SEQ ID NO: 7001 - DNA, 735 bp, Muscodor strobelii
  misc_feature: SGI cDNA ID NO. 562089
  misc_feature: Reduced expression when VOC is produced
  misc_feature: Encodes the peptide sequence at SEQ ID NO 7002
atgatccgacaagccttgatcaactcttccagagctctatccgccagctcgaggaccatcaccgctcgttcagccaccagatcacatctctcctcagcaccattaagtcctctccgctccacactagctccaagaaggagatggtacagtgatgaagccgcaaagaaggaggcagagactgccgcagagacgcctaaggagggggaagatgctgctgtctcagagctcgagacaataaagcagaagttggcgaccaaggagagagaggctatcgactggaaggacaaatacatgcgcgccctggctgagttccgtaacgacttcgagcagctacaaaaacgcacagagcgcgagaagcaaaacgccaaggacttcgcgatccagcccttcgccaaggatctcgtcgacagcgtagacaacctcgaccgcgccctcgccatgggtgccgagagcttgaagcccgccgaaggggcagaggttaacaccgatctgcagaacttctacgaaggcgtcaagatgactgagaccaacatgatgagcaccctcaagaagcacggccttgagcgcttcgaccccgagggcgagaagttcaaccccaacgagcacgaggccaccttcatgacggcggtacccgacaaggaacacaacaccgttttcttcgtccagcagaagggtttcaagctcaacggacggatagtgcgcgctgctaaggttggcgtggttaataatccctga

SEQ ID NO: 7002 - protein, 244 aa, Muscodor strobelii
  misc_feature: SGI Peptide ID NO. 562089
  misc_feature (64)..(242): Pfam Id: PF01025 Pfam Desc: GrpE
  misc_feature (1)..(243): NCBI GI: 171689618 Blast Desc: protein product [Podospora anserina] gi|170944771|emb|CAP70882.1| protein product [Podospora anserina]
  misc_feature (1)..(243): NCBI GI: 46105354 Blast Desc: FG00305.1 [Gibberella zeae PH-1]
  misc_feature (1)..(243): NCBI GI: 256734626 Blast Desc: NECHADRAFT_98880 [Nectria haematococca mpVI 77-13-4]
  misc_feature (33)..(243): NCBI GI: 261356875 Blast Desc: grpE [Verticillium albo-atrum VaMs.102]
  misc_feature (1)..(243): NCBI GI: 85082684 Blast Desc: NCU01516 [Neurospora crassa OR74A] gi|52782986|sp|Q9P5U4.1|GRPE_NEUCR RecName: Full=GrpE protein homolog, mitochondrial; Flags: Precursor heat shock protein MGE1
  misc_feature (1)..(243): NCBI GI: 39942268 Blast Desc: MGG_03214 [Magnaporthe grisea 70-15] gi|145015794|gb|EDK00284.1| MGG_03214 [Magnaporthe grisea 70-15]
  misc_feature (3)..(244): NCBI GI: 156056012 Blast Desc: SS1G_05358 [Sclerotinia sclerotiorum 1980] gi|154703142|gb|EDO02881.1| SS1G_05358 [Sclerotinia sclerotiorum 1980]
  misc_feature (46)..(244): NCBI GI: 154310391 Blast Desc: BC1G_07115 [Botryotinia fuckeliana B05.10] gi|150851447|gb|EDN26640.1| BC1G_07115 [Botryotinia fuckeliana B05.10]
  misc_feature (1)..(243): NCBI GI: 189199616 Blast Desc: mitochondrial co-chaperone GrpE [Pyrenophora tritici-repentis Pt-1C-BFP] gi|187983244|gb|EDU48732.1| mitochondrial co-chaperone GrpE [Pyrenophora tritici-repentis
  misc_feature (1)..(219): NCBI GI: 116205065 Blast Desc: CHGG_10416 [Chaetomium globosum CBS 148.51] gi|88176544|gb|EAQ84012.1| CHGG_10416 [Chaetomium globosum CBS 148.51]
  misc_feature: Useful for introducing or modulating the production of volatile compounds
MIRQALINSSRALSASSRTITARSATRSHLSSAPLSPLRSTLAPRRRWYSDEAAKKEAETAAETPKEGEDAAVSELETIKQKLATKEREAIDWKDKYMRALAEFRNDFEQLQKRTEREKQNAKDFAIQPFAKDLVDSVDNLDRALAMGAESLKPAEGAEVNTDLQNFYEGVKMTETNMMSTLKKHGLERFDPEGEKFNPNEHEATFMTAVPDKEHNTVFFVQQKGFKLNGRIVRAAKVGVVNNP

SEQ ID NO: 7003 - DNA, 3122 bp, Muscodor strobelii
  misc_feature: SGI EST ID NO. CUFF.17639.0
  misc_feature: Variant of the nucleotide sequence at SEQ ID NO 7001
tatcgctgcgctgagtggaaggctgtcgcatctgattttctacgcacgcgaccctgacttttcccaacatcatcaaaagtttcacttctatctcgctctcacacgatatttctcttctccgacgacaacacgcacccatattcatcatgatccgacaagccttgatcaactcttccagagctctatccgccagctcgaggaccatcaccgctcgttcagccaccagatcacatctctcctcagcaccattaagtcctctccgctccacactagctccaagaaggagatggtacagtgatgaagccgcaaagaaggaggcagagactgccgcagagacgcctaaggagggggaagatgctgctgtctcagagctcgagacaataaagcagaagttggcgaccaaggagagagaggctatcgactggaaggacaaatacatgcgcgccctggctgagttccgtaacgacttcgagcagctacaaaaacgcacagagcgcgagaagcaaaacgccaaggacttcgcgatccagcccttcgccaaggatctcgtcgacagcgtagacaacctcgaccgcgccctcgccatgggtgccgagagcttgaagcccgccgaaggggcagaggttaacaccgatctgcagaacttctacgaaggcgtcaagatgactgagaccaacatgatgagcaccctcaagaagcacggccttgagcgcttcgaccccgagggcgagaagttcaaccccaacgagcacgaggccaccttcatgacggcggtacccgacaaggaacacaacaccgttttcttcgtccagcagaagggtttcaagctcaacggacggatagtgcgcgctgctaaggttggcgtggttaataatccctgattgcgacatggatctccactccaattgcttgatcggtaatcaagtgtatctcaactcctaccactgagagcaaacaaagctttgtgtacaaatactggaacggataagaaaatgtataacacaacgaattataacacacatacttcatgactatagctacggcaaatttctccccggatacctagcattgggtatctaaaacatgcggacacagacggcatacgcataaagatatgctcttctcacgaataagaaggatcttgacggcatgggccttgtatgataggggacgtggatgtgacaaaggcagataggccaataataaaataatctgtacatacaaaggcgatcctctcatgaaactcgcattacttatgtacatgctgtttctaggggatgaaagtgatatccgttcgttcagtgtccatataattcaatgtcatgaggagtacagcggacttgagacactctaataatcaggaatacacatgaattttgctaccatgctgtgctaagtatgaatagaggtcgtcgaaagtaaagcacttcattctttattatatgacatggtggtccaaaatgctgaaagcgttacagtcggaggcgagggaattggagtaccagttacccttctcgcgcacatatcatctcctgacatatccccgccgacaatattctcgatgaaaaactcagcgccaagcatctactactagttcgccaagggacgattggaatccgtctcagcactcttcgaccgagaaacacgagacactaccggcgtgaagactccccagttacccttgcggtcatgataggccatcaagccaaagtaagcaatgacgacaatccagtacacattataggatatgacacttccatatgttgcagagttctgccagccaaggagggcattgaagataccccagccaccaccaccgttcagctcaggattgcagcagttgacgtgccatacagacttggtgatatcgtacgaacctgagccggagccggtctcggcagcatcgccaccggtgatacggttccattcgttggcttcgaagtaccagacggctctggagaagagacctgcggcgacgaggtataggaagcatgtcgagatgatcaggaaaatttgcatggagaatcgattgccgcccctgaattccaagttagcggtttgaagaacccaataggcgatttcgacttacttataaataaggtacccaacaagacaaccagccgcaagcccagcaacaacagcaagcgggaacgaagtagccggcaaacccaaactcacaccaccaataaagaccacagcctcgaggccctctctcaacacagtaataaaaggcaataagaacataaagtacttctcagaccagactttgaccttactcccgaacccggagtcactcttagtaagttcgcgatctcccgtttcgagagcagcggtaagtttagtgctccatttcgcctgcatcttgttcacacgtagcaaagcagcacccgtgatggagatgatgagcgaggagattataccaaatacgccttcccagatgtattctgctttgctgaagtagtctttgtttagggtgtagaatgcggcgattagacctgcgccgagtgcaagacagattagtaggcccaaggctacgccgagccagacctgtgggttttcgttagtattagactggtgagaagtgggaggagttggcatggatgagcgttgacgcacttgcttgacgagcttcttccgcgtcgcattgtcgctgttgtcggatagtgattgggttaggaaggagagcaggactgagactatgattgctgtttcgagggactctctgaatgttatgaagaagactagagtcagttagatataccgaattcatggcggtttgatggtagtgcagcaagatatatagagatatatcataccaggaacggcaaacacgttgacggtcatcttgatggcggatgacaacgatgtgttgccgatcaaagtcggtcaagaacggttgggcgtatcggcgatacgtaagtagagagtcgcaaaatataggcacagagggttatatactcttatgtgtgttccctaagaccagtgtcccactatcggaatcacatttgcttagaagggcatattttctacggtcctgtgtcggttgtcaaagctcatggtcatttccagttggccaagccatgcactactagggcaaaggagtggcgtgttggaagttcgtg

SEQ ID NO: 7004 - DNA, 1059 bp, Muscodor strobelii
  misc_feature: SGI cDNA ID NO. 562090
  misc_feature: Reduced expression when VOC is produced
  misc_feature: Encodes the peptide sequence at SEQ ID NO 7005
atgaccgtcaacgtgtttgccgttcctgtcttcttcataacattcagagagtccctcgaaacagcaatcatagtctcagtcctgctctccttcctaacccaatcactatccgacaacagcgacaatgcgacgcggaagaagctcgtcaagcaagtctggctcggcgtagccttgggcctactaatctgtcttgcactcggcgcaggtctaatcgccgcattctacaccctaaacaaagactacttcagcaaagcagaatacatctgggaaggcgtatttggtataatctcctcgctcatcatctccatcacgggtgctgctttgctacgtgtgaacaagatgcaggcgaaatggagcactaaacttaccgctgctctcgaaacgggagatcgcgaacttactaagagtgactccgggttcgggagtaaggtcaaagtctggtctgagaagtactttatgttcttattgccttttattactgtgttgagagagggcctcgaggctgtggtctttattggtggtgtgagtttgggtttgccggctacttcgttcccgcttgctgttgttgctgggcttgcggctggttgtcttgttgggtaccttatttataagggcggcaatcgattctccatgcaaattttcctgatcatctcgacatgcttcctatacctcgtcgccgcaggtctcttctccagagccgtctggtacttcgaagccaacgaatggaaccgtatcaccggtggcgatgctgccgagaccggctccggctcaggttcgtacgatatcaccaagtctgtatggcacgtcaactgctgcaatcctgagctgaacggtggtggtggctggggtatcttcaatgccctccttggctggcagaactctgcaacatatggaagtgtcatatcctataatgtgtactggattgtcgtcattgcttactttggcttgatggcctatcatgaccgcaagggtaactggggagtcttcacgccggtagtgtctcgtgtttctcggtcgaagagtgctgagacggattccaatcgtcccttggcgaactag

SEQ ID NO: 7005 - protein, 352 aa, Muscodor strobelii
  misc_feature: SGI Peptide ID NO. 562090
  misc_feature (7)..(326): Pfam Id: PF03239 Pfam Desc: Iron permease FTR1 family
  misc_feature (1)..(347): NCBI GI: 115433030 Blast Desc: plasma membrane iron permease [Aspergillus terreus NIH2624] gi|114189504|gb|EAU31204.1| plasma membrane iron permease [Aspergillus terreus NIH2624]
  misc_feature (1)..(348): NCBI GI: 119498795 Blast Desc: high-affinity iron ion transporter FtrA [Neosartorya fischeri NRRL 181] gi|119414319|gb|EAW24258.1| high-affinity iron ion transporter FtrA [Neosartorya fischeri NRRL 181]
  misc_feature (1)..(347): NCBI GI: 121718250 Blast Desc: high-affinity iron ion transporter FtrA [Aspergillus clavatus NRRL 1] gi|119404346|gb|EAW14722.1| high-affinity iron ion transporter FtrA [Aspergillus clavatus NRRL 1]
  misc_feature (1)..(341): NCBI GI: 238503255 Blast Desc: high-affinity iron transporter FtrA [Aspergillus flavus NRRL3357] gi|220691671|gb|EED48019.1| high-affinity iron transporter FtrA [Aspergillus flavus NRRL3357]
  misc_feature (1)..(343): NCBI GI: 146324022 Blast Desc: high-affinity iron transporter FtrA [Aspergillus fumigatus Af293] gi|50845197|gb|AAT84596.1| high-affinity iron permease [Aspergillus fumigatus] gi|129556362|gb|EAL85926.2| iron
  misc_feature (1)..(337): NCBI GI: 238499103 Blast Desc: high-affinity iron transporter FtrA [Aspergillus flavus NRRL3357] gi|220692539|gb|EED48885.1| high-affinity iron transporter FtrA [Aspergillus flavus NRRL3357]
  misc_feature (1)..(337): NCBI GI: 169778512 Blast Desc: [Aspergillus oryzae RIB40] gi|83772459|dbj|BAE62588.1| protein product [Aspergillus oryzae]
  misc_feature (5)..(341): NCBI GI: 145230015 Blast Desc: An01g08950 [Aspergillus niger] gi|134055430|emb|CAK37139.1| protein product [Aspergillus niger]
  misc_feature (10)..(348): NCBI GI: 145251826 Blast Desc: An16g01130 [Aspergillus niger] gi|134082965|emb|CAK97708.1| protein product [Aspergillus niger]
  misc_feature (4)..(325): NCBI GI: 189208738 Blast Desc: plasma membrane iron permease [Pyrenophora tritici-repentis Pt-1C-BFP] gi|187976795|gb|EDU43421.1| plasma membrane iron permease [Pyrenophora tritici-repentis Pt-1C-BFP]
  misc_feature: Useful for introducing or modulating the production of volatile compounds
MTVNVFAVPVFFITFRESLETAIIVSVLLSFLTQSLSDNSDNATRKKLVKQVWLGVALGLLICLALGAGLIAAFYTLNKDYFSKAEYIWEGVFGIISSLIISITGAALLRVNKMQAKWSTKLTAALETGDRELTKSDSGFGSKVKVWSEKYFMFLLPFITVLREGLEAVVFIGGVSLGLPATSFPLAVVAGLAAGCLVGYLIYKGGNRFSMQIFLIISTCFLYLVAAGLFSRAVWYFEANEWNRITGGDAAETGSGSGSYDITKSVWHVNCCNPELNGGGGWGIFNALLGWQNSATYGSVISYNVYWIVVIAYFGLMAYHDRKGNWGVFTPVVSRVSRSKSAETDSNRPLAN

SEQ ID NO: 7006 - DNA, 3002 bp, Muscodor strobelii
  misc_feature: SGI EST ID NO. CUFF.17640.1
  misc_feature: Variant of the nucleotide sequence at SEQ ID NO 7004
cacgaacttccaacacgccactcctttgccctagtagtgcatggcttggccaactggaaatgaccatgagctttgacaaccgacacaggaccgtagaaaatatgcccttctaagcaaatgtgattccgatagtgggacactggtcttagggaacacacataagagtatataaccctctgtgcctatattttgcgactctctacttacgtatcgccgatacgcccaaccgttcttgaccgactttgatcggcaacacatcgttgtcatccgccatcaagatgaccgtcaacgtgtttgccgttcctgtcttcttcataacattcagagagtccctcgaaacagcaatcatagtctcagtcctgctctccttcctaacccaatcactatccgacaacagcgacaatgcgacgcggaagaagctcgtcaagcaagtctggctcggcgtagccttgggcctactaatctgtcttgcactcggcgcaggtctaatcgccgcattctacaccctaaacaaagactacttcagcaaagcagaatacatctgggaaggcgtatttggtataatctcctcgctcatcatctccatcacgggtgctgctttgctacgtgtgaacaagatgcaggcgaaatggagcactaaacttaccgctgctctcgaaacgggagatcgcgaacttactaagagtgactccgggttcgggagtaaggtcaaagtctggtctgagaagtactttatgttcttattgccttttattactgtgttgagagagggcctcgaggctgtggtctttattggtggtgtgagtttgggtttgccggctacttcgttcccgcttgctgttgttgctgggcttgcggctggttgtcttgttgggtaccttatttataagggcggcaatcgattctccatgcaaattttcctgatcatctcgacatgcttcctatacctcgtcgccgcaggtctcttctccagagccgtctggtacttcgaagccaacgaatggaaccgtatcaccggtggcgatgctgccgagaccggctccggctcaggttcgtacgatatcaccaagtctgtatggcacgtcaactgctgcaatcctgagctgaacggtggtggtggctggggtatcttcaatgccctccttggctggcagaactctgcaacatatggaagtgtcatatcctataatgtgtactggattgtcgtcattgcttactttggcttgatggcctatcatgaccgcaagggtaactggggagtcttcacgccggtagtgtctcgtgtttctcggtcgaagagtgctgagacggattccaatcgtcccttggcgaactagtagtagatgcttggcgctgagtttttcatcgagaatattgtcggcggggatatgtcaggagatgatatgtgcgcgagaagggtaactggtactccaattccctcgcctccgactgtaacgctttcagcattttggaccaccatgtcatataataaagaatgaagtgctttactttcgacgacctctattcatacttagcacagcatggtagcaaaattcatgtgtattcctgattattagagtgtctcaagtccgctgtactcctcatgacattgaattatatggacactgaacgaacggatatcactttcatcccctagaaacagcatgtacataagtaatgcgagtttcatgagaggatcgcctttgtatgtacagattattttattattggcctatctgcctttgtcacatccacgtcccctatcatacaaggcccatgccgtcaagatccttcttattcgtgagaagagcatatctttatgcgtatgccgtctgtgtccgcatgttttagatacccaatgctaggtatccggggagaaatttgccgtagctatagtcatgaagtatgtgtgttataattcgttgtgttatacattttcttatccgttccagtatttgtacacaaagctttgtttgctctcagtggtaggagttgagatacacttgattaccgatcaagcaattggagtggagatccatgtcgcaatcagggattattaaccacgccaaccttagcagcgcgcactatccgtccgttgagcttgaaacccttctgctggacgaagaaaacggtgttgtgttccttgtcgggtaccgccgtcatgaaggtggcctcgtgctcgttggggttgaacttctcgccctcggggtcgaagcgctcaaggccgtgcttcttgagggtgctcatcatgttggtctcagtcatcttgacgccttcgtagaagttctgcagatcggtgttaacctctgccccttcggcgggcttcaagctctcggcacccatggcgagggcgcggtcgaggttgtctacgctgtcgacgagatccttggcgaagggctggatcgcgaagtccttggcgttttgcttctcgcgctctgtgcgtttttgtagctgctcgaagtcgttacggaactcagccagggcgcgcatgtatttgtcctgtggtgatgtatgttagagcttattcttgatgaatgatattgtcggcgcattgcgacaatatgatcaacgaaccttccagtcgatagcctctctctccttggtcgccaacttctgctttattgtctcgagctctgagacagcagcatcttccccctccttaggcgtctctgcggcagtctctgcctccttctttgcggcttcatcactgtaccatctccttcttggagctagtgtggagcggagaggacttaatggtgctgaggagagatgtgatctggtggctgaacgagcggtgatggtcctcgagctggcggatagagctctggaagagttgatcaaggcttgtcggatcatgatgaatatgggtgcgtgttgtcgtcggagaagagaaatatcgtgtgagagcgagatagaagtgaaacttttgatgatgttgggaaaagtcagggtcgcgtgcgtagaaaatcagatgcgacagccttccactcagcgcagcgata

SEQ ID NO: 7007 - DNA, 1749 bp, Muscodor strobelii
  misc_feature: SGI cDNA ID NO. 562091
  misc_feature: Reduced expression when VOC is produced
  misc_feature: Encodes the peptide sequence at SEQ ID NO 7008
atgttcgtctctcgtatgcccattttgggcttgtcgctactggcgagtgtccatcatgccgtcgcagacaccatcaagctcgactggaacatcacctgggtgtatgcaaatcctgatggcatggctgtcagaccagtcataggaataaataacgagtggccacttcctcttcttaatctaacgaagggagatagagtcctggccaaaatcaccaataatctcggcaatgagacgacatcgatgcattggcatggacttttccagaatggcactacttacatggacggaccacccatgatgaatcagtgcgagattcctcccggaatgtccgtcacatataattttactttggatcaagccggcacctactggtatcactcacacaccaggggccaatatccggatggtgttcggcaggctttgatcatccaagatccggaaagtccatacgccggccaatacgacgaagagttggttattaccttatctgactggtaccatgaccaattcagagacctcctcgtctcgttcattgactacaagaacccaacaggagctgagcccgttccacaagcggcgcttatgaatgagaccaccaacttccagcagatcgcaaagccaggcaagacttatatgatccatttggcgaatatcggtgcctttgctgctcattacttctggattgaggatcacacgatgagaatcgtagaggttgatggcgtctggaccgaacaagctgagactagcatgatctatgttgcagctgcgcagcggtacactatcttggtgacgatgaagaatgatacaagccagaattaccccatcgtgaccagtatggacactgatcttttcgaccaaattccagatgacctggattggaacacgactggatggcttgtctatgattccaatgctgaactgccaacggcgtctttcgtagactcttttgacttttatgatgacttcgacctcgttcctgtggatggcgttgagctcttccctgatgctgattacaccgtcagtcttgacttgactatggataatcttgccaatggcgcgagctacgctttcttcaatgacattacatacacagcgccgaaggtcccgactcttttcactgtcctatcagcaggtgacgatgctactaactccgccgtatacggagcctacaccaacccctttgtcttgaaccacggtgagacgatagatattgttctcaataatgatgattcgggaaaacaccctttccatctccacggacatacgttccaggttctctaccgaagcgaagatgatgccggtcactggaatggatcatcagatgttaatttcccctcgacaccaatgaggagagatacggtagtcgttcgaggtggcggaaacatcgtcttgcgctttcgatctgacaacccaggcgtatggttcttccactgccatattcaatggcacatggacacgggtctagccgtaacattcgttgaggcaccgcttgagttgcaggcatcaaccaccattcctaaagacttcttggcgatatgcgaagcggagggtgtgcaaaccagtgggaacgctgcgggtaacacggagaattatcttgacctcactgggcagaataagcagctggactggcttcctgctggctttacaccgagaggcatcgtggcattggttttcagcagcattgccggtattcttggtatttccgttattgcatggtatggcgcaacaccggctgggaagggtatttga

SEQ ID NO: 7008 - protein, 582 aa, Muscodor strobelii
  misc_feature: SGI Peptide ID NO. 562091
  misc_feature (156)..(304): Pfam Id: PF00394 Pfam Desc: Multicopper oxidase
  misc_feature (363)..(498): Pfam Id: PF07731 Pfam Desc: Multicopper oxidase
  misc_feature (30)..(148): Pfam Id: PF07732 Pfam Desc: Multicopper oxidase
  misc_feature (8)..(577): NCBI GI: 146324020 Blast Desc: ferrooxidoreductase Fet3 [Aspergillus fumigatus Af293] gi|50845196|gb|AAT84595.1| ferroxidase [Aspergillus fumigatus] gi|129556363|gb|EAL85927.2| ferrooxidoreductase Fet3, fumigatus
  misc_feature (7)..(580): NCBI GI: 115433032 Blast Desc: iron transport multicopper oxidase FET3 precursor [Aspergillus terreus NIH2624] gi|114189505|gb|EAU31205.1| iron transport multicopper oxidase FET3 precursor [Aspergillus terreus
  misc_feature (8)..(577): NCBI GI: 119498797 Blast Desc: ferrooxidoreductase Fet3, [Neosartorya fischeri NRRL 181] gi|119414320|gb|EAW24259.1| ferrooxidoreductase Fet3, [Neosartorya fischeri NRRL 181]
  misc_feature (12)..(577): NCBI GI: 121718254 Blast Desc: ferrooxidoreductase Fet3, [Aspergillus clavatus NRRL 1] gi|119404347|gb|EAW14723.1| ferrooxidoreductase Fet3, [Aspergillus clavatus NRRL 1]
  misc_feature (22)..(577): NCBI GI: 169776545 Blast Desc: [Aspergillus oryzae RIB40] gi|83771474|dbj|BAE61606.1| protein product [Aspergillus oryzae]
  misc_feature (22)..(577): NCBI GI: 169778510 Blast Desc: [Aspergillus oryzae RIB40] gi|83772458|dbj|BAE62587.1| protein product [Aspergillus oryzae]
  misc_feature (22)..(572): NCBI GI: 238499105 Blast Desc: ferrooxidoreductase Fet3, [Aspergillus flavus NRRL3357] gi|220692540|gb|EED48886.1| ferrooxidoreductase Fet3, [Aspergillus flavus NRRL3357]
  misc_feature (13)..(579): NCBI GI: 46121561 Blast Desc: FG05159.1 [Gibberella zeae PH-1]
  misc_feature (3)..(579): NCBI GI: 154318979 Blast Desc: BC1G_02441 [Botryotinia fuckeliana B05.10] gi|150856872|gb|EDN32064.1| BC1G_02441 [Botryotinia fuckeliana B05.10]
  misc_feature (24)..(574): NCBI GI: 152013650 Blast Desc: Lcc3 [Fusarium oxysporum]
  misc_feature (28)..(513): SWISSPROT Homolog: EC 1.10.3.2 Laccase
  misc_feature: Useful for introducing or modulating the production of volatile compounds
MFVSRMPILGLSLLASVHHAVADTIKLDWNITWVYANPDGMAVRPVIGINNEWPLPLLNLTKGDRVLAKITNNLGNETTSMHWHGLFQNGTTYMDGPPMMNQCEIPPGMSVTYNFTLDQAGTYWYHSHTRGQYPDGVRQALIIQDPESPYAGQYDEELVITLSDWYHDQFRDLLVSFIDYKNPTGAEPVPQAALMNETTNFQQIAKPGKTYMIHLANIGAFAAHYFWIEDHTMRIVEVDGVWTEQAETSMIYVAAAQRYTILVTMKNDTSQNYPIVTSMDTDLFDQIPDDLDWNTTGWLVYDSNAELPTASFVDSFDFYDDFDLVPVDGVELFPDADYTVSLDLTMDNLANGASYAFFNDITYTAPKVPTLFTVLSAGDDATNSAVYGAYTNPFVLNHGETIDIVLNNDDSGKHPFHLHGHTFQVLYRSEDDAGHWNGSSDVNFPSTPMRRDTVVVRGGGNIVLRFRSDNPGVWFFHCHIQWHMDTGLAVTFVEAPLELQASTTIPKDFLAICEAEGVQTSGNAAGNTENYLDLTGQNKQLDWLPAGFTPRGIVALVFSSIAGILGISVIAWYGATPAGKGI

SEQ ID NO: 7009 - DNA, 2102 bp, Muscodor strobelii
  misc_feature: SGI EST ID NO. CUFF.17432.0
  misc_feature: Variant of the nucleotide sequence at SEQ ID NO 7007
cttggactggttcagaaggtcgagacagtgccatctcggaccatcgtacaagggccgtgattatgagggtttcagctcaacgtgccgcaacccgtcagtggccggtgctgggggtcaagcctttttcgccagatgtgaggatatggacgttatgtatattcatctatctaaaactcatgagtcccagaattgagcctccatttccttgagctgccgttccgtgtgctctgtacacacaatatgttcgtctctcgtatgcccattttgggcttgtcgctactggcgagtgtccatcatgccgtcgcagacaccatcaagctcgactggaacatcacctgggtgtatgcaaatcctgatggcatggctgtcagaccagtcataggaataaataacgagtggccacttcctcttcttaatctaacgaagggagatagagtcctggccaaaatcaccaataatctcggcaatgagacgacatcgatgcattggcatggacttttccagaatggcactacttacatggacggaccacccatgatgaatcagtgcgagattcctcccggaatgtccgtcacatataattttactttggatcaagccggcacctactggtatcactcacacaccaggggccaatatccggatggtgttcggcaggctttgatcatccaagatccggaaagtccatacgccggccaatacgacgaagagttggttattaccttatctgactggtaccatgaccaattcagagacctcctcgtctcgttcattgactacaagaacccaacaggagctgagcccgttccacaagcggcgcttatgaatgagaccaccaacttccagcagatcgcaaagccaggcaagacttatatgatccatttggcgaatatcggtgcctttgctgctcattacttctggattgaggatcacacgatgagaatcgtagaggttgatggcgtctggaccgaacaagctgagactagcatgatctatgttgcagctgcgcagcggtacactatcttggtgacgatgaagaatgatacaagccagaattaccccatcgtgaccagtatggacactgatcttttcgaccaaattccagatgacctggattggaacacgactggatggcttgtctatgattccaatgctgaactgccaacggcgtctttcgtagactcttttgacttttatgatgacttcgacctcgttcctgtggatggcgttgagctcttccctgatgctgattacaccgtcagtcttgacttgactatggataatcttgccaatggcgcgagctacgctttcttcaatgacattacatacacagcgccgaaggtcccgactcttttcactgtcctatcagcaggtgacgatgctactaactccgccgtatacggagcctacaccaacccctttgtcttgaaccacggtgagacgatagatattgttctcaataatgatgattcgggaaaacaccctttccatctccacggacatacgttccaggttctctaccgaagcgaagatgatgccggtcactggaatggatcatcagatgttaatttcccctcgacaccaatgaggagagatacggtagtcgttcgaggtggcggaaacatcgtcttgcgctttcgatctgacaacccaggcgtatggttcttccactgccatattcaatggcacatggacacgggtctagccgtaacattcgttgaggcaccgcttgagttgcaggcatcaaccaccattcctaaagacttcttggcgatatgcgaagcggagggtgtgcaaaccagtgggaacgctgcgggtaacacggagaattatcttgacctcactgggcagaataagcagctggactggcttcctgctggctttacaccgagaggcatcgtggcattggttttcagcagcattgccggtattcttggtatttccgttattgcatggtatggcgcaacaccggctgggaagggtatttgatctattcatagtgagctcaagaaggaggataatgcatagcttgctgtatacatcacattagaaagaacatcaagatatccatgttataatggcacgagagtttttaaatgtta

SEQ ID NO: 7010 - DNA, 462 bp, Muscodor strobelii
  misc_feature: SGI cDNA ID NO. 562092
  misc_feature: Encodes the peptide sequence at SEQ ID NO 7011
atgtacagcccctatggctcctacagctctatgagctcgaatactcagcccatggatatcacatcgaacagctacttctcaagagatgcgggatatcatgctagctgcgcctttccgtcgtggcctcagcgatcttctttgatggacgagacaccagaacaaagggcgacttcatacctttccgacgacgatctattcccatgtggacctttggaggacgatatgaacagtatttcaagtggtgggagcaccgctgctacctcaccgttgatcaacgaggaggaaattctggaaatgcaacgccaaaagatgatgcttcagagagaagccctcaagcacgtactctacgagaaggaaaggagacgccaacagcagaagcagcgccagcgacgcagcagctctggctcttccaaaaagagttctaagaaacaagaccaaatggctcctatcaccgaagcttga

SEQ ID NO: 7011 - protein, 153 aa, Muscodor strobelii
  misc_feature: SGI Peptide ID NO. 562092
  misc_feature (17)..(130): NCBI GI: 261356695 Blast Desc: conserved [Verticillium albo-atrum VaMs.102]
  misc_feature (2)..(152): NCBI GI: 39977575 Blast Desc: [Magnaporthe grisea 70-15] gi|145013813|gb|EDJ98454.1| [Magnaporthe grisea 70-15]
  misc_feature (1)..(144): NCBI GI: 256729114 Blast Desc: NECHADRAFT_100387 [Nectria haematococca mpVI 77-13-4]
  misc_feature (17)..(128): NCBI GI: 171689440 Blast Desc: protein product [Podospora anserina] gi|170944682|emb|CAP70793.1| protein product [Podospora anserina]
  misc_feature (17)..(153): NCBI GI: 116199425 Blast Desc: CHGG_07868 [Chaetomium globosum CBS 148.51] gi|88179147|gb|EAQ86615.1| CHGG_07868 [Chaetomium globosum CBS 148.51]
  misc_feature (16)..(153): NCBI GI: 85077033 Blast Desc: NCU01790 [Neurospora crassa OR74A] gi|18376122|emb|CAD21188.1| [Neurospora crassa] gi|28916998|gb|EAA26726.1| NCU01790 [Neurospora crassa OR74A]
  misc_feature (1)..(119): NCBI GI: 46138637 Blast Desc: FG10833.1 [Gibberella zeae PH-1]
  misc_feature (18)..(144): NCBI GI: 212530512 Blast Desc: conserved [Penicillium marneffei ATCC 18224] gi|210074811|gb|EEA28898.1| conserved [Penicillium marneffei ATCC 18224]
  misc_feature (2)..(136): NCBI GI: 75858986 Blast Desc: AN9451.2 [Aspergillus nidulans FGSC A4] gi|40747650|gb|EAA66806.1| AN9451.2 [Aspergillus nidulans FGSC A4] gi|57639512|gb|AAW55627.1| OefB [Emericella nidulans] TPA: ;
  misc_feature (26)..(114): NCBI GI: 238840457 Blast Desc: OefB [Microsporum canis CBS 113480]
MYSPYGSYSSMSSNTQPMDITSNSYFSRDAGYHASCAFPSWPQRSSLMDETPEQRATSYLSDDDLFPCGPLEDDMNSISSGGSTAATSPLINEEEILEMQRQKMMLQREALKHVLYEKERRRQQQKQRQRRSSSGSSKKSSKKQDQMAPITEA

SEQ ID NO: 7012 - DNA, 2618 bp, Muscodor strobelii
  misc_feature: SGI EST ID NO. CUFF.17539.1
  misc_feature: Variant of the nucleotide sequence at SEQ ID NO 7010
gggggtggcacggtcgtgggggacagggggagtatctcatggctcacccatgggggcgtgaaggaagcagtcagcgaacagacacggcgagacgggactgacatgggacggggaaatctggaaattggcccattccatgctagtgaccgccgttgggtacaccccagctcatctgaatcatgtagtcccaaagaccctgccttgagttattcctgattccatccctatctaggaatgtacgtaccctcccattccctcggaggcatgtgtccattacatatatatctcgggagtcatctcgatcccgccagctcgggcttctttccatgacttcatattgccatactcacgataatccatactagactgtgactagtatattctgtcaacagcaccattaatactagcgagcaacccactctagctcttcacgaccaaaccgcttacaccacttacaccacttgccttgtgcaatactattaccactagacgacttacacacacgacgacaaacgagtctttcacgagcggaagtccacatatcatcaaaatgtacagcccctatggctcctacagctctatgagctcgaatactcagcccatggatatcacatcgaacagctacttctcaagagatgcgggatatcatgctagctgcgcctttccgtcgtggcctcagcgatcttctttgatggacgagacaccagaacaaagggcgacttcatacctttccgacgacgatctattcccatgtggacctttggaggacgatatgaacagtatttcaagtggtgggagcaccgctgctacctcaccgttgatcaacgaggaggaaattctggaaatgcaacgccaaaagatgatgcttcagagagaagccctcaagcacgtactctacgagaaggaaaggagacgccaacagcagaagcagcgccagcgacgcagcagctctggctcttccaaaaagagttctaagaaacaagaccaaatggctcctatcaccgaagcttgagcgtgcacatctctctaacgactttacgacagcattatcttttacatgatttatcagcatgataccccagcattgcataaacataatagcgacagcggcaacagcacatcattattacactattgatacccttattctatgataccctaatgagtcacaatagagactcatcgccacagcgccaacaactgtcaccgagtcatcgcctcggggcgttgggtggcagggggcgactgcggcataatacagccttaccagttggctcagccatgatgacaacagcatcataactacgagtcaccgtgcatattgccaacagggcaaacataacatgcactcataattttgggacacacaacaagttgtctctactacttgcattcagccagatgtgttgttcgctgccaaacagggtatttggccttcagcaacaaggattcagccgatgaatcataggaatgggcattttggaatattttcaatctcgtggcggtgagagcaggcagacgggaaacgcgattggagcgtcggaggcccgaccggaccgcgaccttgggcgcggaatgccgcctttagtcgctccattgggtagaaatttggggtgagcgaagacggcaaggggggtagcacatccggacgccaacctattggtcgtcttgagggatctggtcaaacacggtgacacctgggactaagaatcttattcggtgcactccatggaggttccggaataggctcacggtgtgcgtagatatgaattgaaagcatgcaacgaacccatttgaactctgcttctcgtctgtgatcttacctgcaatggtgacatggaattaccagttccccggactttggtatacgaatagtaccttttggccgccatgttcagttcggtatttgctggtatacgcaagtcagacacatcatgatcacgaacttcatggtattgtgcgacttggaggcaagccaccggcttctactatccagccgagctagggctcacaatttcttcttcctgatacccgggctctgaatttaatgagcttgtctcggctgtgaggatcgccacagatcgtgcttttgacgggcagacgggtagatgtggtaggctacagacgcgtcggcatgctacccggtcaaaaagccggtagcttcgtctcgcgcctttcccctttcactaccttggctactgcgatgccagcggtgaggagatgcgcgatgcaagtccacgtacctaaattctcgttggcacttgcaggggtttcaaattctatcaaagtgagtcacaagaggggggaagaggagtttgttgttttttcaaagaggaggtgaagaaaagaaacagagcgatgaaaatgcgaaaatgactctttccctattgcagtatatcacatcgttgggcatcatctgagggtgtatgtgggggtgagaaggtgataagtggatgacggactaaggtgacaaaaatgactgttggtggcataataacaagaactacacaatttgttactgttgcctgtcacttgtcatttctcataacaatcacaagttgtgtgtgactcgggtcaaatcacaaagaatgaatcagtagctcgttcgcttgtcttcc

SEQ ID NO: 7013 - DNA, 4908 bp, Muscodor strobelii
  misc_feature: SGI cDNA ID NO. 562093
  misc_feature: Encodes the peptide sequence at SEQ ID NO 7014
atgtcggcgtcaagccacccggcgtcctctcgccatcgcaatgcctccctcagctcggccggtcggtcgtccaagaagagtcaattgacagcagagccgaaagattttacttcacctggcgctttaatgagatttttcgagccaacggtagcgacagcttctatgttgctatatgcgcagggctcgtcagtagtagtcgcacaccatgacaccctaacgatcgaaagacgcttcgcacggcattcagccgaagtccaactacttgctgtcgacacagttagcgaccagggatccggaagaatggccgttagttacgatgtggatatgacatgtataatatgggatttgatgaccggcgacgagataactcggttctcatcatacgagcctatgacatgtgcgacatggatgaaaaatggaaacgtagcttttggcaactcacagggcagcgtcattcttttcgagcctgcaacttcggaacacatatctgcacgaaccatagaccaaatcgccatcactgcgttggcacccgctgctgactgtagaacgtttgctataggataccaaaatggctctttgattattgccacattacaaccaaggtttacgatattgcaaaatctgagcacttcaagagcaccatcgccaatagtaaatctcgcttggcatgcatcatcttcacgccaaaaatcggacatgttggcggtccagactaatgacggagatctacgagtatggagtgtgccgaaatcatacaatagcgatgatcccgccaaggtcgtacgaatcctaaagcgcaatgaaatttatcaaaatggtcccaactggatgggatggtcaaaaaatggtcgcattatccagtttgcagataacgagactctatcatgggatgtccgaaccaaacacgtcacatacgatagtataccgactcttgaacatgtccgcggtctcgccgtgtacggacccggtgcgaccttgttcactcttggtgccaacaacacagtgcagcaattcgacctcaacacaccgtcgatgatggtttcgaatgttcaacatcctgccaatcttttgccaccgtcgccaccagtttccatcgaggagcaagtcgagcaaggtattgtcatcatcggaacagagtcggactcatctattcccgtcaatgcggaaatttccgaaagtgacgatgatcatctctcacctttggctcgaatggtgcgtggtactgatgctgcaaacgacccgattgatcaagacaggtacatgtctgctagtccggcttctaccaagagttccactatttcacgggagtctaccaactctggcaccgaaggtcgctaccaaccatcagtgcgatcacggggaatgactgagaatacttacatttcagctgggtcttctcttcggtcatctgtgaagccaccaccatttggagacagggatgcatactcgattagtagtgtcagctcggcttccatcacatcgtcatctcgctcacggccaaagccctcaagattacgaaatgaggtcttgactagccctgctgatgacaaagtgcacgatctgtttaagttcacaaggagtcgactccatgatgtcccctacaagcgagtgccactccatgaccagagccgattaaccaatgatgacctccgccggcagatgctcagcatcatattcggatggaatggagagatggaggatcttgttcgcgatgaaatgttgcggcatccgaatggttctgcaagccgtatcctactcgccaagtggcttggagacatcgatgctgatgtgatgactgctactgcggagaatatgacttcttcggattggatgttgttggccctcagcggtataggtggtcaagcctcgcaacacaagctaggccgtgcttttgtgcaaagactcctggaaaacaatgatgtgcacactgctgcaacgatcatgattggaatgggcgatcacaacgacgctatcgaaatttacgtgtcgcacaagaaatacctcgaagctatcgtacttctttgcctgttcttctcaaccgtatgggagcgccaggcccagatcatcaagaaatggggcgaatttgcggtacaacacggccaacaagcgctggctattcgatgctttgcttgtactggcgttgaagcctcagagccctggtcctcgccatcagctgcgcaagtgacctttcaaagcctcaaccaaagcattccggaaattttgagtccacccctttctccccccgggctcaatcgggggcctcaacgcagtattgcaaagagttcggctttgaaattgattaccaccttcgaagacaagggacagaaatcaaaattcttctctggtgatggaggaaagacgcccattgcagctggcgtgacgcctatcgccgaatcagccatatcccctggaggatatgacccaagcactgcttttcttcgaccttcaggacgaagtgcattcaacacgccctcttcggctaagcctacgactccaggtggctttggaagacaacgattgccttctattggagaggtgcccgctgacggttccaaacgccaaacagcaagaggactagctcctgctgagcaagcggacatcgttgttgaccctggccgcgctcatcgtgcagagcattctcgtcaaggatctggtgaccatttcaacattggaatgtctcttggccgggcttccacggcgagccccatgatgatgagggatagccatcgtcgcaaggatccagctccgccttctccgaacccagaatcactacaagctctgatgcagcagggtcgctcaagccgaaatggcgcgcgggaacgaaaacccgaaggaatggcacttcaactcgattctctaaacacagctgtggctagtgatgtgacttcgcctgagcagtccgttgcttcttcgactcgtttccactggccaactcgtaccggaagacgtggaccaggctccgttgctagttctgtcacgtccaactcgagtgctggtcgaagctatcgaagccatcgtggccagcatggccaggctgttacgaagaacctgaccaactatatccactcactggaaactgctcaggacttctccaaaaagcagcgtagccccgaagtcgcaaggcagggagagatggttctgaagagagaggtcgaggagcatctagaaactatactcctaagccagccaagcgctccccaaccctctcctatccccatgtcgcctgaggaattgatcaacctcagcactccacgacagctagatgctcaactgactgacgaaggagtcgctccgttgacccttgataacgctccttctactgtccccgccaaaagagtcgcgagcggcggccgccagcacttgaactccgaggacgaagccaaagccgtgatgaaattctactctggctctgacgacgaagctgattaccgtgctgcaatcgaggcgcaagagcaattccgagcccgtcacaaccgtagcaaggatcccacttcaccggctgtctcacgagcccgggatcgctcggagagtcgcaagcggaaaaataagacccctggtgaactggagcctcctgtcccaacacagtctagaggcgaaaatcgatcgagaggagagaaccatgtagagaagcctcatgctggtgacttgaagcgaatctcgcttgacagacaacagaagaaagaggctgctgctcgtgagctcgaagaacgccgaaagtctcttgctcggcgtccatctgcacctccaattcctcatcccgaggatctatctccggtcatctcgcggtcacccagcgttttcgagcttccccagacgactttcgttccaccacaggatgttccaacacgaagtcatacagccgacccggctcgcaaatctacaagcatgcgcagcccaaatgcccctttcatcggtctacctgcaacgcctaaggccatgagacttcagtttcagagcggagcccagcctgctgtgcctcagattcccgcagcccacaggaaatctcccccgtcttccggacaaccttctccaaataagtctggcaacaactcgccggccaagacgcccggagacgagccgtctctgctgaccctgctaccctctactgtctattcgccaccaacgaggccaaacatccagagatgcatgtctgcacccatccctgaagagccaccagctcctccttccgtaggcttgcctgctcaccctgctttccaacaaggcatgcaagccggcaatcagccgcctcgacgcggatccatcagcgctcgaaagatgagtgccgatgccacaatcggcatgcgaggcatcgatgagattatcggtggtggtagacactcgaggaatccctctcgtgatgacatcccaccccctccgccgccacctccagtcatgctgaaggagctccagcacctagctacgcctcctccaccaccacccgcaccaatgcctggattacgaccaactgtatatggtggccctaccgtctctggctccatcgagatcgtcatggacgacgaggaagaggcagtcccaactgccgctcccatgcacgaatcaacagtgcccatcatcgcccctccagcgcccccatcatcgcggaacgggcacaatcggggccgcagcatcaccgacaaggacaatagtattgccagtcgcatcagccgcgccaccgagcgcattcgttccgccagtcgtggacgaagcaactctgtcttagccagccgcaccaaatcgccaacggagacgtcgccttatgagagcgtgcctcctctagtgccatcggttcccgctggctatagtactagtcctcctccacagactgagcgtcaccccatggaagtgcgagccctctatcagcagcaacaggaagttggcagcggacttcatcagagcgagatgatctaa

SEQ ID NO: 7014 - protein, 1635 aa, Muscodor strobelii
  misc_feature: SGI Peptide ID NO. 562093
  misc_feature (43)..(1635): NCBI GI: 256729111 Blast Desc: NECHADRAFT_93326 [Nectria haematococca mpVI 77-13-4]
  misc_feature (43)..(1635): NCBI GI: 46138641 Blast Desc: FG10835.1 [Gibberella zeae PH-1]
  misc_feature (118)..(1593): NCBI GI: 145606086 Blast Desc: MGG_06673 [Magnaporthe grisea 70-15] gi|145013812|gb|EDJ98453.1| MGG_06673 [Magnaporthe grisea 70-15]
  misc_feature (97)..(1635): NCBI GI: 261356694 Blast Desc: IDC1 protein [Verticillium albo-atrum VaMs.102]
  misc_feature (1)..(1084): NCBI GI: 171689434 Blast Desc: protein product [Podospora anserina] gi|129566109|gb|ABJ96338.2| IDC1 protein [Podospora anserina] gi|170944679|emb|CAP70790.1| protein product [Podospora anserina]
  misc_feature (1)..(1091): NCBI GI: 18376123 Blast Desc: [Neurospora crassa]
  misc_feature (44)..(1081): NCBI GI: 156034234 Blast Desc: SS1G_13420 [Sclerotinia sclerotiorum 1980] gi|154698823|gb|EDN98561.1| SS1G_13420 [Sclerotinia sclerotiorum 1980]
  misc_feature (378)..(1587): NCBI GI: 116199421 Blast Desc: CHGG_07866 [Chaetomium globosum CBS 148.51] gi|88179145|gb|EAQ86613.1| CHGG_07866 [Chaetomium globosum CBS 148.51]
  misc_feature (38)..(860): NCBI GI: 189188820 Blast Desc: WD domain containing protein [Pyrenophora tritici-repentis Pt-1C-BFP] gi|187972355|gb|EDU39854.1| WD domain containing protein [Pyrenophora tritici-repentis Pt-1C-BFP]
  misc_feature (46)..(1036): NCBI GI: 119477556 Blast Desc: WD domain protein [Neosartorya fischeri NRRL 181] gi|119407438|gb|EAW17387.1| WD domain protein [Neosartorya fischeri NRRL 181]
MSASSHPASSRHRNASLSSAGRSSKKSQLTAEPKDFTSPGALMRFFEPTVATASMLLYAQGSSVVVAHHDTLTIERRFARHSAEVQLLAVDTVSDQGSGRMAVSYDVDMTCIIWDLMTGDEITRFSSYEPMTCATWMKNGNVAFGNSQGSVILFEPATSEHISARTIDQIAITALAPAADCRTFAIGYQNGSLIIATLQPRFTILQNLSTSRAPSPIVNLAWHASSSRQKSDMLAVQTNDGDLRVWSVPKSYNSDDPAKVVRILKRNEIYQNGPNWMGWSKNGRIIQFADNETLSWDVRTKHVTYDSIPTLEHVRGLAVYGPGATLFTLGANNTVQQFDLNTPSMMVSNVQHPANLLPPSPPVSIEEQVEQGIVIIGTESDSSIPVNAEISESDDDHLSPLARMVRGTDAANDPIDQDRYMSASPASTKSSTISRESTNSGTEGRYQPSVRSRGMTENTYISAGSSLRSSVKPPPFGDRDAYSISSVSSASITSSSRSRPKPSRLRNEVLTSPADDKVHDLFKFTRSRLHDVPYKRVPLHDQSRLTNDDLRRQMLSIIFGWNGEMEDLVRDEMLRHPNGSASRILLAKWLGDIDADVMTATAENMTSSDWMLLALSGIGGQASQHKLGRAFVQRLLENNDVHTAATIMIGMGDHNDAIEIYVSHKKYLEAIVLLCLFFSTVWERQAQIIKKWGEFAVQHGQQALAIRCFACTGVEASEPWSSPSAAQVTFQSLNQSIPEILSPPLSPPGLNRGPQRSIAKSSALKLITTFEDKGQKSKFFSGDGGKTPIAAGVTPIAESAISPGGYDPSTAFLRPSGRSAFNTPSSAKPTTPGGFGRQRLPSIGEVPADGSKRQTARGLAPAEQADIVVDPGRAHRAEHSRQGSGDHFNIGMSLGRASTASPMMMRDSHRRKDPAPPSPNPESLQALMQQGRSSRNGARERKPEGMALQLDSLNTAVASDVTSPEQSVASSTRFHWPTRTGRRGPGSVASSVTSNSSAGRSYRSHRGQHGQAVTKNLTNYIHSLETAQDFSKKQRSPEVARQGEMVLKREVEEHLETILLSQPSAPQPSPIPMSPEELINLSTPRQLDAQLTDEGVAPLTLDNAPSTVPAKRVASGGRQHLNSEDEAKAVMKFYSGSDDEADYRAAIEAQEQFRARHNRSKDPTSPAVSRARDRSESRKRKNKTPGELEPPVPTQSRGENRSRGENHVEKPHAGDLKRISLDRQQKKEAAARELEERRKSLARRPSAPPIPHPEDLSPVISRSPSVFELPQTTFVPPQDVPTRSHTADPARKSTSMRSPNAPFIGLPATPKAMRLQFQSGAQPAVPQIPAAHRKSPPSSGQPSPNKSGNNSPAKTPGDEPSLLTLLPSTVYSPPTRPNIQRCMSAPIPEEPPAPPSVGLPAHPAFQQGMQAGNQPPRRGSISARKMSADATIGMRGIDEIIGGGRHSRNPSRDDIPPPPPPPPVMLKELQHLATPPPPPPAPMPGLRPTVYGGPTVSGSIEIVMDDEEEAVPTAAPMHESTVPIIAPPAPPSSRNGHNRGRSITDKDNSIASRISRATERIRSASRGRSNSVLASRTKSPTETSPYESVPPLVPSVPAGYSTSPPPQTERHPMEVRALYQQQQEVGSGLHQSEMI

SEQ ID NO: 7015 - DNA, 7404 bp, Muscodor strobelii
  misc_feature: SGI EST ID NO. CUFF.17790.0
  misc_feature: Variant of the nucleotide sequence at SEQ ID NO 7013
actgtgcgtgctctagaagagttccaacggcactgaaagcatggcttgtacgtagattgcagtacggtcgcatcagaacagacctgcagatggaagttactataaccatctccaacagcataacgacagcccccattgaggctggtgttgatcctcaaacccgcccccagatatcaaagtgctattcgtatctgtctggaaatccttccaactgtcactctaattatgtctcgaaacttatgacatgccgtacacaaagtctccgctggactacggggcggatcttcatcaccgccctatttctcacccgttgatctggcccgggtcaccgacaggagagctggccgtgccgctttctcaccgtcaagtgacgatgctagtggcatcgaaccatcacagcagcagtctccattcttcgtcagccagccagcgagagagcgagatggcatgtgaggtgaaggctaattatatcgaaatatcaaatagcccaatgtacctctcgggttccctggtctaaagcttctgccaaatccgccagtcacttggccggattagctgtcaattcagtgccatcacctcaaaacccctcgtgcccctgcaccattccctgcccattcggcatggcgatggctgatcagacccctgtgtgatgcacttggcttagccggaccgtatccgcttcttttgatatgcctgcccgctactcgactactgtacttagcatatgcgcctggtagccattgacaggtcagaacctcctcttcttaggcgctggccttttagcacgtcgagtatctagaataatactttgttccctcacacccccgagcttcgccgtggtcgtgtcttgactcttttcccctttccctcctttgcccctttgcatttgtgattgtctcggtcctgcatatccacccggtctcaactcccacgagatctcatgcgagggccaagcgccaacgccacaattcaagctagacctgttacaccaccgctgccatacagaacgctcccacgaggcaaggacacatcaggtgtgccacctaacaaaaccattttggtgattcgaagactccgccttcgtctcttcttttcaacatttggaccatagccccaaaccgtcacaattgagcttgcgttggaagaaaagaataaggtcaacaagatcccggttgtatactgcgccgtgtcgcgggggattctttttgcgcaactccgtgcaaccggacacagtccgtcccgagaacggcttctgtctctaaaataatctgttctgccaccgactggcgcacggaacgtggtaaagaaactcatccggcagccagcaggcgacgtgctgcatgatatgtacgagcccaaaagcgtgtagcgcccccgcctggatattgggaggtttcgctcgaggatattgttcgaaattggtggatacaacaaattaaaatgtcggcgtcaagccacccggcgtcctctcgccatcgcaatgcctccctcagctcggccggtcggtcgtccaagaagagtcaattgacagcagagccgaaagattttacttcacctggcgctttaatgagatttttcgagccaacggtagcgacagcttctatgttgctatatgcgcagggctcgtcagtagtagtcgcacaccatgacaccctaacgatcgaaagacgcttcgcacggcattcagccgaagtccaactacttgctgtcgacacagttagcgaccagggatccggaagaatggccgttagttacgatgtggatatgacatgtataatatgggatttgatgaccggcgacgagataactcggttctcatcatacgagcctatgacatgtgcgacatggatgaaaaatggaaacgtagcttttggcaactcacagggcagcgtcattcttttcgagcctgcaacttcggaacacatatctgcacgaaccatagaccaaatcgccatcactgcgttggcacccgctgctgactgtagaacgtttgctataggataccaaaatggctctttgattattgccacattacaaccaaggtttacgatattgcaaaatctgagcacttcaagagcaccatcgccaatagtaaatctcgcttggcatgcatcatcttcacgccaaaaatcggacatgttggcggtccagactaatgacggagatctacgagtatggagtgtgccgaaatcatacaatagcgatgatcccgccaaggtcgtacgaatcctaaagcgcaatgaaatttatcaaaatggtcccaactggatgggatggtcaaaaaatggtcgcattatccagtttgcagataacgagactctatcatgggatgtccgaaccaaacacgtcacatacgatagtataccgactcttgaacatgtccgcggtctcgccgtgtacggacccggtgcgaccttgttcactcttggtgccaacaacacagtgcagcaattcgacctcaacacaccgtcgatgatggtttcgaatgttcaacatcctgccaatcttttgccaccgtcgccaccagtttccatcgaggagcaagtcgagcaaggtattgtcatcatcggaacagagtcggactcatctattcccgtcaatgcggaaatttccgaaagtgacgatgatcatctctcacctttggctcgaatggtgcgtggtactgatgctgcaaacgacccgattgatcaagacaggtacatgtctgctagtccggcttctaccaagagttccactatttcacgggagtctaccaactctggcaccgaaggtcgctaccaaccatcagtgcgatcacggggaatgactgagaatacttacatttcagctgggtcttctcttcggtcatctgtgaagccaccaccatttggagacagggatgcatactcgattagtagtgtcagctcggcttccatcacatcgtcatctcgctcacggccaaagccctcaagattacgaaatgaggtcttgactagccctgctgatgacaaagtgcacgatctgtttaagttcacaaggagtcgactccatgatgtcccctacaagcgagtgccactccatgaccagagccgattaaccaatgatgacctccgccggcagatgctcagcatcatattcggatggaatggagagatggaggatcttgttcgcgatgaaatgttgcggcatccgaatggttctgcaagccgtatcctactcgccaagtggcttggagacatcgatgctgatgtgatgactgctactgcggagaatatgacttcttcggattggatgttgttggccctcagcggtataggtggtcaagcctcgcaacacaagctaggccgtgcttttgtgcaaagactcctggaaaacaatgatgtgcacactgctgcaacgatcatgattggaatgggcgatcacaacgacgctatcgaaatttacgtgtcgcacaagaaatacctcgaagctatcgtacttctttgcctgttcttctcaaccgtatgggagcgccaggcccagatcatcaagaaatggggcgaatttgcggtacaacacggccaacaagcgctggctattcgatgctttgcttgtactggcgttgaagcctcagagccctggtcctcgccatcagctgcgcaagtgacctttcaaagcctcaaccaaagcattccggaaattttgagtccacccctttctccccccgggctcaatcgggggcctcaacgcagtattgcaaagagttcggctttgaaattgattaccaccttcgaagacaagggacagaaatcaaaattcttctctggtgatggaggaaagacgcccattgcagctggcgtgacgcctatcgccgaatcagccatatcccctggaggatatgacccaagcactgcttttcttcgaccttcaggacgaagtgcattcaacacgccctcttcggctaagcctacgactccaggtggctttggaagacaacgattgccttctattggagaggtgcccgctgacggttccaaacgccaaacagcaagaggactagctcctgctgagcaagcggacatcgttgttgaccctggccgcgctcatcgtgcagagcattctcgtcaaggatctggtgaccatttcaacattggaatgtctcttggccgggcttccacggcgagccccatgatgatgagggatagccatcgtcgcaaggatccagctccgccttctccgaacccagaatcactacaagctctgatgcagcagggtcgctcaagccgaaatggcgcgcgggaacgaaaacccgaaggaatggcacttcaactcgattctctaaacacagctgtggctagtgatgtgacttcgcctgagcagtccgttgcttcttcgactcgtttccactggccaactcgtaccggaagacgtggaccaggctccgttgctagttctgtcacgtccaactcgagtgctggtcgaagctatcgaagccatcgtggccagcatggccaggctgttacgaagaacctgaccaactatatccactcactggaaactgctcaggacttctccaaaaagcagcgtagccgtgagagcagtcgccatcgccaggaagagcgatctggccgtagccgagataatagccgaagtcgcaaggcagggagagatggttctgaagagagaggtcgaggagcatctagaaactatactcctaagccagccaagcgctccccaaccctctcctatccccatgtcgcctgaggaattgatcaacctcagcactccacgacagctagatgctcaactgactgacgaaggagtcgctccgttgacccttgataacgctccttctactgtccgtaagtcaagtcagattcgcaggacagattaccgcacttcgagtcggacatcaagccatgctagccgccaaaagagtcgcgagcggcggccgccagcacttgaactccgaggacgaagccaaagccgtggtgatgggtctgtcgtacgatcgccctcatcacccttgcccatgtcttctcagatgaaattctactctggctctgacgacgaagctgattaccgtgctgcaatcgaggcgcaagagcaattccgagcccgtcacaaccgtagcaaggatcccacttcaccggctgtctcacgagcccgggatcgctcggagagtcgcaagcggaaaaataagacccctggtgaactggagcctcctgtcccaacacagtctagaggcgaaaatcgatcgagaggagagaaccatgtagagaagcctcatgctggtgacttgaagcgaatctcgcttgacagacaacagaagaaagaggctgctgctcgtgagctcgaagaacgccgaaagtctcttgctcggcgtccatctgcacctccaattcctcatcccgaggatctatctccggtcatctcgcggtcacccagcgttttcgagcttccccagacgactttcgttccaccacaggatgttccaacacgaagtcatacagccgacccggctcgcaaatctacaagcatgcgcagcccaaatgcccctttcatcggtctacctgcaacgcctaaggccatgagacttcagtttcagagcggagcccagcctgctgtgcctcagattcccgcagcccacaggaaatctcccccgtcttccggacaaccttctccaaataagtctggcaacaactcgccggccaagacgcccggagacgagccgtctctgctgaccctgctaccctctactgtctattcgccaccaacgaggccaaacatccagagatgcatgtctgcacccatccctgaagagccaccagctcctccttccgtaggcttgcctgctcaccctgctttccaacaaggcatgcaagccggcaatcagccgcctcgacgcggatccatcagcgctcgaaagatgagtgccgatgccacaatcggcatgcgaggcatcgatgagattatcggtggtggtagacactcgaggaatccctctcgtgatgacatcccaccccctccgccgccacctccagtcatgctgaaggagctccagcacctagctacgcctcctccaccaccacccgcaccaatgcctggattacgaccaactgtatatggtggccctaccgtctctggctccatcgagatcgtcatggacgacgaggaagaggcagtcccaactgccgctcccatgcacgaatcaacagtgcccatcatcgcccctccagcgcccccatcatcgcggaacgggcacaatcggggccgcagcatcaccgacaaggacaatagtattgccagtcgcatcagccgcgccaccgagcgcattcgttccgccagtcgtggacgaagcaactctgtcttagccagccgcaccaaatcgccaacggagacgtcgccttatgagagcgtgcctcctctagtgccatcggttcccgctggctatagtactagtcctcctccacagactgagcgtcaccccatggaagtgcgagccctctatcagcagcaacaggaagttggcagcggacttcatcagagcgagatgatctaagcacttcgcatccgttcttcctttctatactttccattcctccacttttcgcaatgaattctacctgcccatttgattttggacagctgctttctcatctttgggatccattatatacgacgcatatactgcatggcgccggcgtttaacacgagcctttcgattctctccattcgatacctccattgataccagacaccttcatccatcagattcgcacaacctcatagactcacggagcaccacaccacaagcaccgctgctcttcgcttcgcaattgtacttcataactatccttcatacaccatctatacctgcgtatttatcggctcccctaatacctcacttcattcctgcattattggtgatggttttcgaagcggcttgatttattcttcgtacttcgacctcgttatattccgcacgcatttgcatcatgattcacgacaaaccagacacacgaccacgacggggagatacagaaaagaaaacttcaagaagaagaaacgaaatttgaacatgaatatgggaaacagagaaacaactgccacgcggcaattgtacagaatgacagttaccttaacatgagaagaggaaaggagggagagaagggtctcacgtgaaaagaaaaatttacttgcctcgcggcaatctatctgttgttgatttcctgggcgatttacttatcatgcttcatttcttacttctcgttagctagtagtggtcatttgatgaggagggatttggatcagtctaggtgcatttagcaactgcaattcttaatgcctggttatttgacactctctatgtctgtatatggtcgcatgctggtgatatgtcacctgtatgtatctgagaatgaatgcacgaagcatgcaattagc

SEQ ID NO: 7016 - DNA, 702 bp, Muscodor strobelii
  misc_feature: SGI cDNA ID NO. 562094
  misc_feature: Encodes the peptide sequence at SEQ ID NO 7017
atgttgacaacagcgccatacctccgcatcaggcgcccctcgcccaccgccgtcgaattcaccgtctcgaccctcccaccactgaccacacccctccgcctcggtctatacgccatcaacatcgtacgcagcatcttatgtagctggatactcctcgtcctctacgcaatctacacgcatttctcccaaacaccgacctccaccacctcccgcccaccatcacatcggccatcgacatcgtcaataccattcctctcctccacaaaactcgaagcgatgctcgcctacctcttatccacaaccccagggagtctcgcaaccaaactggcaacctccgccgtcccagtccagatcctcatccctctctgtctgggagcattatacatcctcaccctgcgtttatacaccgaggaatccctcttagtgctcaggggtttaggaatccagacaaaatctagcaagacgtcactcctcactggccaagccacgacgaggttcataccgacgcagaagatacaggatattctcatcaatgaggcgttttgggggtttggcgtcaagcattgtctaatcgttgttgtggaggaggaggaagatgttgtgcttgtgtttccgaaactgcttccgagggcgaaagtgctggagagggtttggaggggggtaagggagtgtctttatgaggatggggagggcaagggttga

SEQ ID NO: 7017 - protein, 233 aa, Muscodor strobelii
  misc_feature: SGI Peptide ID NO. 562094
  misc_feature (1)..(229): NCBI GI: 85083862 Blast Desc: NCU01783 [Neurospora crassa OR74A] gi|18376135|emb|CAD21200.1| conserved [Neurospora crassa] gi|28918293|gb|EAA27970.1| [Neurospora crassa OR74A]
  misc_feature (1)..(233): NCBI GI: 256729110 Blast Desc: NECHADRAFT_39802 [Nectria haematococca mpVI 77-13-4]
  misc_feature (13)..(229): NCBI GI: 261356693 Blast Desc: conserved [Verticillium albo-atrum VaMs.102]
  misc_feature (8)..(227): NCBI GI: 261201019 Blast Desc: phosphatidylinositol N-acetylglucosaminyltransferase [Ajellomyces dermatitidis SLH14081] gi|239593982|gb|EEQ76563.1| phosphatidylinositol N-acetylglucosaminyltransferase [Ajellomyces
  misc_feature (8)..(227): NCBI GI: 239607142 Blast Desc: phosphatidylinositol N-acetylglucosaminyltransferase [Ajellomyces dermatitidis ER-3]
  misc_feature (1)..(232): NCBI GI: 46138643 Blast Desc: FG10836.1 [Gibberella zeae PH-1]
  misc_feature (7)..(229): NCBI GI: 238838093 Blast Desc: conserved [Microsporum canis CBS 113480]
  misc_feature (8)..(227): NCBI GI: 240278983 Blast Desc: phosphatidylinositol N-acetylglucosaminyltransferase [Ajellomyces capsulatus H143]
  misc_feature (8)..(227): NCBI GI: 225560229 Blast Desc: conserved [Ajellomyces capsulatus G186AR]
  misc_feature (7)..(227): NCBI GI: 119490945 Blast Desc: NFIA_064000 [Neosartorya fischeri NRRL 181] gi|119411293|gb|EAW21236.1| NFIA_064000 [Neosartorya fischeri NRRL 181]
MLTTAPYLRIRRPSPTAVEFTVSTLPPLTTPLRLGLYAINIVRSILCSWILLVLYAIYTHFSQTPTSTTSRPPSHRPSTSSIPFLSSTKLEAMLAYLLSTTPGSLATKLATSAVPVQILIPLCLGALYILTLRLYTEESLLVLRGLGIQTKSSKTSLLTGQATTRFIPTQKIQDILINEAFWGFGVKHCLIVVVEEEEDVVLVFPKLLPRAKVLERVWRGVRECLYEDGEGKG

SEQ ID NO: 7018 - DNA, 3217 bp, Muscodor strobelii
  misc_feature: SGI EST ID NO. CUFF.17799.0
  misc_feature: Variant of the nucleotide sequence at SEQ ID NO 7016
ccgccctgtcgctcctctgcctgtgaaggacgcaatagaggtcgtgaacgctgtggagggagctgtctcaacgccactgttttctactgagaaatgaagctatcatcaagtccattcgcctcttaattgtgtgtctaggcctgaccatgttccttctatattctcacaatatgcagtcaatgcaatgatgtagcatcggccccttcgatttattcgcagctctttcgcctagaacaaaacaccgaaacatctgttcacgatgttgacaacagcgccatacctccgcatcaggcgcccctcgcccaccgccgtcgaattcaccgtctcgaccctcccaccactgaccacacccctccgcctcggtctatacgccatcaacatcgtacgcagcatcttatgtagctggatactcctcgtcctctacgcaatctacacgcatttctcccaaacaccgacctccaccacctcccgcccaccatcacatcggccatcgacatcgtcaataccattcctctcctccacaaaactcgaagcgatgctcgcctacctcttatccacaaccccagggagtctcgcaaccaaactggcaacctccgccgtcccagtccagatcctcatccctctctgtctgggagcattatacatcctcaccctgcgtttatacaccgaggaatccctcttagtgctcaggggtttaggaatccagacaaaatctagcaagacgtcactcctcactggccaagccacgacgaggttcataccgacgcagaagatacaggatattctcatcaatgaggcgttttgggggtttggcgtcaagcattgtctaatcgttgttgtggaggaggaggaagatgttgtgcttgtgtttccgaaactgcttccgagggcgaaagtgctggagagggtttggaggggggtaagggagtgtctttatgaggatggggagggcaagggttgagatagatggactgatgggttgttctgtttgtaagatgcatagcgtggcgtttgggatgactaggtattgtgtttgcattgcatgttttgagatggatctaatatggttaatcacccggatagaaaatttgggcgtccagtatatacaaatgactgcgatatatccagtgctatgcaaggcatctgattcgatcaacgggtttcccctatgttgtccaatctacctctcacgtcgacttctcgctattcgtagcagcagcagtagtggcagtagtggcagtagcgatagcctcagccctcctttcctcaatgacccgcctcatatcctcagaattctcaaacccctttctcttcgcctctttatcgttcgcctcctgcggcgtcatgagtctcgtcttcgagagcacaggcgggtatttgcccacgaatctgcccttattgtgtccctcaaacatcttctggctgctgggcgcgtacttgggtgctctgggatccaatctcgcatgaatatcagtctgcgatgtaatcacgtctagtaattgaccggcgagtaattcatcgattttgcgttcccgccagacctcccacatgtggtctacagtacccgaggcgccatgggccatcagggggttgtcggacccgaggtatatccagtccatgccatctgcgcgatcggggtcgtcgaggtctttgggaaatatgcagtcccatagtacgaggggggtctcgtttgcgaggacgtagtttggtcgtcggggctcggcttcgatgtctaggaggcgatcgatgatgcttgcgtcttcgagaccttgccctaccatgaagagtagagcgaccatgcatcggatttgatgccataggaacgcggagccgcggacgtggaagtagtacacctttgggtagacttctgttgattccggcgcggcttcggctgtagtgcttggtggtcctggtgatgatgacaatggtgcgaattctgaggatgagagatagggaagtgctgaatcggcatcttttacttctacgatagaactttcgaatatcctgcggtcgaagttcgtgagctgctttgagccatcgattttgcagaagtttcggaagtcgtggagtccctcgtattttttggccgcgacgcgcattgcttcgatatctaaccacccatcttgtggtttcttgctgtcggtagctttaggatcttgcagactcttcggtagcggtgcatatgctggctgtgtgaagaagtaccggtattgtcgctctcgacagtgatggcgagctgagaaatcggctggagttgttgggcaccaggcgaggattctgatatctggtggcaagagcctattcaggatacgtgggtattgtatctcgtctgtgaggtcattccactccttttttggcttcggtccttcttctggcgcatccgtcatctcctggtcggggctgtcttttgatgcgctcgtcccctcggcagcgccaccctctgtagcaacatctgtcggtacctcctccttgggcaaaggtttgttactcctaagcctaatgctgatgacctgaccaaaggcactcacaccacggtctgtccttccacatttcgagtactcccacggttcgaagttgacctcgtccggattctccggaaatatgagacaagcccttgtcagagccttccacagttcctcctcgatagtcacagtggcgtggcgctgatactcaaagccgccataattcttgcctagatacgctagcttcagcgcgacgagtctcgtagagtacttggacggatccattttgcgctccgacttcttcttcttcctcggtggttccgcagtgtcgtccgccacctctttcgcctctaatctcgcttctgaaggcttctctgcggaaaatggtgcaggcgcagccccttctcttttacttaggtcattttccaaagccttaatacgggtgaccagggcatctttcgtccaccgcgcgtagtctgttggattttccctcatgatgcgcagcttttccttcttgatcctagagtttttcttgttcgcgatgaaccctgtggagaatctgcacgtttgaaatgcaatggtgatttctgcagctatccgttgcggcaagctacggggacgcaagctgcgacatccactggcaagggaccacatgcacctatgtgcaggataccatgctgatgagataattgaatatgtcgaagagccaataaaatcaccatgtcattctttccgcttaaaacattggatgcttc

SEQ ID NO: 7019 - DNA, 1770 bp, Muscodor strobelii
  misc_feature: SGI cDNA ID NO. 562095
  misc_feature: Encodes the peptide sequence at SEQ ID NO 7020
atgagggaaaatccaacagactacgcgcggtggacgaaagatgccctggtcacccgtattaaggctttggaaaatgacctaagtaaaagagaaggggctgcgcctgcaccattttccgcagagaagccttcagaagcgagattagaggcgaaagaggtggcggacgacactgcggaaccaccgaggaagaagaagaagtcggagcgcaaaatggatccgtccaagtactctacgagactcgtcgcgctgaagctagcgtatctaggcaagaattatggcggctttgagtatcagcgccacgccactgtgactatcgaggaggaactgtggaaggctctgacaagggcttgtctcatatttccggagaatccggacgaggtcaacttcgaaccgtgggagtactcgaaatgtggaaggacagaccgtggtgtgagtgcctttggtcaggtcatcagcattaggcttaggagtaacaaacctttgcccaaggaggaggtaccgacagatgttgctacagagggtggcgctgccgaggggacgagcgcatcaaaagacagccccgaccaggagatgacggatgcgccagaagaaggaccgaagccaaaaaaggagtggaatgacctcacagacgagatacaatacccacgtatcctgaataggctcttgccaccagatatcagaatcctcgcctggtgcccaacaactccagccgatttctcagctcgccatcactgtcgagagcgacaataccggtacttcttcacacagccagcatatgcaccgctaccgaagagtctgcaagatcctaaagctaccgacagcaagaaaccacaagatgggtggttagatatcgaagcaatgcgcgtcgcggccaaaaaatacgagggactccacgacttccgaaacttctgcaaaatcgatggctcaaagcagctcacgaacttcgaccgcaggatattcgaaagttctatcgtagaagtaaaagatgccgattcagcacttccctatctctcatcctcagaattcgcaccattgtcatcatcaccaggaccaccaagcactacagccgaagccgcgccggaatcaacagaagtctacccaaaggtgtactacttccacgtccgcggctccgcgttcctatggcatcaaatccgatgcatggtcgctctactcttcatggtagggcaaggtctcgaagacgcaagcatcatcgatcgcctcctagacatcgaagccgagccccgacgaccaaactacgtcctcgcaaacgagacccccctcgtactatgggactgcatatttcccaaagacctcgacgaccccgatcgcgcagatggcatggactggatatacctcgggtccgacaaccccctgatggcccatggcgcctcgggtactgtagaccacatgtgggaggtctggcgggaacgcaaaatcgatgaattactcgccggtcaattactagacgtgattacatcgcagactgatattcatgcgagattggatcccagagcacccaagtacgcgcccagcagccagaagatgtttgagggacacaataagggcagattcgtgggcaaatacccgcctgtgctctcgaagacgagactcatgacgccgcaggaggcgaacgataaagaggcgaagagaaaggggtttgagaattctgaggatatgaggcgggtcattgaggaaaggagggctgaggctatcgctactgccactactgccactactgctgctgctacgaatagcgagaagtcgacgtga

SEQ ID NO: 7020 - protein, 589 aa, Muscodor strobelii
  misc_feature: SGI Peptide ID NO. 562095
  misc_feature (83)..(244): Pfam Id: PF01416 Pfam Desc: tRNA pseudouridine synthase
  misc_feature (290)..(435): Pfam Id: PF01416 Pfam Desc: tRNA pseudouridine synthase
  misc_feature (371)..(435): Pfam Id: PF01416 Pfam Desc: tRNA pseudouridine synthase
  misc_feature (1)..(589): NCBI GI: 18376136 Blast Desc: related to pseudouridine synthase 3 [Neurospora crassa]
  misc_feature (1)..(589): NCBI GI: 85083865 Blast Desc: NCU01784 [Neurospora crassa OR74A] gi|28918294|gb|EAA27971.1| conserved [Neurospora crassa OR74A]
  misc_feature (6)..(569): NCBI GI: 46138645 Blast Desc: FG10837.1 [Gibberella zeae PH-1]
  misc_feature (6)..(560): NCBI GI: 256728923 Blast Desc: [Nectria haematococca mpVI 77-13-4]
  misc_feature (70)..(561): NCBI GI: 116199417 Blast Desc: CHGG_07864 [Chaetomium globosum CBS 148.51] gi|88179143|gb|EAQ86611.1| CHGG_07864 [Chaetomium globosum CBS 148.51]
  misc_feature (6)..(571): NCBI GI: 156040419 Blast Desc: SS1G_12226 [Sclerotinia sclerotiorum 1980] gi|154696282|gb|EDN96020.1| SS1G_12226 [Sclerotinia sclerotiorum 1980]
  misc_feature (6)..(553): NCBI GI: 154320712 Blast Desc: BC1G_01828 [Botryotinia fuckeliana B05.10] gi|150853517|gb|EDN28709.1| BC1G_01828 [Botryotinia fuckeliana B05.10]
  misc_feature (7)..(559): NCBI GI: 171689408 Blast Desc: protein product [Podospora anserina] gi|170944666|emb|CAP70777.1| protein product [Podospora anserina]
  misc_feature (7)..(559): NCBI GI: 145606084 Blast Desc: MGG_06675 [Magnaporthe grisea 70-15] gi|145013810|gb|EDJ98451.1| MGG_06675 [Magnaporthe grisea 70-15]
  misc_feature (3)..(557): NCBI GI: 225681814 Blast Desc: pseudouridylate synthase [Paracoccidioides brasiliensis Pb03]
  misc_feature (81)..(409): SWISSPROT Homolog: EC 5.4.99.12 tRNA-pseudouridine synthase I
MRENPTDYARWTKDALVTRIKALENDLSKREGAAPAPFSAEKPSEARLEAKEVADDTAEPPRKKKKSERKMDPSKYSTRLVALKLAYLGKNYGGFEYQRHATVTIEEELWKALTRACLIFPENPDEVNFEPWEYSKCGRTDRGVSAFGQVISIRLRSNKPLPKEEVPTDVATEGGAAEGTSASKDSPDQEMTDAPEEGPKPKKEWNDLTDEIQYPRILNRLLPPDIRILAWCPTTPADFSARHHCRERQYRYFFTQPAYAPLPKSLQDPKATDSKKPQDGWLDIEAMRVAAKKYEGLHDFRNFCKIDGSKQLTNFDRRIFESSIVEVKDADSALPYLSSSEFAPLSSSPGPPSTTAEAAPESTEVYPKVYYFHVRGSAFLWHQIRCMVALLFMVGQGLEDASIIDRLLDIEAEPRRPNYVLANETPLVLWDCIFPKDLDDPDRADGMDWIYLGSDNPLMAHGASGTVDHMWEVWRERKIDELLAGQLLDVITSQTDIHARLDPRAPKYAPSSQKMFEGHNKGRFVGKYPPVLSKTRLMTPQEANDKEAKRKGFENSEDMRRVIEERRAEAIATATTATTAAATNSEKST

SEQ ID NO: 7021 - DNA, 3217 bp, Muscodor strobelii
  misc_feature: SGI EST ID NO. CUFF.17799.0
  misc_feature: Variant of the nucleotide sequence at SEQ ID NO 7019
gaagcatccaatgttttaagcggaaagaatgacatggtgattttattggctcttcgacatattcaattatctcatcagcatggtatcctgcacataggtgcatgtggtcccttgccagtggatgtcgcagcttgcgtccccgtagcttgccgcaacggatagctgcagaaatcaccattgcatttcaaacgtgcagattctccacagggttcatcgcgaacaagaaaaactctaggatcaagaaggaaaagctgcgcatcatgagggaaaatccaacagactacgcgcggtggacgaaagatgccctggtcacccgtattaaggctttggaaaatgacctaagtaaaagagaaggggctgcgcctgcaccattttccgcagagaagccttcagaagcgagattagaggcgaaagaggtggcggacgacactgcggaaccaccgaggaagaagaagaagtcggagcgcaaaatggatccgtccaagtactctacgagactcgtcgcgctgaagctagcgtatctaggcaagaattatggcggctttgagtatcagcgccacgccactgtgactatcgaggaggaactgtggaaggctctgacaagggcttgtctcatatttccggagaatccggacgaggtcaacttcgaaccgtgggagtactcgaaatgtggaaggacagaccgtggtgtgagtgcctttggtcaggtcatcagcattaggcttaggagtaacaaacctttgcccaaggaggaggtaccgacagatgttgctacagagggtggcgctgccgaggggacgagcgcatcaaaagacagccccgaccaggagatgacggatgcgccagaagaaggaccgaagccaaaaaaggagtggaatgacctcacagacgagatacaatacccacgtatcctgaataggctcttgccaccagatatcagaatcctcgcctggtgcccaacaactccagccgatttctcagctcgccatcactgtcgagagcgacaataccggtacttcttcacacagccagcatatgcaccgctaccgaagagtctgcaagatcctaaagctaccgacagcaagaaaccacaagatgggtggttagatatcgaagcaatgcgcgtcgcggccaaaaaatacgagggactccacgacttccgaaacttctgcaaaatcgatggctcaaagcagctcacgaacttcgaccgcaggatattcgaaagttctatcgtagaagtaaaagatgccgattcagcacttccctatctctcatcctcagaattcgcaccattgtcatcatcaccaggaccaccaagcactacagccgaagccgcgccggaatcaacagaagtctacccaaaggtgtactacttccacgtccgcggctccgcgttcctatggcatcaaatccgatgcatggtcgctctactcttcatggtagggcaaggtctcgaagacgcaagcatcatcgatcgcctcctagacatcgaagccgagccccgacgaccaaactacgtcctcgcaaacgagacccccctcgtactatgggactgcatatttcccaaagacctcgacgaccccgatcgcgcagatggcatggactggatatacctcgggtccgacaaccccctgatggcccatggcgcctcgggtactgtagaccacatgtgggaggtctggcgggaacgcaaaatcgatgaattactcgccggtcaattactagacgtgattacatcgcagactgatattcatgcgagattggatcccagagcacccaagtacgcgcccagcagccagaagatgtttgagggacacaataagggcagattcgtgggcaaatacccgcctgtgctctcgaagacgagactcatgacgccgcaggaggcgaacgataaagaggcgaagagaaaggggtttgagaattctgaggatatgaggcgggtcattgaggaaaggagggctgaggctatcgctactgccactactgccactactgctgctgctacgaatagcgagaagtcgacgtgagaggtagattggacaacataggggaaacccgttgatcgaatcagatgccttgcatagcactggatatatcgcagtcatttgtatatactggacgcccaaattttctatccgggtgattaaccatattagatccatctcaaaacatgcaatgcaaacacaatacctagtcatcccaaacgccacgctatgcatcttacaaacagaacaacccatcagtccatctatctcaacccttgccctccccatcctcataaagacactcccttacccccctccaaaccctctccagcactttcgccctcggaagcagtttcggaaacacaagcacaacatcttcctcctcctccacaacaacgattagacaatgcttgacgccaaacccccaaaacgcctcattgatgagaatatcctgtatcttctgcgtcggtatgaacctcgtcgtggcttggccagtgaggagtgacgtcttgctagattttgtctggattcctaaacccctgagcactaagagggattcctcggtgtataaacgcagggtgaggatgtataatgctcccagacagagagggatgaggatctggactgggacggcggaggttgccagtttggttgcgagactccctggggttgtggataagaggtaggcgagcatcgcttcgagttttgtggaggagaggaatggtattgacgatgtcgatggccgatgtgatggtgggcgggaggtggtggaggtcggtgtttgggagaaatgcgtgtagattgcgtagaggacgaggagtatccagctacataagatgctgcgtacgatgttgatggcgtatagaccgaggcggaggggtgtggtcagtggtgggagggtcgagacggtgaattcgacggcggtgggcgaggggcgcctgatgcggaggtatggcgctgttgtcaacatcgtgaacagatgtttcggtgttttgttctaggcgaaagagctgcgaataaatcgaaggggccgatgctacatcattgcattgactgcatattgtgagaatatagaaggaacatggtcaggcctagacacacaattaagaggcgaatggacttgatgatagcttcatttctcagtagaaaacagtggcgttgagacagctccctccacagcgttcacgacctctattgcgtccttcacaggcagaggagcgacagggcgg

SEQ ID NO: 7022 - DNA, 576 bp, Muscodor strobelii
  misc_feature: SGI cDNA ID NO. 562096
  misc_feature: Encodes the peptide sequence at SEQ ID NO 7023
atggaagagtacactgttaagattctgttactgggcgatgagaaagtaggaaagacgacactcttatctcgcattagcggaggcgggcattcacttgagggcaaaacaccaatcacaatattacgagacatagatcagccattcatcttcgaaatcagaaataggaagggcaaatttcgtcttgaattctatgacacagccagcccagagaactggcgattactcgaaccagatgtagtccttatatgctatgacatttccagtcgatcaagtatggtcaacatcgagcaactttggagtaaagaagtccgcaacagcttccgcacaagcgatcaggtccccatagtggttgtcggtctgaagagggatttgaggtctgatgacgatccaaacaagccgatatatcctcaggaggggtacagggcatcacaagagatccgggcagataagtatgtcgaatgttccgcggtgacgggtgagcttctcaagttggcatttgaggagatttgtcggacggctatacaaacagtatcggaatccggtgggcaaagtgagggcggatgcgccgtgatatga

SEQ ID NO: 7023 - protein, 191 aa, Muscodor strobelii
  misc_feature: SGI Peptide ID NO. 562096
  misc_feature (7)..(123): Pfam Id: PF08477 Pfam Desc: Miro-like protein
  misc_feature (7)..(175): Pfam Id: PF00071 Pfam Desc: Ras family
  misc_feature (78)..(175): Pfam Id: PF00071 Pfam Desc: Ras family
  misc_feature (1)..(191): NCBI GI: 171689406 Blast Desc: protein product [Podospora anserina] gi|170944665|emb|CAP70776.1| protein product [Podospora anserina]
  misc_feature (1)..(191): NCBI GI: 256729109 Blast Desc: NECHADRAFT_69058 [Nectria haematococca mpVI 77-13-4]
  misc_feature (1)..(191): NCBI GI: 18376137 Blast Desc: related to transforming protein rho [Neurospora crassa]
  misc_feature (3)..(191): NCBI GI: 67525427 Blast Desc: AN3171.2 [Aspergillus nidulans FGSC A4] gi|40744566|gb|EAA63742.1| AN3171.2 [Aspergillus nidulans FGSC A4] gi|259485873|tpe|CBF83266.1| TPA: Rho-like small GTPase, FGSC
  misc_feature (2)..(191): NCBI GI: 145233363 Blast Desc: An02g09210 [Aspergillus niger] gi|134056982|emb|CAK44329.1| protein product [Aspergillus niger]
  misc_feature (2)..(190): NCBI GI: 238489665 Blast Desc: Rho-like small GTPase, [Aspergillus flavus NRRL3357] gi|220698458|gb|EED54798.1| Rho-like small GTPase, [Aspergillus flavus NRRL3357]
  misc_feature (2)..(191): NCBI GI: 212526854 Blast Desc: Rho-like small GTPase, [Penicillium marneffei ATCC 18224] gi|210072982|gb|EEA27069.1| Rho-like small GTPase, [Penicillium marneffei ATCC 18224]
  misc_feature (2)..(191): NCBI GI: 242781973 Blast Desc: Rho-like small GTPase, [Talaromyces stipitatus ATCC 10500] gi|218720055|gb|EED19474.1| Rho-like small GTPase, [Talaromyces stipitatus ATCC 10500]
  misc_feature (2)..(190): NCBI GI: 169763708 Blast Desc: [Aspergillus oryzae RIB40] gi|83770782|dbj|BAE60915.1| protein product [Aspergillus oryzae]
  misc_feature (5)..(191): NCBI GI: 255938177 Blast Desc: Pc13g14520 [Penicillium chrysogenum Wisconsin 54-1255] gi|211584479|emb|CAP92521.1| Pc13g14520 [Penicillium chrysogenum Wisconsin 54-1255]
MEEYTVKILLLGDEKVGKTTLLSRISGGGHSLEGKTPITILRDIDQPFIFEIRNRKGKFRLEFYDTASPENWRLLEPDVVLICYDISSRSSMVNIEQLWSKEVRNSFRTSDQVPIVVVGLKRDLRSDDDPNKPIYPQEGYRASQEIRADKYVECSAVTGELLKLAFEEICRTAIQTVSESGGQSEGGCAVI

SEQ ID NO: 7024 - DNA, 1404 bp, Muscodor strobelii
  misc_feature: SGI EST ID NO. CUFF.17828.0
  misc_feature: Variant of the nucleotide sequence at SEQ ID NO 7022
ttctgatcattatcaaatactatcatttatacttacatattaaccgatctactgtcgttacgagtcaatggaagagtacactgttaagattctgttactgggcgatgagaaagtaggaaagacgacactcttatctcgcattagcggaggcgggcattcacttgagggcaaaacaccaatcacaatattacgagacatagatcagccattcatcttcgaaatcagaaataggaagggcaaatttcgtcttgaattctatgacacagccagcccagagaactggcgattactcgaaccagatgtagtccttatatgctatgacatttccagtcgatcaagtatggtcaacatcgagcaacttgtaaagcctctaccccccttattcattccccgtgcctcaggctgactcttttcttggtagtggagtaaagaagtccgcaacagcttccgcacaagcgatcaggtccccatagtggttgtcggtctgaagagggatttgaggtctgatgacgatccaaacaagccgatatatcctcaggaggggtacagggcatcacaagagatccgggcagataagtatgtcgaatgttccgcggtgacgggtgagcttctcaagttggcatttgaggagatttgtcggacggctatacaaacagtatcggaatccggtgggcaaagtgagggcggatgcgccgtgatatgagtgccgtaggtagacagagtgataaaagaccttcgtgtgttgatggacgcgtctcgattttgatcgccagtcttcatgatccatcctcctcacaatccatctcatcatctccctcttgaaccgggtgctgaccaaggacttcgatgatgatgttgaggatatcctcctgttgttcatccgtgaagcgctgcatcatatcctcaatgaccaaattgagcgtgacgggagaggtcgggcgcaagttcacaatcatgatacactcgcccttgctgatgccaaattggcgcagcttctgaataagcggggggattgcagaggcttcataggcctgaggcttctggctaaggggaccggggaaggtctcaagatacttgatcacctgtgtgactgtcaatttgaatgcgcaaatgaagccctttgttctgaaattcgtacctcgccgcgtagcatctccaagtttggcgggccgcgtcgcttctgggcttggtactgctgagcctggtccttcaagaagctgcagacctcgacattggtcaagacggcgctttgcgcctccaggatcctcatgatggcaaagatcgattcttctttcagtaactaagagactgctgaatctagctgtatccgaaatgtgcaaagcagtcaatgttttgctccgtgcttagcaatgagatatgatcgtgtgaatgggcttgtggtca

SEQ ID NO: 7025 - DNA, 438 bp, Muscodor strobelii
  misc_feature: SGI cDNA ID NO. 562097
  misc_feature: Encodes the peptide sequence at SEQ ID NO 7026
atgaggatcctggaggcgcaaagcgccgtcttgaccaatgtcgaggtctgcagcttcttgaaggaccaggctcagcagtaccaagcccagaagcgacgcggcccgccaaacttggagatgctacgcggcgaggtgatcaagtatcttgagaccttccccggtccccttagccagaagcctcaggcctatgaagcctctgcaatccccccgcttattcagaagctgcgccaatttggcatcagcaagggcgagtgtatcatgattgtgaacttgcgcccgacctctcccgtcacgctcaatttggtcattgaggatatgatgcagcgcttcacggatgaacaacaggaggatatcctcaacatcatcatcgaagtccttggtcagcacccggttcaagagggagatgatgagatggattgtgaggaggatggatcatga

SEQ ID NO: 7026 - protein, 145 aa, Muscodor strobelii
  misc_feature: SGI Peptide ID NO. 562097
  misc_feature (1)..(122): Pfam Id: PF09417 Pfam Desc: RNA polymerase III subunit C17
  misc_feature (1)..(128): NCBI GI: 46138649 Blast Desc: FG10839.1 [Gibberella zeae PH-1]
  misc_feature (1)..(130): NCBI GI: 261356691 Blast Desc: conserved [Verticillium albo-atrum VaMs.102]
  misc_feature (1)..(127): NCBI GI: 256728922 Blast Desc: NECHADRAFT_80046 [Nectria haematococca mpVI 77-13-4]
  misc_feature (1)..(145): NCBI GI: 39977585 Blast Desc: MGG_06677 [Magnaporthe grisea 70-15] gi|145013808|gb|EDJ98449.1| MGG_06677 [Magnaporthe grisea 70-15]
  misc_feature (1)..(133): NCBI GI: 156040435 Blast Desc: SS1G_12234 [Sclerotinia sclerotiorum 1980] gi|154696290|gb|EDN96028.1| SS1G_12234 [Sclerotinia sclerotiorum 1980]
  misc_feature (1)..(145): NCBI GI: 85076644 Blast Desc: NCU01785 [Neurospora crassa OR74A] gi|18376138|emb|CAD21203.1| conserved [Neurospora crassa] gi|28916993|gb|EAA26721.1| [Neurospora crassa OR74A]
  misc_feature (1)..(133): NCBI GI: 154320728 Blast Desc: BC1G_01836 [Botryotinia fuckeliana B05.10] gi|150853525|gb|EDN28717.1| BC1G_01836 [Botryotinia fuckeliana B05.10]
  misc_feature (1)..(141): NCBI GI: 116199415 Blast Desc: CHGG_07863 [Chaetomium globosum CBS 148.51] gi|88179142|gb|EAQ86610.1| CHGG_07863 [Chaetomium globosum CBS 148.51]
  misc_feature (1)..(128): NCBI GI: 171689404 Blast Desc: protein product [Podospora anserina] gi|170944664|emb|CAP70775.1| protein product [Podospora anserina]
  misc_feature (1)..(119): NCBI GI: 118778309 Blast Desc: AGAP007220-PA [Anopheles gambiae str. PEST] gi|116132321|gb|EAA04214.4| AGAP007220-PA [Anopheles gambiae str. PEST]
MRILEAQSAVLTNVEVCSFLKDQAQQYQAQKRRGPPNLEMLRGEVIKYLETFPGPLSQKPQAYEASAIPPLIQKLRQFGISKGECIMIVNLRPTSPVTLNLVIEDMMQRFTDEQQEDILNIIIEVLGQHPVQEGDDEMDCEEDGS

SEQ ID NO: 7027 - DNA, 1301 bp, Muscodor strobelii
  misc_feature: SGI EST ID NO. CUFF.17829.1
  misc_feature: Variant of the nucleotide sequence at SEQ ID NO 7025
tgaccacaagcccattcacacgatcatatctcattgctaagcacggagcaaaacattgactgctttgcacatttcggatacagctagattcagcagtctcttagttactgaaagaagaatcgatctttgccatcatgaggatcctggaggcgcaaagcgccgtcttgaccaatgtcgaggtctgcagcttcttgaaggaccaggctcagcagtaccaagcccagaagcgacgcggcccgccaaacttggagatgctacgcggcgaggtgatcaagtatcttgagaccttccccggtccccttagccagaagcctcaggcctatgaagcctctgcaatccccccgcttattcagaagctgcgccaatttggcatcagcaagggcgagtgtatcatgattgtgaacttgcgcccgacctctcccgtcacgctcaatttggtcattgaggatatgatgcagcgcttcacggatgaacaacaggaggatatcctcaacatcatcatcgaagtccttggtcagcacccggttcaagagggagatgatgagatggattgtgaggaggatggatcatgaagactggcgatcaaaatcgagacgcgtccatcaacacacgaaggtcttttatcactctgtctacctacggcactcatatcacggcgcatccgccctcactttgcccaccggattccgatactgtttgtatagccgtccgacaaatctcctcaaatgccaacttgagaagctcacccgtcaccgcggaacattcgacatacttatctgcccggatctcttgtgatgccctgtacccctcctgaggatatatcggcttgtttggatcgtcatcagacctcaaatccctcttcagaccgacaaccactatggggacctgatcgcttgtgcggaagctgttgcggacttctttactccactaccaagaaaagagtcagcctgaggcacggggaatgaataaggggggtagaggctttacaagttgctcgatgttgaccatacttgatcgactggaaatgtcatagcatataaggactacatctggttcgagtaatcgccagttctctgggctggctgtgtcatagaattcaagacgaaatttgcccttcctatttctgatttcgaagatgaatggctgatctatgtctcgtaatattgtgattggtgttttgccctcaagtgaatgcccgcctccgctaatgcgactacagtttctatcaatgaccgtaatgattactactggtgcagtgttgtacgcacgataagagtgtcgtctttcctactttctcatcg

SEQ ID NO: 7028 - DNA, 1152 bp, Muscodor strobelii
  misc_feature: SGI cDNA ID NO. 562098
  misc_feature: Encodes the peptide sequence at SEQ ID NO 7029
atgagctacccgccgacacgcgaaaaatcagttcctgcacatggagtggtacctgaagatcaagaaaatgggagtctcaaacgcaagcggccattgatcgaagcgcgctctgacgagattcttgacgaaacagcagaaacgcctcctaaaaggcgctcaagagatcagaataccaagatgtgccttgcatgtccatttgcaaagtacgaccctgtacgctataaagattgttaccgctatgccctcacgcggattcgagatgtcaaacaacacttggcacgatgtcatcgagtatcattatattgtcctaaatgcatgacaacatttgtggctgagaaggagcgagatgagcatatacgatcatcaaattgccctaagcgtcctttacataccattgagggcgtctcagaagttcagaaactgcagcttagtcgtcgaatctcatcaaaacttccagagtcagagcagtggttcatggtctttgatatcttattccctgaccgtccacgtccagaatcgccatacttcgaacgagggctttctggcgacatgcagcagttccgcgactacctgttgagctgcggtgttgccatgttgagtcagcgcctcgtaaattcgatgacatcctttagaaagaatgcgacctttcttgatagcgagtcaatatttctagaactgttccatgttgttcaaaccgaggtcatagatgagggtctgaattcaatcatggcaaactgggtgactgccaatgcagcttccgcttcggaaaccattgcaaccaaacaaacgggcatcgaaacccataacgtcagcagtattaccgcagaggctttgacgatcaccgacgattcgattatcaatcgtaacaatatagagcatgtagcctcggaggcttccgattcgcagagccaaggagttgctattcatggagccaaccggcaaacaaccctgttcgaaaaaagaggacaaactctgccacagcttcagacatcacaactcggaaatgttgagcccaaaaaggtacgaaatccgctagactctgccatgatcgatcgtctcaaagctagacccgcttatggagaagtaccatatgactcagtgtggatgtctgatgggcttgccctcggtaattatataggcggaattggatag

SEQ ID NO: 7029 - protein, 383 aa, Muscodor strobelii
  misc_feature: SGI Peptide ID NO. 562098
  misc_feature (26)..(270): NCBI GI: 171680950 Blast Desc: protein product [Podospora anserina] gi|170940433|emb|CAP65660.1| protein product [Podospora anserina]
  misc_feature (55)..(199): NCBI GI: 39971883 Blast Desc: [Magnaporthe grisea 70-15] gi|145019758|gb|EDK03986.1| [Magnaporthe grisea 70-15]
  misc_feature (64)..(174): NCBI GI: 256720885 Blast Desc: [Nectria haematococca mpVI 77-13-4]
  misc_feature (62)..(203): NCBI GI: 256720685 Blast Desc: expressed protein [Nectria haematococca mpVI 77-13-4]
  misc_feature (76)..(191): NCBI GI: 171676844 Blast Desc: protein product [Podospora anserina] gi|170936489|emb|CAP61149.1| protein product [Podospora anserina]
  misc_feature (57)..(175): NCBI GI: 171691262 Blast Desc: protein product [Podospora anserina] gi|170945579|emb|CAP71692.1| protein product [Podospora anserina]
  misc_feature (62)..(203): NCBI GI: 256722882 Blast Desc: [Nectria haematococca mpVI 77-13-4]
  misc_feature (5)..(179): NCBI GI: 46109250 Blast Desc: FG01507.1 [Gibberella zeae PH-1]
  misc_feature (62)..(236): NCBI GI: 171691260 Blast Desc: protein product [Podospora anserina] gi|170945578|emb|CAP71691.1| protein product [Podospora anserina]
  misc_feature (62)..(177): NCBI GI: 46117326 Blast Desc: FG04505.1 [Gibberella zeae PH-1]
MSYPPTREKSVPAHGVVPEDQENGSLKRKRPLIEARSDEILDETAETPPKRRSRDQNTKMCLACPFAKYDPVRYKDCYRYALTRIRDVKQHLARCHRVSLYCPKCMTTFVAEKERDEHIRSSNCPKRPLHTIEGVSEVQKLQLSRRISSKLPESEQWFMVFDILFPDRPRPESPYFERGLSGDMQQFRDYLLSCGVAMLSQRLVNSMTSFRKNATFLDSESIFLELFHVVQTEVIDEGLNSIMANWVTANAASASETIATKQTGIETHNVSSITAEALTITDDSIINRNNIEHVASEASDSQSQGVAIHGANRQTTLFEKRGQTLPQLQTSQLGNVEPKKVRNPLDSAMIDRLKARPAYGEVPYDSVWMSDGLALGNYIGGIG

SEQ ID NO: 7030 - DNA, 1860 bp, Muscodor strobelii
  misc_feature: SGI EST ID NO. CUFF.17832.0
  misc_feature: Variant of the nucleotide sequence at SEQ ID NO 7028
tcccacccgactggcgcctcgcatctgaacggctatcacccctgcgggcggaactaggtgtcagtgcgttttctcgaattgctcttgtacaatctccaaccggttattgctccccaaccttgacctacagaagaatagatctgaatcaatccaactatgtcacctccaaaaggattttcatggcctattgaatgtcatacggagtcatcgaagaccaccattatgctggactatcctactgcaaattgccaaaacatcgctcaatttaggtgttcggaatcgaatacggcagtagaaagagcgcccgagagagatgcaataaaacccaacaccaaatcaattaagaaaccgaacgtgttcaccttgttacaggaaactattgaccagtctatgtttgcgggaatagtactaccctcgactgacaccgattccgcgcctcctaataccaaacaaaatgcccatgtctcccatgttagggcacagagtattcgaacccccaaaagcccaataattggtctatgggagcctcctggaatcaagttcttcgttgctgatgacggctccatacgcaagatgagctacccgccgacacgcgaaaaatcagttcctgcacatggagtggtacctgaagatcaagaaaatgggagtctcaaacgcaagcggccattgatcgaagcgcgctctgacgagattcttgacgaaacagcagaaacgcctcctaaaaggcgctcaagagatcagaataccaagatgtgccttgcatgtccatttgcaaagtacgaccctgtacgctataaagattgttaccgctatgccctcacgcggattcgagatgtcaaacaacacttggcacgatgtcatcgagtatcattatattgtcctaaatgcatgacaacatttgtggctgagaaggagcgagatgagcatatacgatcatcaaattgccctaagcgtcctttacataccattgagggcgtctcagaagttcagaaactgcagcttagtcgtcgaatctcatcaaaacttccagagtcagagcagtggttcatggtctttgatatcttattccctgaccgtccacgtccagaatcgccatacttcgaacgagggctttctggcgacatgcagcagttccgcgactacctgttgagctgcggtgttgccatgttgagtcagcgcctcgtaaattcgatgacatcctttagaaagaatgcgacctttcttgatagcgagtcaatatttctagaactgttccatgttgttcaaaccgaggtcatagatgagggtctgaattcaatcatggcaaactgggtgactgccaatgcagcttccgcttcggaaaccattgcaaccaaacaaacgggcatcgaaacccataacgtcagcagtattaccgcagaggctttgacgatcaccgacgattcgattatcaatcgtaacaatatagagcatgtagcctcggaggcttccgattcgcagagccaaggagttgctattcatggagccaaccggcaaacaaccctgttcgaaaaaagaggacaaactctgccacagcttcagacatcacaactcggaaatgttgagcccaaaaaggtacgaaatccgctagactctgccatgatcgatcgtctcaaagctagacccgcttatggagaagtaccatatgactcagtgtggatgtctgatgggcttgccctcggtaattatataggcggaattggatagtcgagacatagatggggaacgaatagattggagtacggtctactatattgcactgcgaggcacgtaggagtctgtaattagcagaagggcacgtagaggcgtggtgacaatttcatcagagagtagaatctgtca

SEQ ID NO: 7031 - DNA, 651 bp, Muscodor strobelii
  misc_feature: SGI cDNA ID NO. 562099
  misc_feature: Encodes the peptide sequence at SEQ ID NO 7032
atgtcagacaacaagaagcttccagctctcaaccctggtgctgaagagtaccgacttgttccctatgaggaacacccctccctccaacgccagcacctcccaccccctcttgcgcaccacctggctcagccgactgccaacaccttcaacccgaaccaacagcacttcttgctcccgtctcccctaccacgacccgtcgcgacctacttcaacccttacgagcagcagatctcgcagcctcgcccccttatcagccctgctgtcacgtcgtctgtccacaaccttcacgccatgaaccgcaacgacaatggccacttgggccagcatgctggcgtaaagcccaaggagaccaaggagcagacagctgctcgccttcgagctgagttcgaggccgcccgtggttttgattccgatgatgacgacgttttctttcccgccggcaatgagaagaagcagaccggaaagaaagaggttgcacctgcctcccgaacccctagttccaacaccactggcgtcaacactcacggttctcacaccggtggctcccacactgctggccctcgcactgctggctcgcagagcaatgcatttctctctcccggttcccacacaaagggttccagcactcagtaccgacccaattcaacctga

SEQ ID NO: 7032 - protein, 216 aa, Muscodor strobelii
  misc_feature: SGI Peptide ID NO. 562099
MSDNKKLPALNPGAEEYRLVPYEEHPSLQRQHLPPPLAHHLAQPTANTFNPNQQHFLLPSPLPRPVATYFNPYEQQISQPRPLISPAVTSSVHNLHAMNRNDNGHLGQHAGVKPKETKEQTAARLRAEFEAARGFDSDDDDVFFPAGNEKKQTGKKEVAPASRTPSSNTTGVNTHGSHTGGSHTAGPRTAGSQSNAFLSPGSHTKGSSTQYRPNST

SEQ ID NO: 7033 - DNA, 310 bp, Muscodor strobelii
  misc_feature: SGI EST ID NO. CUFF.17842.0
  misc_feature: Variant of the nucleotide sequence at SEQ ID NO 7031
cgacgggatagttcccattcattaaatttgtagctctctttgaatcctttcgtccaaacttcatccatcatcaactggcagattcttccaccatgtcagacaacaagaagcttccagctctcaaccctggtgctgaagagtaccgacttgttccctatgaggaacacccctccctccaacgccagcacctcccaccccctcttgcgcaccacctggctcagccgactgccaacaccttcaacccgaaccaacagcacttcttgctcccgtctcccctaccacgacccgtcgcgacctacttcaaccctta

SEQ ID NO: 7034 - DNA, 3594 bp, Muscodor strobelii
  misc_feature: SGI cDNA ID NO. 562100
  misc_feature: Encodes the peptide sequence at SEQ ID NO 7035
atgccaccaaacaggggatctgccaggctacaggccgatattcaggcactccgtcaggcaacacatcccaacattgagaaaattgatagaggtgatgtgcaagatgagtttgtcatcatcttcgcccatgcccacttgactgggggcaagcttgagatccgggtgatgccacaagaacccaaaggatatccagaggacaatttctacgtcatatatacaaacgcagatgttcctgcagctgtcagcagtgttctcggcgacaccctcacttcaatgactggtctgacagtcaaagacatgcttaagaaactcacgcaacagctatgtacgaagctcgatccaatcgcaggaaacagcgacgatgaggacattctcattaccgattgtgacgatatggatgaagacctttccgatttctcagatgatagtgatgaggatatggatatcgactggtcgctagaagctgacgagattgttaagcccagactcggcaacaaaacgagaccaataaccaaaggcaacattgacgaagattgcttgaagctcatccgtcgcgacttccaagctgtaagcaaagccggatttcgggttggcaaagttctcggcgtcgatcaggtcacagactacagcattgccagcatatccatgaaagttagcaaacttggcttctcggaagaggcaagcaaagccttgaacctaagtacctctgactacgtcgtacttcttatgaaattcgaggggaagtttcctacctttgacaatgttatcgaaaaggcagaatccgatatccgcttagatttcagggtaaggaaatgtttgaggtataagcctactatggagcaagctattaccgcctttctacccaacaaacgtctttcggaagacaaaagccaaccagcagctcaagctccggagcagacgtcagagagccacgatcttgtgtccttcgctgttggtgaatctattgagttgctattgaatggcgatttcattggcttggctaagttgagacacaaatatggcatcagctgggacaaagccaggcagtttcgacaaacattgcccactgtggtcgggcctttcgattcgtcatcgactcgagaccttctaagcagcttgatagccgacaaaagcgaagagactaacaagtcacagaaagagaagaattccaacgtcaacctacctccttgcctagcctttgatcacctatcaagcccaggtccaatctcattcccccttatcgcagcgcaatgcgccttccactatctggtgaaatgcacagagtattgcatgatatgccacgagaaactcactgaagagctcgaggctctaaaaccatatgtttgcagcaaacctctctgtctatttcaatacatgaacctgggcctgggtcctagcatagaccacgaaatcatcaatcagccatccgttgttgacttgctcgtcagtttttgctacgtcagcgtattcggccggatccaaatacgtgaattccccctaggattgggcttacaagtcccccgggtacattctcgggcacaaatcttcgcggctcatggtcaaggcaatcccgtgtccatcgaaaacgttcaaatgggcgttcttgctgatccgatccccgtgaaagtctcttggaaagacaataccatcacattactgaatgtctttggactccctctatctgacgatcaaaacttgagagtcggtcagtggatacttatatttacgtctcataagccagccgcaaatctggatgtgcttccagaaacagaagtttcatatccacatcttgacacttgccatcacgcccgcatcacatggagagaacgagggtccatgacgatggaaatcgcatctcgacactcgtcaaatctgtcacacttttctgaaattcatcaaggtttggcaggaaaggactggagtacaggtttcagttttggcaaactcgtgttatatgacagagcctttgacgagttagagacggacgacgagcgtgccttatcgatgcaaatcctgctttgttcaataccaccaattgagaaaatgcgggcatacttgatgggcgacccaaaccgaaagctggctacctggagcgggatttcaccggctgccatgaaattgctcagatggatagtagcctccaaccgctctgtcattgttccaatcgattcgactcctgccggactgcaagaaaagataggaggcgttggggatgattggctgcagttccgattcgcacaagggtcacccgaaagagaggttcttttccagagagcattggaaggcgtgaacaagcccgtacgaacactattgggctggcatggcagttccctcggcaattggcactcgatcatacgtcaaggactcaacttcgagaagacagacaatggtcgagcttttggcaacggtgtctacttcagccagctgttcgactacagcatgggctatacgggccaaacacagcagcaccacttctggccacaatcaacattgaagattacagcggctcttagtctgaatgagcttatcaacttgccagagcaatttgtacagagccagagctgtttcgtggttgacaagcttgattggatacagtgccgatatttgttcgttcggctgctagacaagggtagctatcaaccagcgtatcaaccgttgtcagccgttccagacgctgcagtgctgcataatccgcctcaacctgccgacgagtttgtgcaagatcctaagtatgtaactaggggtccagcatcacgctcgcttgccataccaaacattgcattcgcgtccactcgtcgaggtaaatctcaggccccccgtcgattattgtctctccatgcggatggtctggaagtcatcgacgatactgacgatgaagaggatgaagatgtaaagtttctgcgtcaagatgccaagcaggaaaagagtgcgggtacaatcacatgtacgacaccgacgaatcaggagtccttgacagactttcgccccggcacgctggatatatcagagctgcctcaactcgctcttccctcatacgcgaccaatcaggcccagaagacaattcagcaagagctcaaaaagcttcagaaggtacaagagtctacacctttgcatattcttgggtggtacatggacttcgagcagatcaacaacatgttccagtggatcgtcgaactccactcgttcgactcgaatttacctctcgcgatggatatgaagagggccggttgtacgagcatcgtcctcgaaattcggttcttgcgcggcttcccgataacaccacctttcgttcgtgtcattcggccccggtttttgcccttcatgcatggaggtggtggtcacgtaactgcgggaggagcgatgtgtatggagcttcttactaacacaggttggtcaccggcttctagcctggagagcgtactcttgcaagttcgtctggcaatgtgtagtctcgagccccgaccggcgagattggatcagagtagtatgaggcaggattacggcgttggagaggctatcgaggcattcaggcgtgctgcggccacgcatggctggcaggtgccacaggagttaggcgagattacaatggcttaa

SEQ ID NO: 7035 - protein, 1197 aa, Muscodor strobelii
  misc_feature: SGI Peptide ID NO. 562100
  misc_feature (672)..(874): Pfam Id: PF00644 Pfam Desc: Poly(ADP-ribose) polymerase catalytic domain
  misc_feature (773)..(824): Pfam Id: PF00644 Pfam Desc: Poly(ADP-ribose) polymerase catalytic domain
  misc_feature (9)..(1193): NCBI GI: 171689456 Blast Desc: protein product [Podospora anserina] gi|170944690|emb|CAP70801.1| protein product [Podospora anserina]
  misc_feature (23)..(1197): NCBI GI: 116199437 Blast Desc: CHGG_07874 [Chaetomium globosum CBS 148.51] gi|88179153|gb|EAQ86621.1| CHGG_07874 [Chaetomium globosum CBS 148.51]
  misc_feature (23)..(1195): NCBI GI: 159125628 Blast Desc: ubiquitin conjugating enzyme, [Aspergillus fumigatus A1163]
  misc_feature (23)..(1197): NCBI GI: 119499796 Blast Desc: ubiquitin conjugating enzyme, [Neosartorya fischeri NRRL 181] gi|119414820|gb|EAW24758.1| ubiquitin conjugating enzyme, [Neosartorya fischeri NRRL 181]
  misc_feature (23)..(1195): NCBI GI: 70993182 Blast Desc: ubiquitin conjugating enzyme [Aspergillus fumigatus Af293] gi|66849072|gb|EAL89400.1| ubiquitin conjugating enzyme, [Aspergillus fumigatus Af293]
  misc_feature (63)..(1195): NCBI GI: 169765630 Blast Desc: [Aspergillus oryzae RIB40] gi|83765141|dbj|BAE55284.1| protein product [Aspergillus oryzae]
  misc_feature (40)..(1193): NCBI GI: 119186927 Blast Desc: CIMG_03511 [Coccidioides immitis RS]
  misc_feature (12)..(1194): NCBI GI: 240274693 Blast Desc: ubiquitin-conjugating enzyme E2 [Ajellomyces capsulatus H143]
  misc_feature (15)..(1194): NCBI GI: 225561592 Blast Desc: ubiquitin-conjugating enzyme [Ajellomyces capsulatus G186AR]
  misc_feature (24)..(1197): NCBI GI: 145606078 Blast Desc: MGG_06679 [Magnaporthe grisea 70-15] gi|145013806|gb|EDJ98447.1| MGG_06679 [Magnaporthe grisea 70-15]
MPPNRGSARLQADIQALRQATHPNIEKIDRGDVQDEFVIIFAHAHLTGGKLEIRVMPQEPKGYPEDNFYVIYTNADVPAAVSSVLGDTLTSMTGLTVKDMLKKLTQQLCTKLDPIAGNSDDEDILITDCDDMDEDLSDFSDDSDEDMDIDWSLEADEIVKPRLGNKTRPITKGNIDEDCLKLIRRDFQAVSKAGFRVGKVLGVDQVTDYSIASISMKVSKLGFSEEASKALNLSTSDYVVLLMKFEGKFPTFDNVIEKAESDIRLDFRVRKCLRYKPTMEQAITAFLPNKRLSEDKSQPAAQAPEQTSESHDLVSFAVGESIELLLNGDFIGLAKLRHKYGISWDKARQFRQTLPTVVGPFDSSSTRDLLSSLIADKSEETNKSQKEKNSNVNLPPCLAFDHLSSPGPISFPLIAAQCAFHYLVKCTEYCMICHEKLTEELEALKPYVCSKPLCLFQYMNLGLGPSIDHEIINQPSVVDLLVSFCYVSVFGRIQIREFPLGLGLQVPRVHSRAQIFAAHGQGNPVSIENVQMGVLADPIPVKVSWKDNTITLLNVFGLPLSDDQNLRVGQWILIFTSHKPAANLDVLPETEVSYPHLDTCHHARITWRERGSMTMEIASRHSSNLSHFSEIHQGLAGKDWSTGFSFGKLVLYDRAFDELETDDERALSMQILLCSIPPIEKMRAYLMGDPNRKLATWSGISPAAMKLLRWIVASNRSVIVPIDSTPAGLQEKIGGVGDDWLQFRFAQGSPEREVLFQRALEGVNKPVRTLLGWHGSSLGNWHSIIRQGLNFEKTDNGRAFGNGVYFSQLFDYSMGYTGQTQQHHFWPQSTLKITAALSLNELINLPEQFVQSQSCFVVDKLDWIQCRYLFVRLLDKGSYQPAYQPLSAVPDAAVLHNPPQPADEFVQDPKYVTRGPASRSLAIPNIAFASTRRGKSQAPRRLLSLHADGLEVIDDTDDEEDEDVKFLRQDAKQEKSAGTITCTTPTNQESLTDFRPGTLDISELPQLALPSYATNQAQKTIQQELKKLQKVQESTPLHILGWYMDFEQINNMFQWIVELHSFDSNLPLAMDMKRAGCTSIVLEIRFLRGFPITPPFVRVIRPRFLPFMHGGGGHVTAGGAMCMELLTNTGWSPASSLESVLLQVRLAMCSLEPRPARLDQSSMRQDYGVGEAIEAFRRAAATHGWQVPQELGEITMA

SEQ ID NO: 7036 - DNA, 216 bp, Muscodor strobelii
  misc_feature: SGI EST ID NO. CUFF.17861.0
  misc_feature: Variant of the nucleotide sequence at SEQ ID NO 7034
attccctagtcctgggtctccaaaggagcacaatgccaccaaacaggggatctgccaggctacaggccgatattcaggcactccgtcaggcaacacatcccaacattgagaaaattgatagaggtgatgtgcaagatgagtttgtcatcatcttcgcccatgcccacttgactgggggcaagcttgagatccgggtgatgccacaagaacccaaag

SEQ ID NO: 7037 - DNA, 1146 bp, Muscodor strobelii
  misc_feature: SGI cDNA ID NO. 562101
  misc_feature: Encodes the peptide sequence at SEQ ID NO 7038
atgtccaccacccgccgccgccaaaacagctccgtgagcctgtctcgaaccctcccacatcactctcgccagaagtccaaagcagccctcgcttccagctctgcccacgtctccgacccgttcctccaacccttcttagggtcctctttcaaccccgccgactacctcaacaccgtgctcccctccctacagacttcaagccggtccagtgacccgtccgttgtcccgttggccgagctctcgtcgcaagcccaggatcagctctcgcagctcaacgcccataccacccgtctgaccaacactctcactcaattgactgacgacatactgcgcagcggcagtcgccttgcctacgaggtcgagctgttgaggggcgagacgctaagtctctcggaaaccctcaccgatggattgcaggatgacattgtcaagttcatccccggcggactacaggagcatgtagcggaagggaataaggctgcccaagctactgctgccagtcaaagacgagcaactgtgtcaggtctaccgccggtcgtaaacacagaagagaaagaaccagtagcagcaaacactcccaaaacagcagtcacggatcccccatacatcactcagctccagaccctcactctcgtacggtcaaggctagacgaagtcgtgaagactttcggcgatgctatggaatttgtgttcccgccatcagagctcagcgtcagttcctcctttctctccgtgtcggcgccagagccaggaaaggagtctgccagtacggaagagaaggggcaaagggttctcaaagcattccgagaggagatctccgatttgcttaagaagtcatcggatcctgtagagggcattgagaaggcagcgaagaggatcgaggaactgaaggagcttacgacggtgtggaagggcacggccgaggagaagggacgtggcaagtttattgacaatttggcgaagatggttgaggataggcataatgaactggtgcgtgagatggagcagactgcgcggagggaaggtagggatgtagagaagaagactgggaatagcggtgcggatggaggtgctgctgagagcaacaagggtttgtctggatatggtatcatgagccagttgcagagattacggactggtttataa

SEQ ID NO: 7038 - protein, 381 aa, Muscodor strobelii
  misc_feature: SGI Peptide ID NO. 562101
  misc_feature (2)..(381): NCBI GI: 261356713 Blast Desc: conserved [Verticillium albo-atrum VaMs.102]
  misc_feature (5)..(381): NCBI GI: 46107886 Blast Desc: FG00826.1 [Gibberella zeae PH-1]
  misc_feature (20)..(381): NCBI GI: 145606076 Blast Desc: MGG_11879 [Magnaporthe grisea 70-15] gi|145013805|gb|EDJ98446.1| MGG_11879 [Magnaporthe grisea 70-15]
  misc_feature (2)..(381): NCBI GI: 85080117 Blast Desc: NCU01805 [Neurospora crassa OR74A] gi|18376106|emb|CAD21172.1| [Neurospora crassa] gi|28917549|gb|EAA27247.1| conserved [Neurospora crassa OR74A]
  misc_feature (2)..(356): NCBI GI: 171689458 Blast Desc: protein product [Podospora anserina] gi|170944691|emb|CAP70802.1| protein product [Podospora anserina]
  misc_feature (32)..(378): NCBI GI: 169606560 Blast Desc: SNOG_06323 [Phaeosphaeria nodorum SN15] gi|160707026|gb|EAT86154.2| SNOG_06323 [Phaeosphaeria nodorum SN15]
  misc_feature (88)..(378): NCBI GI: 154303319 Blast Desc: BC1G_09408 [Botryotinia fuckeliana B05.10] gi|150854971|gb|EDN30163.1| BC1G_09408 [Botryotinia fuckeliana B05.10]
  misc_feature (31)..(322): NCBI GI: 189192975 Blast Desc: conserved [Pyrenophora tritici-repentis Pt-1C-BFP] gi|187978390|gb|EDU45016.1| conserved [Pyrenophora tritici-repentis Pt-1C-BFP]
  misc_feature (49)..(378): NCBI GI: 119490931 Blast Desc: NFIA_063930 [Neosartorya fischeri NRRL 181] gi|119411286|gb|EAW21229.1| conserved [Neosartorya fischeri NRRL 181]
  misc_feature (26)..(378): NCBI GI: 146323470 Blast Desc: conserved [Aspergillus fumigatus Af293] gi|129558274|gb|EAL92241.2| conserved [Aspergillus fumigatus Af293] gi|159127297|gb|EDP52412.1| conserved [Aspergillus A1163]
MSTTRRRQNSSVSLSRTLPHHSRQKSKAALASSSAHVSDPFLQPFLGSSFNPADYLNTVLPSLQTSSRSSDPSVVPLAELSSQAQDQLSQLNAHTTRLTNTLTQLTDDILRSGSRLAYEVELLRGETLSLSETLTDGLQDDIVKFIPGGLQEHVAEGNKAAQATAASQRRATVSGLPPVVNTEEKEPVAANTPKTAVTDPPYITQLQTLTLVRSRLDEVVKTFGDAMEFVFPPSELSVSSSFLSVSAPEPGKESASTEEKGQRVLKAFREEISDLLKKSSDPVEGIEKAAKRIEELKELTTVWKGTAEEKGRGKFIDNLAKMVEDRHNELVREMEQTARREGRDVEKKTGNSGADGGAAESNKGLSGYGIMSQLQRLRTGL

SEQ ID NO: 7039 - DNA, 1393 bp, Muscodor strobelii
  misc_feature: SGI EST ID NO. CUFF.17884.1
  misc_feature: Variant of the nucleotide sequence at SEQ ID NO 7037
tgggtcgaagctcacctccaacctcgaaatctagattttagaccaggaaccgaggaagcttaagtgtgatacaggcccctaaacagacggaaatcaggccaaagaagacacagacagactcttcaacactcaaggaacgtctacacccgattcgattcccatgtccaccacccgccgccgccaaaacagctccgtgagcctgtctcgaaccctcccacatcactctcgccagaagtccaaagcagccctcgcttccagctctgcccacgtctccgacccgttcctccaacccttcttagggtcctctttcaaccccgccgactacctcaacaccgtgctcccctccctacagacttcaagccggtccagtgacccgtccgttgtcccgttggccgagctctcgtcgcaagcccaggatcagctctcgcagctcaacgcccataccacccgtctgaccaacactctcactcaattgactgacgacatactgcgcagcggcagtcgccttgcctacgaggtcgagctgttgaggggcgagacgctaagtctctcggaaaccctcaccgatggattgcaggatgacattgtcaagttcatccccggcggactacaggagcatgtagcggaagggaataaggctgcccaagctactgctgccagtcaaagacgagcaactgtgtcaggtctaccgccggtcgtaaacacagaagagaaagaaccagtagcagcaaacactcccaaaacagcagtcacggatcccccatacatcactcagctccagaccctcactctcgtacggtcaaggctagacgaagtcgtgaagactttcggcgatgctatggaatttgtgttcccgccatcagagctcagcgtcagttcctcctttctctccgtgtcggcgccagagccaggaaaggagtctgccagtacggaagagaaggggcaaagggttctcaaagcattccgagaggagatctccgatttgcttaagaagtcatcggatcctgtagagggcattgagaaggcagcgaagaggatcgaggaactgaaggagcttacgacggtgtggaagggcacggccgaggagaagggacgtggcaagtttattgacaatttggcgaagatggttgaggataggcataatgaactggtgcgtgagatggagcagactgcgcggagggaaggtagggatgtagagaagaagactgggaatagcggtgcggatggaggtgctgctgagagcaacaagggtttgtctggatatggtatcatgagccagttgcagagattacggactggtttataattcgatccaatcccacgaatttctaggaccactaacggcgttgcctatgactgtttgtgattaatgaattctatccactaaaacggc

SEQ ID NO: 7040 - DNA, 939 bp, Muscodor strobelii
  misc_feature: SGI cDNA ID NO. 562102
  misc_feature: Encodes the peptide sequence at SEQ ID NO 7041
atgtcactcatcataccgctctctctatcccggcgcatcatcgcctcaggcgtgaccaatgtccctcaaggggagttccacagattcaacctcctcccggcggaaatacgcattctggtctgggaggcttacgcccgcctgccgcggaccatattcgtcgacctgcatgcgctcggatgtcctcgaaaatcgaaaaactgcagatgctgtaagtttcacactctcaacaatgaaccataccacccaaccctacaccagtatgtctccccgctgttcttcatcagccccgaaagctactacgtagccaacaaacaagtctggaaaagcatccgtatcaaagactgctcatggcacagttatctcgttgaaacactgatgtttgataaagaattcgagactcgaatcctgtgctcggcgaaggacactatagtcactggatatacagatggcttacaaagaatctgggactcggataatgctcacgagagagatgaaaacatacggcatggttggtggaaccacaagaatccaaaatggtggacggcacacaagtataacgcttgccaactcaattgcgcacaatatgggcaaattatccatgacgtgggtgggacttatctcgactgtatctacgagaagactctgcgcatcgcacaggaacagaagcgcgctctggtaaactggcgaaacgctatacagacgttcggtgctgccgtggatgttttgaaggaaatctctgaacttcgcaagggagacaacctcaatctcgaggatttgagggtggaatgggtcaacttggtgtcctattggagggatcaggttagggaatggaagaaggaactaaacttttggatggatgagggggactttgaaatgatatgcagaacaaggcttgcgcagacaagcattaatgacccaagttccatattgaatttctga

SEQ ID NO: 7041 - protein, 312 aa, Muscodor strobelii
  misc_feature: SGI Peptide ID NO. 562102
MSLIIPLSLSRRIIASGVTNVPQGEFHRFNLLPAEIRILVWEAYARLPRTIFVDLHALGCPRKSKNCRCCKFHTLNNEPYHPTLHQYVSPLFFISPESYYVANKQVWKSIRIKDCSWHSYLVETLMFDKEFETRILCSAKDTIVTGYTDGLQRIWDSDNAHERDENIRHGWWNHKNPKWWTAHKYNACQLNCAQYGQIIHDVGGTYLDCIYEKTLRIAQEQKRALVNWRNAIQTFGAAVDVLKEISELRKGDNLNLEDLRVEWVNLVSYWRDQVREWKKELNFWMDEGDFEMICRTRLAQTSINDPSSILNF

SEQ ID NO: 7042 - DNA, 198 bp, Muscodor strobelii
  misc_feature: SGI EST ID NO. CUFF.17887.0
  misc_feature: Variant of the nucleotide sequence at SEQ ID NO 7040
gggagttccacagattcaacctcctcccggcggaaatacgcattctggtctgggaggcttacgcccgcctgccgcggaccatattcgtcgacctgcatgcgctcggatgtcctcgaaaatcgaaaaactgcagatgctgtaagtttcacactctcaacaatgaaccataccacccaaccctacaccagtatgtctccc

SEQ ID NO: 7043 - DNA, 2166 bp, Muscodor strobelii
  misc_feature: SGI cDNA ID NO. 562103
  misc_feature: Encodes the peptide sequence at SEQ ID NO 7044
atgccgaagcgcaaggtcaccgcggcggaaaaggtggagggactggccgtattgcagtggaaactgaggaaagatcctctggcataccagaccgagttcgacgaattatggcaacagtttgaatccgcccacgaacgagtcgccgccgatcccatgggcgtggatgcagagtccctctcgaccttcagagaacacatcgacctgatcgcccattgcgccgacaaataccccgagaccacagccacatgccaccctccgagaaaagatcgtctccagcctctccctcctccgcagaaaagcgtcatcgacagcgcctatctgctgcccatattctggaccctgctgatcaccaccccgagcaagacgctgcgaacctcgctctaccagaagattgtcagcgatgtgcgcgatgccaactcgagagccaagaaccacaaggtcaatcgcgttttgcagcaggccctctacaacctcgtcgtggacaagaccacctccaaggccctgtgggccgtcaaggtcgtcagggatctgtggagacgtcgtgtctgggatgacgccaaggccgtcgatatcatgacacaggcttcgatgagtgacgaccccaagaccatctcaggtgctgtcaaatacttcctaggtggtgataaggaaagagaagagtttgaagatgagagcagtgacgaagaggctgttgatgtgcggaaagtcaagcatcagattggcatcaacaagaagaccaaaaagtctaagaaaatacttgacaaggcgacggagaaagtcaagagacaagaaaagaagaaaaacaccccaactcagctcaacttctctgccctacacttactgaaagaccctcaaggcttctgcgagtcactttttgagaagcacctgcagaataagaaaaacaagctcgctttagacatcaagctcgatgttttgcagcttgtgactcgtctcgtcggtcttcacaagctgaccatactacccttatattcctactttgctccacatcttactccccgtcaacaatcagtcacctctttcttggcatcgctcgcacaagctacacacaatctagtaccaccagagacgatagaagttctgctgcaaaagatagcaaacgagttcgtctcggagggttcgaatgttgaagtgtgtgctgctggagtcaatgccattcgcgagatctgcgcacggcaacctttggcaatgaatgaaacattattacaggatcttgtcgagtaccggaaaagtaaggacaaaggtgttgtcatggccgccaagggcctgctttccctatacagagagaaataccccgaactcctaaagaagaaggatcgcggcaaggttgcgacgatgggattgagaagtggtgaggtgaaagagcagaaattcggcgaggaacaagtcggtgagatcgagggtctcgaactacttgctcgatggaaagaggaagaaaagaaaaggaaacgcctcgagaagggcttaccagagaaaactaatgacgacgagaagaaagacgaggaagacgacgacgatggcttcaactcggatgactgggaagttgcctccaccgacagcgacgagtctggagattggattcgcgttgccgagtctgatgatgagggcgagcctgagccgaagaagcggaagacagacggcgaagaggaggaagatgaagatgccgaggacgcggcacctgtcgacttcatgaagctcgcaacaacccaagtcttgacgccggccgatcttgcgaaacttaaggagttgcgcatggaagccagcatcaacaaagcaatgggcaacaccaacaagcggaagcaagaaatggaagcccgacacatggacgagggcttaacagcagagcaaatcgaggctccggcccaactacggaagagcacgaaggaggaacgcatcgcgatggcgagagaaggaaaggggaatcgcgatgaacataagtcgactagtgcgatcaggaagagcaagaaagaggctgagggcaagagcacaacgaataaggagaaggctaggaggaagaacttcatgatgacgctgggtaaggcgaagtctaagcagaagaggagtctggttgccacgagaaatgtgctgaaggctcatgttgagaggagtaagtctggtgggagacgcagaaatggtacttcgaggtag

SEQ ID NO: 7044 - protein, 721 aa, Muscodor strobelii
  misc_feature: SGI Peptide ID NO. 562103
  misc_feature (403)..(713): Pfam Id: PF05285 Pfam Desc: SDA1
  misc_feature (1)..(718): NCBI GI: 164422881 Blast Desc: NCU09488 [Neurospora crassa OR74A] gi|38524265|emb|CAE75729.1| related to SDA1 protein, required for normal organization of the actin cytoskeleton [Neurospora crassa]
  misc_feature (1)..(719): NCBI GI: 39942422 Blast Desc: MGG_03291 [Magnaporthe grisea 70-15] gi|145015703|gb|EDK00193.1| MGG_03291 [Magnaporthe grisea 70-15]
  misc_feature (1)..(709): NCBI GI: 116205205 Blast Desc: CHGG_10486 [Chaetomium globosum CBS 148.51] gi|88176614|gb|EAQ84082.1| CHGG_10486 [Chaetomium globosum CBS 148.51]
  misc_feature (1)..(719): NCBI GI: 171689676 Blast Desc: protein product [Podospora anserina] gi|170944800|emb|CAP70912.1| protein product [Podospora anserina]
  misc_feature (1)..(717): NCBI GI: 115492607 Blast Desc: conserved [Aspergillus terreus NIH2624] gi|114197791|gb|EAU39491.1| conserved [Aspergillus terreus NIH2624]
  misc_feature (1)..(719): NCBI GI: 46109420 Blast Desc: FG01592.1 [Gibberella zeae PH-1]
  misc_feature (1)..(717): NCBI GI: 212533417 Blast Desc: SDA1 domain protein [Penicillium marneffei ATCC 18224] gi|210072229|gb|EEA26318.1| SDA1 domain protein [Penicillium marneffei ATCC 18224]
  misc_feature (1)..(717): NCBI GI: 169767408 Blast Desc: [Aspergillus oryzae RIB40] gi|238484273|ref|XP_002373375.1| SDA1 domain protein [Aspergillus flavus NRRL3357] gi|83766030|dbj|BAE56173.1| protein product SDA1
  misc_feature (1)..(702): NCBI GI: 261357236 Blast Desc: sda1 [Verticillium albo-atrum VaMs.102]
  misc_feature (1)..(717): NCBI GI: 67517129 Blast Desc: AN0844.2 [Aspergillus nidulans FGSC A4] gi|40746518|gb|EAA65674.1| AN0844.2 [Aspergillus nidulans FGSC A4] gi|259488871|tpe|CBF88672.1| TPA: SDA1 domain protein FGSC
MPKRKVTAAEKVEGLAVLQWKLRKDPLAYQTEFDELWQQFESAHERVAADPMGVDAESLSTFREHIDLIAHCADKYPETTATCHPPRKDRLQPLPPPQKSVIDSAYLLPIFWTLLITTPSKTLRTSLYQKIVSDVRDANSRAKNHKVNRVLQQALYNLVVDKTTSKALWAVKVVRDLWRRRVWDDAKAVDIMTQASMSDDPKTISGAVKYFLGGDKEREEFEDESSDEEAVDVRKVKHQIGINKKTKKSKKILDKATEKVKRQEKKKNTPTQLNFSALHLLKDPQGFCESLFEKHLQNKKNKLALDIKLDVLQLVTRLVGLHKLTILPLYSYFAPHLTPRQQSVTSFLASLAQATHNLVPPETIEVLLQKIANEFVSEGSNVEVCAAGVNAIREICARQPLAMNETLLQDLVEYRKSKDKGVVMAAKGLLSLYREKYPELLKKKDRGKVATMGLRSGEVKEQKFGEEQVGEIEGLELLARWKEEEKKRKRLEKGLPEKTNDDEKKDEEDDDDGFNSDDWEVASTDSDESGDWIRVAESDDEGEPEPKKRKTDGEEEEDEDAEDAAPVDFMKLATTQVLTPADLAKLKELRMEASINKAMGNTNKRKQEMEARHMDEGLTAEQIEAPAQLRKSTKEERIAMAREGKGNRDEHKSTSAIRKSKKEAEGKSTTNKEKARRKNFMMTLGKAKSKQKRSLVATRNVLKAHVERSKSGGRRRNGTSR

SEQ ID NO: 7045 - DNA, 2614 bp, Muscodor strobelii
  misc_feature: SGI EST ID NO. CUFF.17917.0
  misc_feature: Variant of the nucleotide sequence at SEQ ID NO 7043
gccatcacgcggcgcatttgttctaagtagcgattgcgacactcactctctttttgagtgaggcggattgtcaaatattcaaccgatgcacctccttatcaatactgcacccgttcaatcactctctatctctctaatcaacaatctttagactgatcaggcgcttgctcaacgtcttctttcgcctcgagcctagctctcgagctaagactgtgacgacttgctgaattgcttgttgttttgacagagaaagtagcgacgggttgagtgcacaagatgccgaagcgcaaggtcaccgcggcggaaaaggtggagggactggccgtattgcagtggaaactgaggaaagatcctctggcataccagaccgagttcgacgaattatggcaacagtttgaatccgcccacgaacgagtcgccgccgatcccatgggcgtggatgcagagtccctctcgaccttcagagaacacatcgacctgatcgcccattgcgccgacaaataccccgagaccacagccacgtttcccgacaagctccgcgacatcctcactgcccaccacgcctctctagatgccaccctccgagaaaagatcgtctccagcctctccctcctccgcagaaaagcgtcatcgacagcgcctatctgctgcccatattctggaccctgctgatcaccaccccgagcaagacgctgcgaacctcgctctaccagaagattgtcagcgatgtgcgcgatgccaactcgagagccaagaaccacaaggtcaatcgcgttttgcagcaggccctctacaacctcgtcgtggacaagaccacctccaaggccctgtgggccgtcaaggtcgtcagggatctgtggagacgtcgtgtctgggatgacgccaaggccgtcgatatcatgacacaggcttcgatgagtgacgaccccaagaccatctcaggtgctgtcaaatacttcctaggtggtgataaggaaagagaagagtttgaagatgagagcagtgacgaagaggctgttgatgtgcggaaagtcaagcatcagattggcatcaacaagaagaccaaaaagtctaagaaaatacttgacaaggcgacggagaaagtcaagagacaagaaaagaagaaaaacaccccaactcagctcaacttctctgccctacacttactgaaagaccctcaaggcttctgcgagtcactttttgagaagcacctgcagaataagaaaaacaagctcgctttagacatcaagctcgatgttttgcagcttgtgactcgtctcgtcggtcttcacaagctgaccatactacccttatattcctactttgctccacatcttactccccgtcaacaatcagtcacctctttcttggcatcgctcgcacaagctacacacaatctagtaccaccagagacgatagaagttctgctgcaaaagatagcaaacgagttcgtctcggagggttcgaatgttgaagtgtgtgctgctggagtcaatgccattcgcgagatctgcgcacggcaacctttggcaatgaatgaaacattattacaggatcttgtcgagtaccggaaaagtaaggacaaaggtgttgtcatggccgccaagggcctgctttccctatacagagagaaataccccgaactcctaaagaagaaggatcgcggcaaggttgcgacgatgggattgagaagtggtgaggtgaaagagcagaaattcggcgaggaacaagtcggtgagatcgagggtctcgaactacttgctcgatggaaagaggaagaaaagaaaaggaaacgcctcgagaagggcttaccagagaaaactaatgacgacgagaagaaagacgaggaagacgacgacgatggcttcaactcggatgactgggaagttgcctccaccgacagcgacgagtctggagattggattcgcgttgccgagtctgatgatgagggcgagcctgagccgaagaagcggaagacagacggcgaagaggaggaagatgaagatgccgaggacgcggcacctgtcgacttcatgaagctcgcaacaacccaagtcttgacgccggccgatcttgcgaaacttaaggagttgcgcatggaagccagcatcaacaaagcaatgggcaacaccaacaagcggaagcaagaaatggaagcccgacacatggacgagggcttaacagcagagcaaatcgaggctccggcccaactacggaagagcacgaaggaggaacgcatcgcgatggcgagagaaggaaaggggaatcgcgatgaacataagtcgactagtgcgatcaggaagagcaagaaagaggctgagggcaagagcacaacgaataaggagaaggctaggaggaagaacttcatgatgacgctgggtaaggcgaagtctaagcagaagaggagtctggttgccacgagaaatgtgctgaaggctcatgttgagaggagtaagtctggtgggagacgcagaaatggtacttcgaggtagttttgacagtgtcttaatagcatgtcaagatgatgctgtgagtcctgtggactgtttctgtcgccgagtgatcttgtgagtttatttagagattttcctagtgaagtattgctaggatccat

SEQ ID NO: 7046 - DNA, 1824 bp, Muscodor strobelii
  misc_feature: SGI cDNA ID NO. 562104
  misc_feature: Encodes the peptide sequence at SEQ ID NO 7047
atgcttcggggtttgcttgctatcggcctattcgccgcggggagagtgctggcagcgacgtcaattgaggagactgccgacccggtcgaaatatatgactatattgtggtcggttctggtccgggtggtgctggattagcagtcaatcttgctcgtgccggctacaacgtgactctgctggaagccggagatgatctgggcaacaacgcgaattattccatgctgggtaattttatcctagcgggcaatgatgaaaagtcgcgatgggactttttcgtcaagcactctaacgactccgcccgcgagggaaaatacgaaaggacaacatggcgcaagccggatgggtctttctacgtcggtctcgacccgcctgcgaactcgactcgccttggtatctactaccctcgagctgcgacgctcggcggttgtgcgatgcataatggagggatttgtacgttaccggcagacgatgattgggattatatcgcgaatctcacaggcgatgatggctggaaggcaagcacgatgcgcaaatacttcgagaatatggaaaacaacgaatatttaccggctggcactcccggccacggctttactgggtatctgaacaccaccatcaccgatccatccttcttaaagcagaactccgatatggcaaccatgggaagcaactttatcaagactttcggtggcgatgttgcaaaggatcctaatgctctagattcggatcgtgaccaacagaccggtgtgtttgcgctggcgagtcacgcggacaagatgggaatgcggtctggcacaaacaccaatatcaagagaacattagcagaccctgctaagtttccattggtagtgcagcttgagacattcgtcaccagaatcatcttcaactgggaagccggtaaaccaagtgcgacaggtgtttcggtacttcgaggtgcgcatcaatacgaggccgacccattttacaatggtacagagggtaaatttgctcgtatctttgctaaaaaagaggtcattatcgccggtggtactttcaactcgccacagattttgaaagttagtggtattggaccggcaaaagagctcgaggcgctcaatatcgaagtcacgaaagatcttcccggagtaggcgagaatcttggggataattacgaagcgtcactctttgcactagctaacaagactctaaatggaaccgctgggccattcactgtcttcctgaagacacctactgctcagaagaacaggaacatccaggcttggtgtgcttcattctcctttgacggattctatcctggcttccctgaagaatacggaccttcagagtacgagtgcgcgatggtgcatatgaaccctcgctcgcaagcgggttacgtgaggctgcgttctaacgacccgcgactcatgcctgagatcaacttcaacttcttcgagaatgaaggggatacagacctatcagagctgctagacggagcgaaagccttccgcaaagtattcaacatggctcccccgccgatcgccccgttcactgagaagcacccatgtcctggcatcaaccagaactgcaccgacgcggcgcagaaggaatacatgaaattgcaggcgtactcgcaccacgccacgagtacttgcaagatcgggcctgagagtgatccgatggcggtcctggactccaaattccgggttcatggtgttgggaacttgcgcgtggttgatgcgtccgccttccccaaggtgcctggcgcatttccagtgtgcccgactatgatgctggcagagaaggcagcggcggacatcttgagtgatctggaacaaaagccttga

SEQ ID NO: 7047 - protein, 607 aa, Muscodor strobelii
  misc_feature: SGI Peptide ID NO. 562104
  misc_feature (445)..(595): Pfam Id: PF05199 Pfam Desc: GMC oxidoreductase
  misc_feature (32)..(398): Pfam Id: PF00732 Pfam Desc: GMC oxidoreductase
  misc_feature (33)..(70): Pfam Id: PF01266 Pfam Desc: FAD dependent oxidoreductase
  misc_feature (33)..(63): Pfam Id: PF00890 Pfam Desc: FAD binding domain
  misc_feature (543)..(595): Pfam Id: PF05199 Pfam Desc: GMC oxidoreductase
  misc_feature (331)..(398): Pfam Id: PF00732 Pfam Desc: GMC oxidoreductase
  misc_feature (33)..(69): Pfam Id: PF05834 Pfam Desc: Lycopene cyclase protein
  misc_feature (33)..(72): Pfam Id: PF07992 Pfam Desc: Pyridine nucleotide-disulphide oxidoreductase
  misc_feature (32)..(604): NCBI GI: 145606362 Blast Desc: MGG_02371 [Magnaporthe grisea 70-15] gi|145014045|gb|EDJ98686.1| MGG_02371 [Magnaporthe grisea 70-15]
  misc_feature (32)..(602): NCBI GI: 116214449 Blast Desc: CHGG_11065 [Chaetomium globosum CBS 148.51] gi|88175420|gb|EAQ82889.1| CHGG_11065 [Chaetomium globosum CBS 148.51]
  misc_feature (32)..(600): NCBI GI: 171680036 Blast Desc: protein product [Podospora anserina] gi|170939644|emb|CAP64871.1| protein product [Podospora anserina]
  misc_feature (32)..(594): NCBI GI: 85091580 Blast Desc: NCU09024 [Neurospora crassa OR74A] gi|28920365|gb|EAA29735.1| conserved [Neurospora crassa OR74A]
  misc_feature (16)..(602): NCBI GI: 169624234 Blast Desc: SNOG_15373 [Phaeosphaeria nodorum SN15] gi|111056186|gb|EAT77306.1| SNOG_15373 [Phaeosphaeria nodorum SN15]
  misc_feature (32)..(603): NCBI GI: 256725352 Blast Desc: NECHADRAFT_45566 [Nectria haematococca mpVI 77-13-4]
  misc_feature (31)..(602): NCBI GI: 171683764 Blast Desc: protein product [Podospora anserina] gi|170941842|emb|CAP67495.1| protein product [Podospora anserina]
  misc_feature (32)..(604): NCBI GI: 119480809 Blast Desc: GMC oxidoreductase, [Neosartorya fischeri NRRL 181] gi|119408587|gb|EAW18536.1| GMC oxidoreductase, [Neosartorya fischeri NRRL 181]
  misc_feature (20)..(602): NCBI GI: 169601230 Blast Desc: SNOG_03474 [Phaeosphaeria nodorum SN15] gi|111067559|gb|EAT88679.1| SNOG_03474 [Phaeosphaeria nodorum SN15]
  misc_feature (5)..(600): NCBI GI: 261352468 Blast Desc: alcohol dehydrogenase [Verticillium albo-atrum VaMs.102]
  misc_feature (32)..(599): SWISSPROT Homolog: EC 1.1.99.1 Choline dehydrogenase
MLRGLLAIGLFAAGRVLAATSIEETADPVEIYDYIVVGSGPGGAGLAVNLARAGYNVTLLEAGDDLGNNANYSMLGNFILAGNDEKSRWDFFVKHSNDSAREGKYERTTWRKPDGSFYVGLDPPANSTRLGIYYPRAATLGGCAMHNGGICTLPADDDWDYIANLTGDDGWKASTMRKYFENMENNEYLPAGTPGHGFTGYLNTTITDPSFLKQNSDMATMGSNFIKTFGGDVAKDPNALDSDRDQQTGVFALASHADKMGMRSGTNTNIKRTLADPAKFPLVVQLETFVTRIIFNWEAGKPSATGVSVLRGAHQYEADPFYNGTEGKFARIFAKKEVIIAGGTFNSPQILKVSGIGPAKELEALNIEVTKDLPGVGENLGDNYEASLFALANKTLNGTAGPFTVFLKTPTAQKNRNIQAWCASFSFDGFYPGFPEEYGPSEYECAMVHMNPRSQAGYVRLRSNDPRLMPEINFNFFENEGDTDLSELLDGAKAFRKVFNMAPPPIAPFTEKHPCPGINQNCTDAAQKEYMKLQAYSHHATSTCKIGPESDPMAVLDSKFRVHGVGNLRVVDASAFPKVPGAFPVCPTMMLAEKAAADILSDLEQKP

SEQ ID NO: 7048 - DNA, 626 bp, Muscodor strobelii
  misc_feature: SGI EST ID NO. CUFF.17920.0
  misc_feature: Variant of the nucleotide sequence at SEQ ID NO 7046
ctttgacggattctatcctggcttccctgaagaatacggaccttcagagtacgagtgcgcgatggtgcatatgaaccctcgctcgcaagcgggttacgtgaggctgcgttctaacgacccgcgactcatgcctgagatcaacttcaacttcttcgagaatgaaggggatacagacctatcagagctgctagacggagcgaaagccttccgcaaagtattcaacatggctcccccgccgatcgccccgttcactgagaagcacccatgtcctggcatcaaccagaactgcaccgacgcggcgcagaaggaatacatgaaattgcaggcgtactcgcaccacgccacgagtacttgcaagatcgggcctgagagtgatccgatggcggtcctggactccaaattccgggttcatggtgttgggaacttgcgcgtggttgatgcgtccgccttccccaaggtgcctggcgcatttccagtgtgcccgactatgatgctggcagagaaggcagcggcggacatcttgagtgatctggaacaaaagccttgaaaataggacctgggaacgaagcgcgtacataaacagttcacagttagtcaaataggcgcccaggataataagacatacg

SEQ ID NO: 7049 - DNA, 1401 bp, Muscodor strobelii
  misc_feature: SGI cDNA ID NO. 562105
  misc_feature: Reduced expression when VOC is produced
  misc_feature: Encodes the peptide sequence at SEQ ID NO 7050
atgtctgtcttcaagtccgaagacaacaaatcgatcgacggatcgtcgccgccgctgtctaatgacgcattgtcgaacggcgatatcgttggccaagtccagaatctgagcgatgtcgagaaagcccgtaccgcacgaggcgagcagcatttcaatcgtttaggctggaaacgccttacagtcgttctgatcgtcgaggcaatcgctctcggaagtctgggtatgccttcgtctttcgccacccttggcatgatcggaggaacgatcttaagtgttggaattggcctgattgctatctatacgagttatgttgtcggacaggtcaagctgaagtatccggaggttcagcactacgctgacgctggacggctgatgatgggaagatttggatacgagttgattggtgtcatgtttgccctacagcttatcttcctcgtcggatcccacactctaaccggaaccattgccttcttgaagctttcggacaatggaacttgttccttagtattcggagtcgtctcagccatcattttgttcttgctcgccttgccaccttcattcgctgaagtcgctatcctcggctacatcgatttcgtatcaatcatcctggctatcggcattaccatcatcgcgaccggtgtccagcgatccgagatgaccatggcggcagactggtccgcgtacccggcgcctggtaccgattttgttaaggccttcatcgctgttaccaacattgtcttcgcgtacagcttcgccatctgccaattttctttcatggacgagatgcacactcccaaggacttcgtgaaatctatttggtggcttggcatcatcgaaatcatcatctacaccttgactggtgctctgatctactccttcgtcggtcaagatgtaaagtcccctgctttgttgtcggctggaactctcttcaccaagattgcctttggtatcgctctccccgttatcttcatctccggctctataaacggcaccgtagttgggcgatacatccacggtcgcatcttcaagaactctgtcacccgatttatcaacacgacaaaaggttgggtcacttgggcagctctgatcgcggtcataacactgatcggatggatcatcgcggaggctatcccgttcttctccgatcttctggccatttcctctgctctattcatttccggcttcacgctgtacttcccggcaatgatgtggttcatgctcatccgcgaaggatctcccttttccaaagagaatatctataagacgcttctgaatgctctaatctttgtgattggtattctcgttcttgttggcggtacatattctagcgttgtggatatcataaatagctaccacaccgggtctgttcgcggcgcttttacatgcgctccttttgaataa

SEQ ID NO: 7050 - protein, 466 aa, Muscodor strobelii
  misc_feature: SGI Peptide ID NO. 562105
  misc_feature (52)..(445): Pfam Id: PF01490 Pfam Desc: Transmembrane amino acid transporter protein
  misc_feature (36)..(464): NCBI GI: 46133799 Blast Desc: FG09039.1 [Gibberella zeae PH-1]
  misc_feature (5)..(466): NCBI GI: 242771952 Blast Desc: amino acid transporter, [Talaromyces stipitatus ATCC 10500] gi|218721564|gb|EED20982.1| amino acid transporter, [Talaromyces stipitatus ATCC 10500]
  misc_feature (1)..(463): NCBI GI: 212531057 Blast Desc: amino acid transporter, [Penicillium marneffei ATCC 18224] gi|210071049|gb|EEA25138.1| amino acid transporter, [Penicillium marneffei ATCC 18224]
  misc_feature (27)..(464): NCBI GI: 71003045 Blast Desc: UM00056.1 [Ustilago maydis 521] gi|46096208|gb|EAK81441.1| UM00056.1 [Ustilago maydis 521]
  misc_feature (8)..(462): NCBI GI: 146324801 Blast Desc: amino acid transporter [Aspergillus fumigatus Af293] gi|129556161|gb|EAL85480.2| amino acid transporter, [Aspergillus fumigatus Af293]
  misc_feature (26)..(462): NCBI GI: 119485837 Blast Desc: amino acid transporter, [Neosartorya fischeri NRRL 181] gi|119410417|gb|EAW20364.1| amino acid transporter, [Neosartorya fischeri NRRL 181]
  misc_feature (26)..(462): NCBI GI: 159123502 Blast Desc: amino acid transporter, [Aspergillus fumigatus A1163]
  misc_feature (25)..(463): NCBI GI: 67540544 Blast Desc: AN6442.2 [Aspergillus nidulans FGSC A4] gi|40739274|gb|EAA58464.1| AN6442.2 [Aspergillus nidulans FGSC A4] gi|259479330|tpe|CBF69463.1| TPA: amino acid transporter FGSC
  misc_feature (7)..(466): NCBI GI: 145251525 Blast Desc: An15g07550 [Aspergillus niger] gi|134082811|emb|CAK42642.1| protein product [Aspergillus niger]
  misc_feature (7)..(465): NCBI GI: 256726414 Blast Desc: [Nectria haematococca mpVI 77-13-4]
  misc_feature: Useful for introducing or modulating the production of volatile compounds
MSVFKSEDNKSIDGSSPPLSNDALSNGDIVGQVQNLSDVEKARTARGEQHFNRLGWKRLTVVLIVEAIALGSLGMPSSFATLGMIGGTILSVGIGLIAIYTSYVVGQVKLKYPEVQHYADAGRLMMGRFGYELIGVMFALQLIFLVGSHTLTGTIAFLKLSDNGTCSLVFGVVSAIILFLLALPPSFAEVAILGYIDFVSIILAIGITIIATGVQRSEMTMAADWSAYPAPGTDFVKAFIAVTNIVFAYSFAICQFSFMDEMHTPKDFVKSIWWLGIIEIIIYTLTGALIYSFVGQDVKSPALLSAGTLFTKIAFGIALPVIFISGSINGTVVGRYIHGRIFKNSVTRFINTTKGWVTWAALIAVITLIGWIIAEAIPFFSDLLAISSALFISGFTLYFPAMMWFMLIREGSPFSKENIYKTLLNALIFVIGILVLVGGTYSSVVDIINSYHTGSVRGAFTCAPFE

SEQ ID NO: 7051 - DNA, 4875 bp, Muscodor strobelii
  misc_feature: SGI EST ID NO. CUFF.17620.0
  misc_feature: Variant of the nucleotide sequence at SEQ ID NO 7049
cgggaatttttctagaaggccagaaaaaggttagggcacatgaagatcgaacagcacgcactgcctcccgagctttcaacgcaggggctaccccggacaacgccctgaatcatgacttcatgaaatcttgagatcctcgcggtgaggctttcagcagcggacgcgccggttattgccggacagcagctagcagaaatccctcccaccctgcatgagccaagcaggccaagcatagctgccgaaaatcttatccatcctgtcgcagagccgcttcctgaatcaaggacaccacacgtgtggtaaagtgcatcaatcatgtagcagacgtgacagctcaacaaacaccgacaacgagtagactgattctacttcccaagagaacgcatagtgccccatttcatctcaccctcgtgccctgcatgaaataccagctagtgacgatgttgctctccgccagcggagccattactcgcgatttaaatccctgtgcgcttctccacgtcaggaccctcatccagaatttgattttaccaacggctgtcacaaaaaaatgccccagactgcgtggtttcgagcttcgttgtacgtaatgagtgctatgaggagacatgcgacgtaatgaaatcactaaagagaggtatggcggaggatagggagataagggctagaaggttgaaatattttaactttggcatggcacgtttccccggtctgcctttcctcctagggtcagctttatcttgataccatctcgtaaatagggtttgatcgttacccgagagaacgtgttagagctcattgtttagccgcatctatcaggattaccgccgagtttctctgttcttgtgtattctattcggacctcttttttgagcgtcatcattacatctcaacgatagtagtgatacatatatcgaactgattcactcttggacgccttcaacaaggccttgggcatattccggatatcctcgcaggcgagctcgagttagacacagacggcaagcgacgcgacgagtatccttattccagtcagcaagatgtctgtcttcaagtccgaagacaacaaatcgatcgacggatcgtcgccgccgctgtctaatgacgcattgtcgaacggcgatatcgttggccaagtccagaatctgagcgatgtcgagaaagcccgtaccgcacgaggcgagcagcatttcaatcgtttaggctggaaacgccttacagtcgttctgatcgtcgaggcaatcgctctcggaagtctgggtatgccttcgtctttcgccacccttggcatgatcggaggaacgatcttaagtgttggaattggcctgattgctatctatacgagttatgttgtcggacaggtcaagctgaagtatccggaggttcagcactacgctgacgctggacggctgatgatgggaagatttggatacgagttgattggtgtcatgtttgccctacagcttatcttcctcgtcggatcccacactctaaccggaaccattgccttcttgaagctttcggacaatggaacttgttccttagtattcggagtcgtctcagccatcattttgttcttgctcgccttgccaccttcattcgctgaagtcgctatcctcggctacatcgatttcgtatcaatcatcctggctatcggcattaccatcatcgcgaccggtgtccagcgatccgagatgaccatggcggcagactggtccgcgtacccggcgcctggtaccgattttgttaaggccttcatcgctgttaccaacattgtcttcgcgtacagcttcgccatctgccaattttctttcatggacgagatgcacactcccaaggacttcgtgaaatctatttggtggcttggcatcatcgaaatcatcatctacaccttgactggtgctctgatctactccttcgtcggtcaagatgtaaagtcccctgctttgttgtcggctggaactctcttcaccaagattgcctttggtatcgctctccccgttatcttcatctccggctctataaacggcaccgtagttgggcgatacatccacggtcgcatcttcaagaactctgtcacccgatttatcaacacgacaaaaggttgggtcacttgggcagctctgatcgcggtcataacactgatcggatggatcatcgcggaggctatcccgttcttctccgatcttctggccatttcctctgctctattcatttccggcttcacgctgtacttcccggcaatgatgtggttcatgctcatccgcgaaggatctcccttttccaaagagaatatctataagacgcttctgaatgctctaatctttgtgattggtattctcgttcttgttggcggtacatattctagcgttgtggatatcataaatagctaccacaccgggtctgttcgcggcgcttttacatgcgctccttttgaataaattacgaatgaagttttagtcctcgcatgagaaacgtaacgatgtcatcgcagcgcgcgcaatcgtcatcaggatacccatttcccaccaacaattccgctactctactccgtaggttagatgggagagaatctgttatatgaactgtttgcgtctgttaagaacggcgcatagcagtcagggaacggtaatgcgacaacgactttgtatttgatatcccatactgtattctattttggatagttattcggtacttccgtaaaatatatacgactttcacccgatgtacatcttcactcaaagcgtgacttttctgcgagtacatacttttggtgtatttaggcgaatttgtaggcctatgcaacaacccatcctccttccttaatcttcatcctgcagcccatttagtgcccctgtaagtccctgcatccgtctaccgagcaagtcgtccgtactattcagcttgacaatgctcttggactttggcccgaatctcgtcttcccgttccctttcttcttgctaacaccattaggaccctctacctcggcttcgtttccattcatatcgacctgttccttcaccttcgcctcatcactaatcgtcctgcccctagccctcgtcattttgatttcgagcccacggtcttcatcaccgcttgattcggtccggtaatgatgtctgaactccgatcgtctcgtctcatttttttccgcagcgctaagaagttcttcggcgaaatgtgcgcatcgatcgatgagtttccaggctggtggatatatagtcgggaactgtgcgaagccgtgacttatgcccgggatgaggacgacttctgcgacatctttctcatcaaagtctgtgacgttctctagacccgagatatcttgtgatgtggtgcgcgaatggtatgcttgcttggcgcggcggaggcggccggcgaatatgactgtatcgtcgacgagtggatctcgctcgcctgtcaggaagtatgtcttggggaaccgctgtaagagggcatcgggggcgaggatgggtgagagaaagtagtcctgtgagaagtctggtcggttgtggggaccaatataaagaatgatcatggcgcgcatcatctcaggtgtcaaaacgcgatcattgaagtacgagatcatggacgccatggctagccgagtgcgtaaaggctcggggtgatgagaaagagatcgattgtcccgtcgagatactggtgatggaggttccgctttcgaccagacctgtggacttgtatgagagaactctgggagagggctttggaaacgggcgtcgtcctcggcagcattttctttaggcttaggatcggagacctgagggaacgggtattcttcttcgtcgtctgaatgatgaggtgtgcctactaaatcattatactgcatactctttcgcttaagatatgctttattcgtggttcgcgtccttcgatccttgatcagtgacatttgctcatccgacatccagttgccaatattcatgtcgagtccaggatacataagtaccaagccacatggcaggggcaactcttcggagatgagactcgggcgtcggttattgatgttggcatctatcatcatcaaggtcatcgcagttgcgaagttaccgccagcgctgtctcctatgaccacaacctttggtgtttcgcgacctgacattcctatacaacgtcctttgctctttattattgtcgtatacacatcgaaacattcattcaggccgtagggataagggtactctggagctttctgataatcgaggctcagtataggcaggcctgtctttccagcccaagaaaacagcttgtcgtcgttgcaccttggatccatcgcgacaaaccccccgcccggaatatcgagtatcatcttattgatatgctcgaggtcggaaacgggtccatcgtagtagagccagcctgaaacaggatctttgtagtcacttgtgttcggacgcgggatgcgaattgcacgtggcggccagcgcgtaaatcgaggtcggaccaggttttgaaggacactgagatatggcgtcgtgcccttattccagctaacacgcatatgctcgacagtcagcgtccctcgaacctttcgaaccttctcatcagctcgttcggcggcaattagatagtagccggtgaagatcatgctcgcaatgtctctcagccacttccttcgtatcttcatcgctgtccaaaaacccgcatccaaagccgtcaacacccaggtcgcacgaaagtaagcggggtcgtacatattggccatgggttctgggctagccagaccgacgagtgtactgaagttccgggcggcgtataggtacatcatggtaatgacaacggtctgccatactgtcaaagtcttggatgagaatttggacaagaatcgaattaacggtggtccatggccaccaccc

SEQ ID NO: 7052 - DNA, 2145 bp, Muscodor strobelii
  misc_feature: SGI cDNA ID NO. 562106
  misc_feature: Encodes the peptide sequence at SEQ ID NO 7053
atgatagatcacgttctgggcagaccttctgtcaagtctcgccgacttcaggtgctggctgttttagctttctggtcagcttatctgtacaggggtggtggccatggaccaccgttaattcgattcttgtccaaattctcatccaagactttgacagtatggcagaccgttgtcattaccatgatgtacctatacgccgcccggaacttcagtacactcgtcggtctggctagcccagaacccatggccaatatgtacgaccccgcttactttcgtgcgacctgggtgttgacggctttggatgcgggtttttggacagcgatgaagatacgaaggaagtggctgagagacattgcgagcatgatcttcaccggctactatctaattgccgccgaacgagctgatgagaaggttcgaaaggttcgagggacgctgactgtcgagcatatgcgtgttagctggaataagggcacgacgccatatctcagtgtccttcaaaacctggtccgacctcgatttacgcgctggccgccacgtgcaattcgcatcccgcgtccgaacacaagtgactacaaagatcctgtttcaggctggctctactacgatggacccgtttccgacctcgagcatatcaataagatgatactcgatattccgggcggggggtttgtcgcgatggatccaaggtgcaacgacgacaagctgttttcttgggctggaaagacaggcctgcctatactgagcctcgattatcagaaagctccagagtacccttatccctacggcctgaatgaatgtttcgatgtgtatacgacaataataaagagcaaaggacgttgtataggaatgtcaggtcgcgaaacaccaaaggttgtggtcataggagacagcgctggcggtaacttcgcaactgcgatgaccttgatgatgatagatgccaacatcaataaccgacgcccgagtctcatctccgaagagttgcccctgccatgtggcttggtacttatgtatcctggactcgacatgaatattggcaactggatgtcggatgagcaaatgtcactgatcaaggatcgaaggacgcgaaccacgaataaagcatatcttaagcgaaagagtatgcagtataatgatttagtaggcacacctcatcattcagacgacgaagaagaatacccgttccctcaggtctccgatcctaagcctaaagaaaatgctgccgaggacgacgcccgtttccaaagccctctcccagagttctctcatacaagtccacaggtctggtcgaaagcggaacctccatcaccagtatctcgacgggacaatcgatctctttctcatcaccccgagcctttacgcactcggctagccatggcgtccatgatctcgtacttcaatgatcgcgttttgacacctgagatgatgcgcgccatgatcattctttatattggtccccacaaccgaccagacttctcacaggactactttctctcacccatcctcgcccccgatgccctcttacagcggttccccaagacatacttcctgacaggcgagcgagatccactcgtcgacgatacagtcatattcgccggccgcctccgccgcgccaagcaagcataccattcgcgcaccacatcacaagatatctcgggtctagagaacgtcacagactttgatgagaaagatgtcgcagaagtcgtcctcatcccgggcataagtcacggcttcgcacagttcccgactatatatccaccagcctggaaactcatcgatcgatgcgcacatttcgccgaagaacttcttagcgctgcggaaaaaaatgagacgagacgatcggagttcagacatcattaccggaccgaatcaagcggtgatgaagaccgtgggctcgaaatcaaaatgacgagggctaggggcaggacgattagtgatgaggcgaaggtgaaggaacaggtcgatatgaatggaaacgaagccgaggtagagggtcctaatggtgttagcaagaagaaagggaacgggaagacgagattcgggccaaagtccaagagcattgtcaagctgaatagtacggacgacttgctcggtagacggatgcagggacttacaggggcactaaatgggctgcaggatgaagattaa

SEQ ID NO: 7053 - protein, 714 aa, Muscodor strobelii
  misc_feature: SGI Peptide ID NO. 562106
  misc_feature (215)..(543): Pfam Id: PF07859 Pfam Desc: alpha/beta hydrolase fold
  misc_feature (215)..(342): Pfam Id: PF07859 Pfam Desc: alpha/beta hydrolase fold
  misc_feature (1)..(678): NCBI GI: 261357255 Blast Desc: hormone-sensitive lipase [Verticillium albo-atrum VaMs.102]
  misc_feature (1)..(714): NCBI GI: 110628923 Blast Desc: hormone-sensitive lipase [Magnaporthe grisea]
  misc_feature (1)..(710): NCBI GI: 256730765 Blast Desc: NECHADRAFT_65162 [Nectria haematococca mpVI 77-13-4]
  misc_feature (1)..(714): NCBI GI: 18375989 Blast Desc: related to hormone-sensitive lipase [Neurospora crassa]
  misc_feature (1)..(710): NCBI GI: 171689632 Blast Desc: protein product [Podospora anserina] gi|170944778|emb|CAP70889.1| protein product [Podospora anserina]
  misc_feature (61)..(714): NCBI GI: 39968567 Blast Desc: MGG_02376 [Magnaporthe grisea 70-15] gi|145014040|gb|EDJ98681.1| MGG_02376 [Magnaporthe grisea 70-15]
  misc_feature (36)..(708): NCBI GI: 156048853 Blast Desc: SS1G_08133 [Sclerotinia sclerotiorum 1980] gi|154692532|gb|EDN92270.1| SS1G_08133 [Sclerotinia sclerotiorum 1980]
  misc_feature (61)..(713): NCBI GI: 116205125 Blast Desc: CHGG_10446 [Chaetomium globosum CBS 148.51] gi|88176574|gb|EAQ84042.1| CHGG_10446 [Chaetomium globosum CBS 148.51]
  misc_feature (85)..(711): NCBI GI: 46109378 Blast Desc: FG01571.1 [Gibberella zeae PH-1]
  misc_feature (32)..(658): NCBI GI: 154315892 Blast Desc: BC1G_04518 [Botryotinia fuckeliana B05.10] gi|150846914|gb|EDN22107.1| BC1G_04518 [Botryotinia fuckeliana B05.10]
  misc_feature (214)..(539): SWISSPROT Homolog: EC 3.1.1.79 Hormone-sensitive lipase
MIDHVLGRPSVKSRRLQVLAVLAFWSAYLYRGGGHGPPLIRFLSKFSSKTLTVWQTVVITMMYLYAARNFSTLVGLASPEPMANMYDPAYFRATWVLTALDAGFWTAMKIRRKWLRDIASMIFTGYYLIAAERADEKVRKVRGTLTVEHMRVSWNKGTTPYLSVLQNLVRPRFTRWPPRAIRIPRPNTSDYKDPVSGWLYYDGPVSDLEHINKMILDIPGGGFVAMDPRCNDDKLFSWAGKTGLPILSLDYQKAPEYPYPYGLNECFDVYTTIIKSKGRCIGMSGRETPKVVVIGDSAGGNFATAMTLMMIDANINNRRPSLISEELPLPCGLVLMYPGLDMNIGNWMSDEQMSLIKDRRTRTTNKAYLKRKSMQYNDLVGTPHHSDDEEEYPFPQVSDPKPKENAAEDDARFQSPLPEFSHTSPQVWSKAEPPSPVSRRDNRSLSHHPEPLRTRLAMASMISYFNDRVLTPEMMRAMIILYIGPHNRPDFSQDYFLSPILAPDALLQRFPKTYFLTGERDPLVDDTVIFAGRLRRAKQAYHSRTTSQDISGLENVTDFDEKDVAEVVLIPGISHGFAQFPTIYPPAWKLIDRCAHFAEELLSAAEKNETRRSEFRHHYRTESSGDEDRGLEIKMTRARGRTISDEAKVKEQVDMNGNEAEVEGPNGVSKKKGNGKTRFGPKSKSIVKLNSTDDLLGRRMQGLTGALNGLQDED

SEQ ID NO: 7054 - DNA, 3250 bp, Muscodor strobelii
  misc_feature: SGI EST ID NO. CUFF.17621.2
  misc_feature: Variant of the nucleotide sequence at SEQ ID NO 7052
agatgggcgagttttcattggtcagattccaaaactggccgggcatccactttcacatgccagacagctcccacgctgagaactctcccgccgctgatctaacgaaaacgtcacaagcccttcaagtctcagcagcatctctgtcctcgctcggtgccccggactgtcgccaaaataatccatcatgcagctgactgtgggctcggctgtccgacttcaagcaaaccatttgtctatttctatgtagttaatattgagtctgttgtcgttatcttggctgtggatcttatttcccatatttcgcgatcctatcttcgtttggcgcgccattatcgtcattccgacagcgtaccttttgcttgtgatctttaaaggttctgtccgagtcaagcattcactgcccagcttcgatctcgcctgtcggagcaatggcttgactccatattgtacagaattcgcccgattaatgcattgtatcatttctttccccttttaatacgtgccacaggtcgcatgaccacgagccaacccgtaacggtagcatttgagaaacaacattttgcgtcttagcatatcgcatatacaccacatacaccacatacagcatacaaatctagcatgacagcataacggactctggatgtgcatttttaatcgctcaagatgatagatcacgttctgggcagaccttctgtcaagtctcgccgacttcaggtgctggctgttttagctttctggtcagcttatctgtacaggggtggtggccatggaccaccgttaattcgattcttgtccaaattctcatccaagactttgacagtatggcagaccgttgtcattaccatgatgtacctatacgccgcccggaacttcagtacactcgtcggtctggctagcccagaacccatggccaatatgtacgaccccgcttactttcgtgcgacctgggtgttgacggctttggatgcgggtttttggacagcgatgaagatacgaaggaagtggctgagagacattgcgagcatgatcttcaccggctactatctaattgccgccgaacgagctgatgagaaggttcgaaaggttcgagggacgctgactgtcgagcatatgcgtgttagctggaataagggcacgacgccatatctcagtgtccttcaaaacctggtccgacctcgatttacgcgctggccgccacgtgcaattcgcatcccgcgtccgaacacaagtgactacaaagatcctgtttcaggctggctctactacgatggacccgtttccgacctcgagcatatcaataagatgatactcgatattccgggcggggggtttgtcgcgatggatccaaggtgcaacgacgacaagctgttttcttgggctggaaagacaggcctgcctatactgagcctcgattatcagaaagctccagagtacccttatccctacggcctgaatgaatgtttcgatgtgtatacgacaataataaagagcaaaggacgttgtataggaatgtcaggtcgcgaaacaccaaaggttgtggtcataggagacagcgctggcggtaacttcgcaactgcgatgaccttgatgatgatagatgccaacatcaataaccgacgcccgagtctcatctccgaagagttgcccctgccatgtggcttggtacttatgtatcctggactcgacatgaatattggcaactggatgtcggatgagcaaatgtcactgatcaaggatcgaaggacgcgaaccacgaataaagcatatcttaagcgaaagagtatgcagtataatgatttagtaggcacacctcatcattcagacgacgaagaagaatacccgttccctcaggtctccgatcctaagcctaaagaaaatgctgccgaggacgacgcccgtttccaaagccctctcccagagttctctcatacaagtccacaggtctggtcgaaagcggaacctccatcaccagtatctcgacgggacaatcgatctctttctcatcaccccgagcctttacgcactcggctagccatggcgtccatgatctcgtacttcaatgatcgcgttttgacacctgagatgatgcgcgccatgatcattctttatattggtccccacaaccgaccagacttctcacaggactactttctctcacccatcctcgcccccgatgccctcttacagcggttccccaagacatacttcctgacaggcgagcgagatccactcgtcgacgatacagtcatattcgccggccgcctccgccgcgccaagcaagcataccattcgcgcaccacatcacaagatatctcgggtctagagaacgtcacagactttgatgagaaagatgtcgcagaagtcgtcctcatcccgggcataagtcacggcttcgcacagttcccgactatatatccaccagcctggaaactcatcgatcgatgcgcacatttcgccgaagaacttcttagcgctgcggaaaaaaatgagacgagacgatcggagttcagacatcattaccggaccgaatcaagcggtgatgaagaccgtgggctcgaaatcaaaatgacgagggctaggggcaggacgattagtgatgaggcgaaggtgaaggaacaggtcgatatgaatggaaacgaagccgaggtagagggtcctaatggtgttagcaagaagaaagggaacgggaagacgagattcgggccaaagtccaagagcattgtcaagctgaatagtacggacgacttgctcggtagacggatgcagggacttacaggggcactaaatgggctgcaggatgaagattaaggaaggaggatgggttgttgcataggcctacaaattcgcctaaatacaccaaaagtatgtactcgcagaaaagtcacgctttgagtgaagatgtacatcgggtgaaagtcgtatatattttacggaagtaccgaataactatccaaaatagaatacagtatgggatatcaaatacaaagtcgttgtcgcattaccgttccctgactgctatgcgccgttcttaacagacgcaaacagttcatataacagattctctcccatctaacctacggagtagagtagcggaattgttggtgggaaatgggtatcctgatgacgattgcgcgcgctgcgatgacatcgttacgtttctcatgcgaggactaaaacttcattcgtaatttattcaaaaggagcgcatgtaaaagcgccgcgaacagacccggtgtggtagctatttatc

SEQ ID NO: 7055 - DNA, 420 bp, Muscodor strobelii
  misc_feature: SGI cDNA ID NO. 562107
  misc_feature: Elevated expression when VOC is produced
  misc_feature: Encodes the peptide sequence at SEQ ID NO 7056
atggcgcgctctgatgaagcgcatgcgttcttctgcgctgtctacaacgctgtgcgcgagatacctgaggggaaagtaaccacttatgcacatatcgcgaaactcgtgggcactccacagcgacctcgccaagtcggtgtctgcctcaagcacctctcaaacgatgcggatgcacgttatcactcggacaatgtcccttggcagcgggtgatcaactcgaaaggtaacatatcaaatcgatctcaaccttcaggcgccaggaatcaggccacagcactacgggcagagggagtcacagtcatcacaggtgcattgggggagctgagtgtggatttcggtgaatacgggtggtttccaaggtcactgccttctgagggagatgaaatttcagagacagacacagacgacgatgaaggttga

SEQ ID NO: 7056 - protein, 139 aa, Muscodor strobelii
  misc_feature: SGI Peptide ID NO. 562107
  misc_feature (7)..(101): Pfam Id: PF01035 Pfam Desc: 6-O-methylguanine DNA methyltransferase, DNA binding domain
  misc_feature (7)..(46): Pfam Id: PF01035 Pfam Desc: 6-O-methylguanine DNA methyltransferase, DNA binding domain
  misc_feature (1)..(139): NCBI GI: 116205377 Blast Desc: CHGG_10572 [Chaetomium globosum CBS 148.51] gi|88176700|gb|EAQ84168.1| CHGG_10572 [Chaetomium globosum CBS 148.51]
  misc_feature (1)..(129): NCBI GI: 164422879 Blast Desc: NCU11088 [Neurospora crassa OR74A] gi|157069859|gb|EDO64910.1| NCU11088 [Neurospora crassa OR74A]
  misc_feature (1)..(131): NCBI GI: 256730494 Blast Desc: NECHADRAFT_29922 [Nectria haematococca mpVI 77-13-4]
  misc_feature (1)..(125): NCBI GI: 145610887 Blast Desc: MGG_00838 [Magnaporthe grisea 70-15] gi|145018222|gb|EDK02501.1| MGG_00838 [Magnaporthe grisea 70-15]
  misc_feature (1)..(128): NCBI GI: 46109614 Blast Desc: FG01689.1 [Gibberella zeae PH-1]
  misc_feature (1)..(125): NCBI GI: 156044114 Blast Desc: [Sclerotinia sclerotiorum 1980] gi|154694549|gb|EDN94287.1| [Sclerotinia sclerotiorum 1980]
  misc_feature (1)..(125): NCBI GI: 171689814 Blast Desc: protein product [Podospora anserina] gi|170944869|emb|CAP70981.1| protein product [Podospora anserina]
  misc_feature (1)..(136): NCBI GI: 238492267 Blast Desc: MGMT family protein [Aspergillus flavus NRRL3357] gi|220695864|gb|EED52206.1| MGMT family protein [Aspergillus flavus NRRL3357]
  misc_feature (1)..(123): NCBI GI: 119487405 Blast Desc: MGMT family protein [Neosartorya fischeri NRRL 181] gi|119410652|gb|EAW20598.1| MGMT family protein [Neosartorya fischeri NRRL 181]
  misc_feature (1)..(138): NCBI GI: 119180584 Blast Desc: CIMG_08912 [Coccidioides immitis RS]
  misc_feature (6)..(105): SWISSPROT Homolog: EC 3.1.21.7 Deoxyribonuclease V
  misc_feature: Useful for introducing or modulating the production of volatile compounds
MARSDEAHAFFCAVYNAVREIPEGKVTTYAHIAKLVGTPQRPRQVGVCLKHLSNDADARYHSDNVPWQRVINSKGNISNRSQPSGARNQATALRAEGVTVITGALGELSVDFGEYGWFPRSLPSEGDEISETDTDDDEG

SEQ ID NO: 7057 - DNA, 2120 bp, Muscodor strobelii
  misc_feature: SGI EST ID NO. CUFF.17554.0
  misc_feature: Variant of the nucleotide sequence at SEQ ID NO 7055
ctctccttcatcccatcataactaataataagagaaatccagttcaagcgaggcaatcgtgcaaacatcatccatatgaagtcaagactgacctgcagctacacattcccgtcgccaacccaccttctacagcttgtgacagtgacgttaccaagtcctccttacgtcacaattgtgactctcatactgacatcaatactgccaactcatcctcatcacctccaattgtccacatactcgagtccgcccaatggcgcgctctgatgaagcgcatgcgttcttctgcgctgtctacaacgctgtgcgcgagatacctgaggggaaagtaaccacttatgcacatatcgcgaaactcgtgggcactccacagcgacctcgccaagtcggtgtctgcctcaagcacctctcaaacgatgcggatgcacgttatcactcggacaatgtcccttggcagcgggtgatcaactcgaaaggtaacatatcaaatcgatctcaaccttcaggcgccaggaatcaggccacagcactacgggcagagggagtcacagtcatcacaggtgcattgggggagctgagtgtggatttcggtgaatacgggtggtttccaaggtcactgccttctgagggagatgaaatttcagagacagacacagacgacgatgaaggttgaaatggaccatggccaattgttactgttattattactacgactacggagtctaaacatgtgcctacgcttcgcggcagacgggatgactactttcgcagacacgaattggacaacacagtcgatagcggcgggcagtgattctaaaacacgatgcaattagctaatagcctcttaattacgcatcataattatgaataaatgagtcttcttcagatagcggttggacataaatgattccacatggtgtttcagaacaggtctgtgaaatatgtgttttcatcatagaagcaggaggtattgagaaaagaacagatgcacataccattgtttgaaaggaacaggttcatgatgaactcttactgttgatcctaacggcatcaaagtcgagaatgtacttcatatcttttcgtaccatgcctactcttccatcacatcagactttctcttcttcgagcttgatgcaaagaagctgtccatcgtacgttgcttcgagtcgaacttggcactgccgataccgccccgtgtctttttcaagccaacgaggtgatcgagactgttgacaacttcgattgccatatgccatctgggaagtgcatctgcactgacaaattcccccgccggcgtggtcagagaagcctgtaaatatcctgtgttggaccaagcgacgtgataatccgagccgactcggacaccgacttgtggtgcgaatttcctcgattcttccgtcatgtcaggcttcattgggtagcgtgcaagcatgaccctcagtaagacattgaggacgatgccatgggacacgatgacaattgtataattttgcgccacttgtggtttcaaatactggtcaagtatcggggtgaaatgcaggtcgaggaaccggtcaatgcgcacacgcatctgttcagcagtctctgcaccgtcatctttctcccgcatcgtgaacttcttgccctctgatagcccatagtctttctcgcgcagctcgggaaaacgggcaactacgggcagtggcgatgacaacgtagtatccagagacccgcaagcttcacggacagcctccgcggtttgatatgcgcgctgcaagtcggaagctaagacatgtcgaatgggactaatgccgacggcacgtgccgcgaggtgagcacctaatcgcttcgcttggagaacaccatgatttgtcaacgcagaatcgcgagaacctgcactgacggacgcgttagctgtgggcgggcggattgaaagaggggcagatagacggcttactataagccagctacattatcgacagattcgccatgacgaataagcaatacgcgcattgccacgccgcatcttacagagatgtgggaggcgcttgcaggtgcatatattgcatgaaaagaagagagaaaagacggtactggggaaaaaattggtgatagtttgttttatggtggggcgtcttgagagg

SEQ ID NO: 7058 - DNA, 843 bp, Muscodor strobelii
  misc_feature: SGI cDNA ID NO. 562108
  misc_feature: Encodes the peptide sequence at SEQ ID NO 7059
atgcgcgtattgcttattcgtcatggcgaatctgtcgataatgtagctggcttatatgcaggttctcgcgattctgcgttgacaaatcatggtgttctccaagcgaagcgattaggtgctcacctcgcggcacgtgccgtcggcattagtcccattcgacatgtcttagcttccgacttgcagcgcgcatatcaaaccgcggaggctgtccgtgaagcttgcgggtctctggatactacgttgtcatcgccactgcccgtagttgcccgttttcccgagctgcgcgagaaagactatgggctatcagagggcaagaagttcacgatgcgggagaaagatgacggtgcagagactgctgaacagatgcgtgtgcgcattgaccggttcctcgacctgcatttcaccccgatacttgaccagtatttgaaaccacaagtggcgcaaaattatacaattgtcatcgtgtcccatggcatcgtcctcaatgtcttactgagggtcatgcttgcacgctacccaatgaagcctgacatgacggaagaatcgaggaaattcgcaccacaagtcggtgtccgagtcggctcggattatcacgtcgcttggtccaacacaggatatttacaggcttctctgaccacgccggcgggggaatttgtcagtgcagatgcacttcccagatggcatatggcaatcgaagttgtcaacagtctcgatcacctcgttggcttgaaaaagacacggggcggtatcggcagtgccaagttcgactcgaagcaacgtacgatggacagcttctttgcatcaagctcgaagaagagaaagtctgatgtgatggaagagtag

SEQ ID NO: 7059 - protein, 280 aa, Muscodor strobelii
  misc_feature: SGI Peptide ID NO. 562108
  misc_feature (2)..(164): Pfam Id: PF00300 Pfam Desc: Phosphoglycerate mutase family
  misc_feature (1)..(276): NCBI GI: 85110051 Blast Desc: NCU09489 [Neurospora crassa OR74A] gi|28924882|gb|EAA33977.1| conserved [Neurospora crassa OR74A] gi|38524264|emb|CAE75728.1| related to phosphatase [Neurospora
  misc_feature (1)..(275): NCBI GI: 256730700 Blast Desc: NECHADRAFT_65054 [Nectria haematococca mpVI 77-13-4]
  misc_feature (1)..(274): NCBI GI: 46109620 Blast Desc: FG01692.1 [Gibberella zeae PH-1]
  misc_feature (1)..(276): NCBI GI: 171689812 Blast Desc: protein product [Podospora anserina] gi|170944868|emb|CAP70980.1| protein product [Podospora anserina]
  misc_feature (1)..(267): NCBI GI: 145610885 Blast Desc: MGG_11485 [Magnaporthe grisea 70-15] gi|145018221|gb|EDK02500.1| MGG_11485 [Magnaporthe grisea 70-15]
  misc_feature (1)..(276): NCBI GI: 261357124 Blast Desc: phosphoglycerate mutase family protein [Verticillium albo-atrum VaMs.102]
  misc_feature (1)..(272): NCBI GI: 116205375 Blast Desc: CHGG_10571 [Chaetomium globosum CBS 148.51] gi|88176699|gb|EAQ84167.1| CHGG_10571 [Chaetomium globosum CBS 148.51]
  misc_feature (1)..(266): NCBI GI: 242810135 Blast Desc: phosphoglycerate mutase family protein [Talaromyces stipitatus ATCC 10500] gi|218716143|gb|EED15565.1| phosphoglycerate mutase family protein [Talaromyces stipitatus
  misc_feature (1)..(266): NCBI GI: 212537131 Blast Desc: phosphoglycerate mutase family protein [Penicillium marneffei ATCC 18224] gi|210068463|gb|EEA22554.1| phosphoglycerate mutase family protein [Penicillium marneffei
  misc_feature (1)..(274): NCBI GI: 169624864 Blast Desc: SNOG_15697 [Phaeosphaeria nodorum SN15] gi|111055952|gb|EAT77072.1| SNOG_15697 [Phaeosphaeria nodorum SN15]
  misc_feature (3)..(267): SWISSPROT Homolog: EC 5.4.2.1 Phosphoglycerate mutase
MRVLLIRHGESVDNVAGLYAGSRDSALTNHGVLQAKRLGAHLAARAVGISPIRHVLASDLQRAYQTAEAVREACGSLDTTLSSPLPVVARFPELREKDYGLSEGKKFTMREKDDGAETAEQMRVRIDRFLDLHFTPILDQYLKPQVAQNYTIVIVSHGIVLNVLLRVMLARYPMKPDMTEESRKFAPQVGVRVGSDYHVAWSNTGYLQASLTTPAGEFVSADALPRWHMAIEVVNSLDHLVGLKKTRGGIGSAKFDSKQRTMDSFFASSSKKRKSDVMEE

SEQ ID NO: 7060 - DNA, 1675 bp, Muscodor strobelii
  misc_feature: SGI EST ID NO. CUFF.17555.1
  misc_feature: Variant of the nucleotide sequence at SEQ ID NO 7058
cctctcaagacgccccaccataaaacaaactatcaccaattttttccccagtaccgtcttttctctcttcttttcatgcaatatatgcacctgcaagcgcctcccacatctctgtaagatgcggcgtggcaatgcgcgtattgcttattcgtcatggcgaatctgtcgataatgtagctggcttatatgcaggttctcgcgattctgcgttgacaaatcatggtgttctccaagcgaagcgattaggtgctcacctcgcggcacgtgccgtcggcattagtcccattcgacatgtcttagcttccgacttgcagcgcgcatatcaaaccgcggaggctgtccgtgaagcttgcgggtctctggatactacgttgtcatcgccactgcccgtagttgcccgttttcccgagctgcgcgagaaagactatgggctatcagagggcaagaagttcacgatgcgggagaaagatgacggtgcagagactgctgaacagatgcgtgtgcgcattgaccggttcctcgacctgcatttcaccccgatacttgaccagtatttgaaaccacaagtggcgcaaaattatacaattgtcatcgtgtcccatggcatcgtcctcaatgtcttactgagggtcatgcttgcacgctacccaatgaagcctgacatgacggaagaatcgaggaaattcgcaccacaagtcggtgtccgagtcggctcggattatcacgtcgcttggtccaacacaggatatttacaggcttctctgaccacgccggcgggggaatttgtcagtgcagatgcacttcccagatggcatatggcaatcgaagttgtcaacagtctcgatcacctcgttggcttgaaaaagacacggggcggtatcggcagtgccaagttcgactcgaagcaacgtacgatggacagcttctttgcatcaagctcgaagaagagaaagtctgatgtgatggaagagtaggcatggtacgaaaagatatgaagtacattctcgactttgatgccgttaggatcaacagtaagagttcatcatgaacctgttcctttcaaacaatgaatcactgcccgccgctatcgactgtgttgtccaattcgtgtctgcgaaagtagtcatcccgtctgccgcgaagcgtaggcacatgtttagactccgtagtcgtagtaataataacagtaacaattggccatggtccatttcaaccttcatcgtcgtctgtgtctgtctctgaaatttcatctccctcagaaggcagtgaccttggaaaccacccgtattcaccgaaatccacactcagctcccccaatgcacctgtgatgactgtgactccctctgcccgtagtgctgtggcctgattcctggcgcctgaaggttgagatctgcgacatgagcctatcagtcattttgatcatgtacgtagaacggggcgttgttgtaaatgcataccgatttgatatgttacctttcgagttgatcacccgctgccaagggacattgtccgagtgataacgtgcatccgcatcgtttgagaggtgcttgaggcagacaccgacttggcgaggtcgctgtgctgtaagcatatgtgcatcagtaagccgcaagatatttgatgtatgtaatgacagccgaagtagtgttgcatttcatgcaagaagggtgcgagg

SEQ ID NO: 7061 - DNA, 813 bp, Muscodor strobelii
  misc_feature: SGI cDNA ID NO. 562109
  misc_feature: Elevated expression when VOC is produced
  misc_feature: Encodes the peptide sequence at SEQ ID NO 7062
atggtagaagcaagcacactacaaacgcagtggtatgctctgcttgacgacgacaccttttttccacatttagccccactgtctgatgcactatccaagtttgatcacaatcaagacgtgtacgttggtgcactggccgaggaatttggctcggtcaagaattttggtatcatggcttatggaggtgctggcgcttacttatcggctcatctcgcaagaaaactcgctgctccggaactccgcttgccttgcatcgaagagtctccttcgaatctaggagatattattttgaagaattgtatctatcgacacactcgaacgaaactgacaattcttcccggcttgtggcaacacgatttactgcatgatctacgcggcttttatgagtctgggctcgaaccgctcaatttccatcattggaagagttggtatcatgagcctgttgaacagatgtcgaaagctacggacttctgcggtgagtgtttccttcaaagatggacattcggagacgatacggtgctatcaaatggttactccatcacgacataccgccaaggcctagcagacattgaccttgataagatcgagcggacttggaagcagatatacgaagaccaggagccccagtacgaatttgttatcggaccattacgggagagaatcaaggatgaggatagaaaaacgtaccggctgcaggcgaccgaagtcacaggtaacatgatgagacagctttatatccaccaagaagaggtaaatgagggcgagactcgtcaatctgatgacgaagtctttgaactgatatggattagataa

SEQ ID NO: 7062 - protein, 270 aa, Muscodor strobelii
  misc_feature: SGI Peptide ID NO. 562109
  misc_feature (1)..(268): NCBI GI: 261353944 Blast Desc: conserved [Verticillium albo-atrum VaMs.102]
  misc_feature (1)..(268): NCBI GI: 39967306 Blast Desc: MGG_01977 [Magnaporthe grisea 70-15] gi|145012840|gb|EDJ97481.1| MGG_01977 [Magnaporthe grisea 70-15]
  misc_feature (1)..(268): NCBI GI: 46122785 Blast Desc: FG05770.1 [Gibberella zeae PH-1]
  misc_feature (1)..(268): NCBI GI: 256727197 Blast Desc: NECHADRAFT_105871 [Nectria haematococca mpVI 77-13-4]
  misc_feature (5)..(268): NCBI GI: 164426963 Blast Desc: NCU02213 [Neurospora crassa OR74A] gi|157071548|gb|EAA30192.2| [Neurospora crassa OR74A]
  misc_feature (8)..(268): NCBI GI: 238485778 Blast Desc: conserved [Aspergillus flavus NRRL3357] gi|220699006|gb|EED55345.1| conserved [Aspergillus flavus NRRL3357]
  misc_feature (8)..(268): NCBI GI: 169771639 Blast Desc: [Aspergillus oryzae RIB40] gi|83768148|dbj|BAE58287.1| protein product [Aspergillus oryzae]
  misc_feature (8)..(268): NCBI GI: 70993924 Blast Desc: conserved [Aspergillus fumigatus Af293] gi|66849443|gb|EAL89771.1| conserved [Aspergillus fumigatus Af293] gi|159125274|gb|EDP50391.1| conserved [Aspergillus A1163]
  misc_feature (9)..(268): NCBI GI: 169764449 Blast Desc: [Aspergillus oryzae RIB40] gi|83764550|dbj|BAE54694.1| protein product [Aspergillus oryzae]
  misc_feature (8)..(268): NCBI GI: 115492349 Blast Desc: conserved [Aspergillus terreus NIH2624] gi|114197662|gb|EAU39362.1| conserved [Aspergillus terreus NIH2624]
  misc_feature: Useful for introducing or modulating the production of volatile compounds
MVEASTLQTQWYALLDDDTFFPHLAPLSDALSKFDHNQDVYVGALAEEFGSVKNFGIMAYGGAGAYLSAHLARKLAAPELRLPCIEESPSNLGDIILKNCIYRHTRTKLTILPGLWQHDLLHDLRGFYESGLEPLNFHHWKSWYHEPVEQMSKATDFCGECFLQRWTFGDDTVLSNGYSITTYRQGLADIDLDKIERTWKQIYEDQEPQYEFVIGPLRERIKDEDRKTYRLQATEVTGNMMRQLYIHQEEVNEGETRQSDDEVFELIWIR

SEQ ID NO: 7063 - DNA, 1663 bp, Muscodor strobelii
  misc_feature: SGI EST ID NO. CUFF.17506.0
  misc_feature: Variant of the nucleotide sequence at SEQ ID NO 7061
gctggatatgtctacatttactacatgtatgccatatttctcattatagaaatcttcatattgacgcatgcaacaaacattttagtccattatgctgcttacggggtgtcatcgtgtgcgcatagcagcagccgtcgttttcttcctcttcatttggtatttgatgctgcataataaggcatggcgactgtcattggcagtctatccacccactctaccgttatcagttgagtttctggaacgagcgaatcgagagttggtgttgggtctctcaccaagaatcaagtatgggaggcgatgtatcaaagctattccatcgtccccaggcgacagacaaaaagttggcaacaatgctgagcgtcttatctcagacatggtgactgtgcaaatggatagtacagagagcaaggcagctatcccgcaagattgcacgccgataagtctcgcggttgcgccagcgtatcaagcatcaatgcaatactccaatatgatttttggtatatcgactctttacaagaggctggagcagtccttagagtccattgcccactggagcgctaataaagggacccaagtgatagtcattgtaacagatggcgacatatatgcaaatgagatgaagcgactcgaagcgaggtatcggaagcatggggtgctcgctacgttcatggactcgacgaacaggactcttaccacttcccaattgcatttcacaattctggaacaaatggtagaagcaagcacactacaaacgcagtggtatgctctgcttgacgacgacaccttttttccacatttagccccactgtctgatgcactatccaagtttgatcacaatcaagacgtgtacgttggtgcactggccgaggaatttggctcggtcaagaattttggtatcatggcttatggaggtgctggcgcttacttatcggctcatctcgcaagaaaactcgctgctccggaactccgcttgccttgcatcgaagagtctccttcgaatctaggagatattattttgaagaattgtatctatcgacacactcgaacgaaactgacaattcttcccggcttgtggcaacacgatttactgcatgatctacgcggcttttatgagtctgggctcgaaccgctcaatttccatcattggaagagttggtatcatgagcctgttgaacagatgtcgaaagctacggacttctgcggtgagtgtttccttcaaagatggacattcggagacgatacggtgctatcaaatggttactccatcacgacataccgccaaggcctagcagacattgaccttgataagatcgagcggacttggaagcagatatacgaagaccaggagccccagtacgaatttgttatcggaccattacgggagagaatcaaggatgaggatagaaaaacgtaccggctgcaggcgaccgaagtcacaggtaacatgatgagacagctttatatccaccaagaagaggtaaatgagggcgagactcgtcaatctgatgacgaagtctttgaactgatatggattagataaaacatatgaggggtgcgcaagctcagacttcgcttgttggtatgataatatatatggaaaatatcctattatccgcctccggatgaatactacctgattagctaatgcgttcgtgatcctgca

SEQ ID NO: 7064 - DNA, 345 bp, Muscodor strobelii
  misc_feature: SGI cDNA ID NO. 562110
  misc_feature: Elevated expression when VOC is produced
  misc_feature: Encodes the peptide sequence at SEQ ID NO 7065
atgcagtccgtccttacccaagccaagatgtcgaccaagatgtcgagcatgagacaaccatcgccttcttccccaacaaagaggcgtgcgcgtgtacactttgagatcgaagacaacgttcccgagttctccggccccgacttcctatctctatacaaaggctcttcaagccacgaagtcaccatctccgcattgtgttcagtcggtctcttcgtcgttgttagccaaggcttcttcaacggccaccagcttggcataattgccattgtcttcatggtccacgcagtcatggccctagctttccagggtgctaagaagggcatctcgcgtgttggatctttctaa

SEQ ID NO: 7065 - protein, 114 aa, Muscodor strobelii
  misc_feature: SGI Peptide ID NO. 562110
  misc_feature: Useful for introducing or modulating the production of volatile compounds
MQSVLTQAKMSTKMSSMRQPSPSSPTKRRARVHFEIEDNVPEFSGPDFLSLYKGSSSHEVTISALCSVGLFVVVSQGFFNGHQLGIIAIVFMVHAVMALAFQGAKKGISRVGSF

SEQ ID NO: 7066 - DNA, 1369 bp, Muscodor strobelii
  misc_feature: SGI EST ID NO. CUFF.17525.0
  misc_feature: Variant of the nucleotide sequence at SEQ ID NO 7064
tgcctaacagtaaatatacattgaagcaatgtttgatcctcgcgcccacctaccatattcaacctcacgacatgcgtcggtgcctttccgagccacacactcacttgttgctatctggagatgccgactgcctcgtggggaaccctgcatggtgaccggggctgaccggacacaggtcgtactttcggtaaccttgttgactttctgtccgtattgaatctgcttagcttacgcgcgcaatgcatacatactcgcatgggaggtatctgcccttgtcttacctctggtcatccaggactttgcttacactaggcactgcaattgggtccatgcgtgttacatgatagctaaggctgcccaattagcagcgcctccggatgacagccgttggtcgtagtcagagtgtgagagaggggcgaagcttttgtgtgagtcctattcattcaaaaagccgtgatatcccctcgttgtcagatgaattattctgcctagtatcatcatcttccaagagcatctcatacccaagacaatcttggcttcatcatttacatacatgtcagataatcaactccgcaacttcgacattctagaacattcacacagaccaccacattcatagtcaagatgcagtccgtccttacccaagccaagatgtcgaccaagatgtcgagcatgagacaaccatcgccttcttccccaacaaagaggcgtgcgcgtgtacactttgagatcgaagacaacgttcccgagttctccggccccgacttcctatctctatacaaaggctcttcaagccacgaagtcaccatctccgcattgtgttcagtcggtctcttcgtcgttgttagccaaggcttcttcaacggccaccagcttggcataattgccattgtcttcatggtccacgcagtcatggccctagctttccagggtgctaagaagggcatctcgcgtgttggatctttctaaataccattgcagcagggtcagaagtccgggtgacttgaccctcaatgcaaaccattttccattcttagacttgcgaaagttgggttagaggacttttagggatagaacggcgttcgggggcaacaaacagaagcacgatagagtatcatcgcctctcatttacgttgcttgtttacaaacgggttgggtcacacgatgtgacggaaggcttctgcggaacatagaagagtcacgaaattatgcataccattcattgggttgggttgggtttggatatcctgctttccatgggccaatggagagcttagatcatcgcatgtcacacatggacaaagatagatgatctcaaattgaagacgactgaaatagtcacatttacaacttcatttgcatcttcaca

SEQ ID NO: 7067 - DNA, 669 bp, Muscodor strobelii
  misc_feature: SGI cDNA ID NO. 562111
  misc_feature: Encodes the peptide sequence at SEQ ID NO 7068
atgactttcgcgcaattcgcaatcctaccaaccgagctccgctgggagatctggttcatggccctccaatcaaatgcgcgacggcgactcgtagccgagcagaacttacggatctttccaacgctagatctcatagcgtcaccactcttctcggtcaatatcgagagccgcgaagctgcgcggatcttctatagagtgcgcgtcgaggtgtatcgacggagaactcgcccatattactccgacgcagccgacgacgaggacctacggctcgccgaagattacagaggagtggtgtacctgagcccggatctagacgccatgatatcgatgcatccgcgcaccgagatcaggagtccgaacgatctgaaattcttcgggaacctggatccgaacctggagttcgaccactcggaccgatcgaaggctacggcttggcgtcaccgcacggcgccgatgagggaggagacgagatgtcggtttcggcgcacgcctaatcactggtgtctgttgacgcaggccgcgaagaggcagacgagggtgcaggactgggtcgacctgagtgattggatgcttacgtttgggccggtggagtataggagggcttgtgagctcttgaagagtatgcggattaatacatgggagtttgcgcaggtctttgggtggtattga

SEQ ID NO: 7068 - protein, 222 aa, Muscodor strobelii
  misc_feature: SGI Peptide ID NO. 562111
MTFAQFAILPTELRWEIWFMALQSNARRRLVAEQNLRIFPTLDLIASPLFSVNIESREAARIFYRVRVEVYRRRTRPYYSDAADDEDLRLAEDYRGVVYLSPDLDAMISMHPRTEIRSPNDLKFFGNLDPNLEFDHSDRSKATAWRHRTAPMREETRCRFRRTPNHWCLLTQAAKRQTRVQDWVDLSDWMLTFGPVEYRRACELLKSMRINTWEFAQVFGWY

SEQ ID NO: 7069 - DNA, 9303 bp, Muscodor strobelii
  misc_feature: SGI EST ID NO. CUFF.17671.1
  misc_feature: Variant of the nucleotide sequence at SEQ ID NO 7067
tcgctgctctgcagtgtaaatttctcctacaagcctttttgaagcccattagaccacacaattgaaaccattttcatgagaaaataatgattgcctcgcaccatcaagtgggatgggatcggagctcgtgactgatattgaagcgttgctgtgattgacgcggttggcaaacttgaaaggtacaagcaaattcgttgtgatgcctgcagcacgcgacgcgctaggcgaagcgtggcggcgtggtgtcatctgtgagcacagcgtattaggattagcgtctcggacagacccctgattacccctggctagcgtgatcaaacgttatcatcattcgccatcgatcaacgctctccactgaatctggtgcgataacaggcacttgggtctgatcgcgttcctgaaaagggttgggtacctgaatgtgtcgaactaatgtggtgtcttgccgcagttgagaattgcatgtccacatccccagcacctattccgctgtcagtccaaagaaattcagagaggtggattgcgacaggaaacaagagagaaggaagaaaaaagaatcacaagcaaacccaaccacatccagtctcgcaattccttcactcctcctcacgttctctggaccctgcattcccacttcttagccaatctggaccccagacattggtgttgtgggtgtcgttggtgtccaactgttgtgggcactgggcactgggcatcgcgctactcgagcttgtcaatttccacccggctgtctgcaaacttcaaagtgctgatgagcacaaagcacagagcacagagcagcagccaagttgatgatcttccaacgggatcacgaccctggccttacaacgtgacaagcctgtcaacctggacaagcccttttacccctaatccctcctactccgaatccagtcacaatctccatcactccatctcccagcccgacttttgaagtttttcttttctctccaagctccagtgcacagcacagcaccgtgccttgttgttccttttctctcaccatcccttgctgtggcctgtccggtgttgttgggacttgtgtcggttgattgcagccgtcgatgcttcacgcgtcgttgccaccaagtcgcccaatatccacagcatagtcactgtctctctccctctgagtgttgcatccccagccgatcgatctgcgacaagacaactgcgacatatgacgcctgtatcctgaccacatcctaatagcctgacccaggtctcaaagggcgtccgtcattacctctgcagcgttgtgtgtttcctcttggttcggccggtgtctttttttgcatgtgcgtgtcacaccgccggtgcgcattgcattccaatccttcatcgtaatcatccgtttcatccgcaccagcaaccgtctctctgccgcgccatccctggtcaccctgtcgagccgccagtcacaggcgccgaccacttcctgtactttgcggcgttccgtgtgcaggcagcattttcggcggttgcgcttggcactgttgccaacatggccacctctccgcccacttcacctggagtgaagtcgccgcctccatcgaggccgcagagtatgatgatgatgaagccagcgccccgaagtaatagtcggatgagcatgtcgagtaagatgggcggtggaagcagagcctcggacgaagagggaggtcgcacagcagtcaaagttgcgatccgtgtgcgaccacccttaaaaccgactgatcccggcttcgatttgatcccacagcgattccaggtgtcgagagtgcagacgatgtcaaacacaagcattgccattgattcacagcaaggacattcgcagcagggaaagaaggtcttcgtcttcgatcgtgtgtttggtcccgagacgggccaggatggtgtttgggagtacctcaaggagagcatcaatgcatttgttcaaggatacaacgtgtcgttacttgcctacggccagtctggcgcaggtaaatcttacaccatgggcacatcaggtccatcagagcaaggagacctcgagtcaatgggtgtcatcccccgggcggcgactgaactcttcgagagactagagggtcctgcccctgccaagaactcaaatcgcaactcaatgtcccagctccgggcaccttccagatattccatgcagccaccagcccctaaggccgacaggaactggcaaatgaaggcaacttacgtggaaatctacaaggaatcgcttcacgacctgcttctgcccgatagcaccggcccgagcgagcgtggcgcaattgctatccgtgaggataccaagggaaatattctattgaccggcctgcgccagatggacatcaactcggtggatgatctcatgaacgccctgaattttgggtccactatccgacagactgatgcaacggcgatcaacgcaaagtcctctcgctcgcatgccgtgtttaccttgaacctcgttcagcgcaagcccaaaacgcagaccccgcagcatgacaagcggatgtcggtaccgttggaggccatgtcgggtggtgacacgtgggttacaaccgacagcaagctgcattttgtcgatttagccggcagcgaacgcctgaagaacactggtgcccagggtgagcgtgccaaagagggtattgacatcaatgcaggtttggcagctctgggcaaggtgatttcgcaactctcgtcccgccagcaagggtcccacgtatcatatcgcgactccaagttgacccgactgctccaagactcgctgggcggtaatgccataacgtacatgattgcatgtgtgactccagccgaatttcacctgaacgaaacactcaatacggtgcactatgcgcagagagctcgggcaattcagagcaagccaagaattcagcaggttgaggaaggggacaagcaagccattattgagcgcctcaaagccgaagttgcttttcttcgtgaagcactcaagagccattcggccgcggaaggcggtgtgggggagaggcgcaatgtggtgacaggcgggaggtccgagcgacaccacgaacgggagtcggacctccagaaccaattacttgattctcaggaaaattataacagtctaagtaagcgtcatgcgaagcttatttcggagatggccaaggcccggaacgacgaagctcttgacaaccacaccatggaaggaaccttggctgacagtgcaaccgagcgtctgaaccgctccacctcattctcccacgccgtggaacaaatggtgttggagtatgagacgaccattgagtctctccaatccaactactccgaaaaccgcaatgcactctccgcagcagaaacccgcatcttgcaagaagaaacgaagtatgcataccttcataaagtgaacgagcaacttcgcgagcgggtgcagaaactcatggcgcgtgaagaagacacggagaactatctgaaggaccttgaggaaaagctcgacggccacaccaatggcgaggcaaagaacgccaccatcatcacagagctgcgcaaggaactcggcaagctgcgagcgaacgaaggagccaatgaagactacatttcgacgcttgaggagcgtcttgcggaggctgagcaagatgccgaattgatgcagagcgaaatggagaaattagaggccgtcattgaacgacaacgaagccttggacagctcgacagtctcctgtacgaattggaccacatgaagccagaaggaaaatcgaagcagccggacgccgagggagagcacggcgcgaccgttggtcatcgtcgaacattctcggagcgatcgcacaagagccacgcaagtcgttccagtcaaaatcagccagatgtcctacccaaagttgccgagactgccgaaacaaagtccgtcatcgaggaagaatcgcccgagcagactgcggtccaggagatgcccaatggcgatggtcaatccagaaatgaatctcaagagggatctgaacagaatcccaccgccaccacttctgcggagatcggagagcaaggatatccgcctcagagccctgctcagcgcgagttcgttaacgacaagctggagagcgtgaaccaggaactcgttgatcttcaggttaagcatgaaaacactattacagcttatgaccacttgagcgccaagtacgaagaggctctgagagccatggctgaaatgcaagaccagatcgacgaggcacgccaccctaacaggcaacgcgactccttgctgtctgtcgctaccccaaacgaatcacgcccgccctcttttttatcggattcgaagtccagcgttggcaaagacgagacctatatctcctcgcgatcgctctcctcggaattgtcatcagctatggactcccctgctactccggatattacagatgttgagaccgaagctcccaaaccatcggaatcgagcgagactctcactgtcactgctgatgactcagttagtgataatgaggagcttgccgctgaggttgaaaagctaaagctgctcgcaagcgagcgagaagttgccaagaaagagctcaatgaacgctatattcaactggagaagcaacaccaagaatcgttggatgtggtggaggagctcaagacagagcttgctaaggccaaatatgctgaacctccatcacccagagctggcgctacgcccgtcattcgcaggaagtccagtcaaaatgtcatggtcattgatcgagcgcatagatcgttcgcggcgcttcgtaacatcgctgccgagaactttgagactgaccccgacgtgatgcaaaactttgaggtcaacctgaactcgtgcatccatgagttacatgccaggtctgaacgcatccaggagctggaagcaagcctcgcaagcaacaagaaagaaatggagagcacaaaagccatcatttccggactgactcgcgagcggtcaagcttgaagtcaagcccgattgatatcagcgtcgtggctaccatgcgcgatcagctggagaataatgagcaacaactcaagaccatgaaggagtcacacgaggcccgcgagaaggaactcttagctgagcttgagacacttcgtatctcggtgcaggatgctgctgaggctaaagcaatgagcaccaagcaagtactgaacggcaacgcccaagaccaggaagccgagttactcgctgcacaggaaatgcggatttccgaactacagtccgagctcacaagctgggagcagaaacacaaggacgccctcgacgcccttcaagtctctgaggagcagatgaagcagagcattcgggctttggaatccgagttggcgaccgccaatgcgaagttcactgaagctcaagagaaggaagctagaaacggctcccaggctgaggagacggcgacacagcaccaaagtactatcgtggcccttcaatctgaaatcgacagtctcaagtctattattgaaggcaaggaggcgcgctttgctaagttggatgaacagcaaaacactgtcaggaaacagcttgaagaagcttcgcaagcaagagattttgcggctgctgaagttgaaagccacaaggagcttcttggtcaattcgagactcagattgccgaacacgagcgagcaatttacggccatgaaaagactatcgaagagcttcacgagagacatgcccgcgagatcgacgatattcgcgccgcctcgaaggatgagtatgatgctcagctcaacattctcatgactgaacacgcggagaatattaaactcttagaggacgacgctgcagatgctcaccacgaacttgagagagtggctttgcaactcggcgaagcgttaggcgtcgacacaagcatcgacaagatctccgagcgcatcgaataccttatcgcagatcaaaaatccttcgccattgaacaacaacgaagtgtcgaacttgaaggccacatcaatgaattgtccactatcaacaatacgatcatgcgtgatctcgaggccgtcaaatcaactctgaatgatatcctccgagtggaaggcgaagacatgaggagtggatatccatctgttcccgagcaactctctgccatcaagcagaagatggcagatctcgagaagaagaataagaagcagtcacgcattgtggaggagttagaggatcaacttcagacaaactttgatcaagctcagatcactaacaaccgattgtcaaccctccagactgagcgcaatactcaaatcgaggaggctcaaaacgcccagaccaaggccgaaatggagttagaagccatgcgacacgaagtggctgttcttcaggctcgcattgaggacgcagatgtcccaaagaggacgaactcgtttacttcacagcaacaagtccgcaagacttcatccgttgtgtctctcccctctccacctccagctattcctctgcctcctcttcctgctggtggctctacctcgcctgtcccacctactcccacaggtgtcaggccccccagcaacgagctgaacataaatcacattagagaggaccaggaggctcgcataatcagcatcgagaaacacctgaaagctgaacgacaattgactgccacgctggaagaggcgctcaccgatctggagaaccaatccaagaaagtcaaggcggacaacgaagggtggaagaagagggtctcagagctcgagtctgaacttcaggaactcagaaacagacctcaagaagatactcgctggcgtgatagtgctctcctcattgaagaagagcgcaagaagcgacaggaatctgagagagctcgtgcccaactccaagagcgcatgaacgccattaacaacaagaaaaagaagaagggtagtctcaattgcttctagttagggcaacggaagaaatccaagtcttgagctattcattttgctctatcatacgattgacttggtgatacaaccctaccgtcttttgcattcatccatcatctcctgctttattggcactgacgtcgaatgcgccattctaattgggatcaccactcgatgtcaatattacggtagactctcgccatcctcgcaacgccaatgaacgacgcgacgcatttcggcaggcctcttcacgcattactaattatcgacatagctgggtcacatcttgcatttcgtattcgctattctcttttcaacggcatatttgccacgacgtcaacgggtgatgatattaaaaggagatcgcatgtgtatattgttggaatgagtgccagttcgcaacatccgagggtattttcttgttggtttcaaactcactgttgtttgcaaaatcattggcggggcagagagaggtgaacggcccacgcccattgctttgcgtttctgagataccacttcgtattgtttttgttcattgtctacatatttcacctgatccatggttcttggcagccaaggctgttcatctcacccatgcgatcttggacacgtttacatccattgttccctgtatcgacccgaacctgtcagggcgatttcatgggagggaagcttggtctagaaccagcatagtgggttgagccattggtcaatgtaccacgtgcgtatatagcttctcacgagtgtaaaattgtcaatggatcgttgttttcacatgaatatgagccccataccagcatgctaatcagtgactgtggttagaatccatggaaagttgtgatctacagcctaataaggcccttagcttatctgtcaacaagaagggcgcagaggaaagggcgtgggtaaggcgtaagtacgagggcgtggaatacgtcggataagttttcgagtcgacagtcgaagtctctaccttctttcagcctctaacccgatctccacctcctaatacggtaatatgttcggtgaggtctggcccccgtcctgacctactcagttctggttgcaacttcgaagaattagacgtcagttgagatatcgcataagtgtgttccgtcgcgataatacaatggattaattaattcatcgtctaccaacaagtaatgactttcgcgcaattcgcaatcctaccaaccgagctccgctgggagatctggttcatggccctccaatcaaatgcgcgacggcgactcgtagccgagcagaacttacggatctttccaacgctagatctcatagcgtcaccactcttctcggtcaatatcgagagccgcgaagctgcgcggatcttctatagagtgcgcgtcgaggtgtatcgacggagaactcgcccatattactccgacgcagccgacgacgaggacctacggctcgccgaagattacagaggagtggtgtacctgagcccggatctagacgccatgatatcgatgcatccgcgcaccgagatcaggagtccgaacgatctgaaattcttcgggaacctggatccgaacctggagttcgaccactcggaccgatcgaaggctacggcttggcgtcaccgcacggcgccgatgagggaggagacgagatgtcggtttcggcgcacgcctaatcactggtgtctgttgacgcaggccgcgaagaggcagacgagggtgcaggactgggtcgacctgagtgattggatgcttacgtttgggccggtggagtataggagggcttgtgagctcttgaagagtatgcggattaatacatgggagtttgcgcaggtctttgggtggtattgagggcgacggaggtgacctggtcattctggcaatgttactagctacttgactctgcactacggctgcatgagcagtaggctactcatcacgtttttgattattctgccagactccagacgcatggctgcctgataggtatgacaaagaggcttcaagtatgtgaggaagagaggttgcatagagatagagggttgaattaggtagatcacatttgcacctcagttcagatagaccttctggtacgtagttgtattatgagcaaacggcgaggatgtgggcggacgattaggatgggagaggcaagcgtattttggtgttgctagttcgtttctattttcttgtacatattgcttctagaagcctatgatttgtattcttcttacaatgttgctgatccctcgtgttgccaagccacgctcgtccttcacgacgaagaggattctttaattgatatactgtcgtcatatgcctcttccttcaaagcgatgtgacgatttagtcgaagagcaacaccgacggtagaccaagccgtatctcttctgtccgctacccttgtagctagaaaacgagaatttgtcaaagccaacgtaggtagatgctgccggcaggcaaatgtgccttaagcgatgtcaacaacatcggttcgtc

SEQ ID NO: 7070 - DNA, 5316 bp, Muscodor strobelii
  misc_feature: SGI cDNA ID NO. 562112
  misc_feature: Reduced expression when VOC is produced
  misc_feature: Encodes the peptide sequence at SEQ ID NO 7071
atggccacctctccgcccacttcacctggagtgaagtcgccgcctccatcgaggccgcagagtatgatgatgatgaagccagcgccccgaagtaatagtcggatgagcatgtcgagtaagatgggcggtggaagcagagcctcggacgaagagggaggtcgcacagcagtcaaagttgcgatccgtgtgcgaccacccttaaaaccgactgatcccggcttcgatttgatcccacagcgattccaggtgtcgagagtgcagacgatgtcaaacacaagcattgccattgattcacagcaaggacattcgcagcagggaaagaaggtcttcgtcttcgatcgtgtgtttggtcccgagacgggccaggatggtgtttgggagtacctcaaggagagcatcaatgcatttgttcaaggatacaacgtgtcgttacttgcctacggccagtctggcgcaggtaaatcttacaccatgggcacatcaggtccatcagagcaaggagacctcgagtcaatgggtgtcatcccccgggcggcgactgaactcttcgagagactagagggtcctgcccctgccaagaactcaaatcgcaactcaatgtcccagctccgggcaccttccagatattccatgcagccaccagcccctaaggccgacaggaactggcaaatgaaggcaacttacgtggaaatctacaaggaatcgcttcacgacctgcttctgcccgatagcaccggcccgagcgagcgtggcgcaattgctatccgtgaggataccaagggaaatattctattgaccggcctgcgccagatggacatcaactcggtggatgatctcatgaacgccctgaattttgggtccactatccgacagactgatgcaacggcgatcaacgcaaagtcctctcgctcgcatgccgtgtttaccttgaacctcgttcagcgcaagcccaaaacgcagaccccgcagcatgacaagcggatgtcggtaccgttggaggccatgtcgggtggtgacacgtgggttacaaccgacagcaagctgcattttgtcgatttagccggcagcgaacgcctgaagaacactggtgcccagggtgagcgtgccaaagagggtattgacatcaatgcaggtttggcagctctgggcaaggtgatttcgcaactctcgtcccgccagcaagggtcccacgtatcatatcgcgactccaagttgacccgactgctccaagactcgctgggcggtaatgccataacgtacatgattgcatgtgtgactccagccgaatttcacctgaacgaaacactcaatacggtgcactatgcgcagagagctcgggcaattcagagcaagccaagaattcagcaggttgaggaaggggacaagcaagccattattgagcgcctcaaagccgaagttgcttttcttcgtgaagcactcaagagccattcggccgcggaaggcggtgtgggggagaggcgcaatgtggtgacaggcgggaggtccgagcgacaccacgaacgggagtcggacctccagaaccaattacttgattctcaggaaaattataacagtctaagtaagcgtcatgcgaagcttatttcggagatggccaaggcccggaacgacgaagctcttgacaaccacaccatggaaggaaccttggctgacagtgcaaccgagcgtctgaaccgctccacctcattctcccacgccgtggaacaaatggtgttggagtatgagacgaccattgagtctctccaatccaactactccgaaaaccgcaatgcactctccgcagcagaaacccgcatcttgcaagaagaaacgaagtatgcataccttcataaagtgaacgagcaacttcgcgagcgggtgcagaaactcatggcgcgtgaagaagacacggagaactatctgaaggaccttgaggaaaagctcgacggccacaccaatggcgaggcaaagaacgccaccatcatcacagagctgcgcaaggaactcggcaagctgcgagcgaacgaaggagccaatgaagactacatttcgacgcttgaggagcgtcttgcggaggctgagcaagatgccgaattgatgcagagcgaaatggagaaattagaggccgtcattgaacgacaacgaagccttggacagctcgacagtctcctgtacgaattggaccacatgaagccagaaggaaaatcgaagcagccggacgccgagggagagcacggcgcgaccgttggtcatcgtcgaacattctcggagcgatcgcacaagagccacgcaagtcgttccagtcaaaatcagccagatgtcctacccaaagttgccgagactgccgaaacaaagtccgtcatcgaggaagaatcgcccgagcagactgcggtccaggagatgcccaatggcgatggtcaatccagaaatgaatctcaagagggatctgaacagaatcccaccgccaccacttctgcggagatcggagagcaaggatatccgcctcagagccctgctcagcgcgagttcgttaacgacaagctggagagcgtgaaccaggaactcgttgatcttcaggttaagcatgaaaacactattacagcttatgaccacttgagcgccaagtacgaagaggctctgagagccatggctgaaatgcaagaccagatcgacgaggcacgccaccctaacaggcaacgcgactccttgctgtctgtcgctaccccaaacgaatcacgcccgccctcttttttatcggattcgaagtccagcgttggcaaagacgagacctatatctcctcgcgatcgctctcctcggaattgtcatcagctatggactcccctgctactccggatattacagatgttgagaccgaagctcccaaaccatcggaatcgagcgagactctcactgtcactgctgatgactcagttagtgataatgaggagcttgccgctgaggttgaaaagctaaagctgctcgcaagcgagcgagaagttgccaagaaagagctcaatgaacgctatattcaactggagaagcaacaccaagaatcgttggatgtggtggaggagctcaagacagagcttgctaaggccaaatatgctgaacctccatcacccagagctggcgctacgcccgtcattcgcaggaagtccagtcaaaatgtcatggtcattgatcgagcgcatagatcgttcgcggcgcttcgtaacatcgctgccgagaactttgagactgaccccgacgtgatgcaaaactttgaggtcaacctgaactcgtgcatccatgagttacatgccaggtctgaacgcatccaggagctggaagcaagcctcgcaagcaacaagaaagaaatggagagcacaaaagccatcatttccggactgactcgcgagcggtcaagcttgaagtcaagcccgattgatatcagcgtcgtggctaccatgcgcgatcagctggagaataatgagcaacaactcaagaccatgaaggagtcacacgaggcccgcgagaaggaactcttagctgagcttgagacacttcgtatctcggtgcaggatgctgctgaggctaaagcaatgagcaccaagcaagtactgaacggcaacgcccaagaccaggaagccgagttactcgctgcacaggaaatgcggatttccgaactacagtccgagctcacaagctgggagcagaaacacaaggacgccctcgacgcccttcaagtctctgaggagcagatgaagcagagcattcgggctttggaatccgagttggcgaccgccaatgcgaagttcactgaagctcaagagaaggaagctagaaacggctcccaggctgaggagacggcgacacagcaccaaagtactatcgtggcccttcaatctgaaatcgacagtctcaagtctattattgaaggcaaggaggcgcgctttgctaagttggatgaacagcaaaacactgtcaggaaacagcttgaagaagcttcgcaagcaagagattttgcggctgctgaagttgaaagccacaaggagcttcttggtcaattcgagactcagattgccgaacacgagcgagcaatttacggccatgaaaagactatcgaagagcttcacgagagacatgcccgcgagatcgacgatattcgcgccgcctcgaaggatgagtatgatgctcagctcaacattctcatgactgaacacgcggagaatattaaactcttagaggacgacgctgcagatgctcaccacgaacttgagagagtggctttgcaactcggcgaagcgttaggcgtcgacacaagcatcgacaagatctccgagcgcatcgaataccttatcgcagatcaaaaatccttcgccattgaacaacaacgaagtgtcgaacttgaaggccacatcaatgaattgtccactatcaacaatacgatcatgcgtgatctcgaggccgtcaaatcaactctgaatgatatcctccgagtggaaggcgaagacatgaggagtggatatccatctgttcccgagcaactctctgccatcaagcagaagatggcagatctcgagaagaagaataagaagcagtcacgcattgtggaggagttagaggatcaacttcagacaaactttgatcaagctcagatcactaacaaccgattgtcaaccctccagactgagcgcaatactcaaatcgaggaggctcaaaacgcccagaccaaggccgaaatggagttagaagccatgcgacacgaagtggctgttcttcaggctcgcattgaggacgcagatgtcccaaagaggacgaactcgtttacttcacagcaacaagtccgcaagacttcatccgttgtgtctctcccctctccacctccagctattcctctgcctcctcttcctgctggtggctctacctcgcctgtcccacctactcccacaggtgtcaggccccccagcaacgagctgaacataaatcacattagagaggaccaggaggctcgcataatcagcatcgagaaacacctgaaagctgaacgacaattgactgccacgctggaagaggcgctcaccgatctggagaaccaatccaagaaagtcaaggcggacaacgaagggtggaagaagagggtctcagagctcgagtctgaacttcaggaactcagaaacagacctcaagaagatactcgctggcgtgatagtgctctcctcattgaagaagagcgcaagaagcgacaggaatctgagagagctcgtgcccaactccaagagcgcatgaacgccattaacaacaagaaaaagaagaagggtagtctcaattgcttctag

SEQ ID NO: 7071 - protein, 1771 aa, Muscodor strobelii
  misc_feature: SGI Peptide ID NO. 562112
  misc_feature (62)..(449): Pfam Id: PF00225 Pfam Desc: Kinesin motor domain
  misc_feature (1)..(1771): NCBI GI: 261357122 Blast Desc: chromosome-associated kinesin KIF4B [Verticillium albo-atrum VaMs.102]
  misc_feature (37)..(1771): NCBI GI: 256730699 Blast Desc: NECHADRAFT_89622 [Nectria haematococca mpVI 77-13-4]
  misc_feature (1)..(1771): NCBI GI: 171689204 Blast Desc: protein product [Podospora anserina] gi|170944564|emb|CAP70675.1| protein product [Podospora anserina]
  misc_feature (37)..(1771): NCBI GI: 154314058 Blast Desc: BC1G_04972 [Botryotinia fuckeliana B05.10] gi|150849118|gb|EDN24311.1| BC1G_04972 [Botryotinia fuckeliana B05.10]
  misc_feature (43)..(1771): NCBI GI: 156060675 Blast Desc: SS1G_02480 [Sclerotinia sclerotiorum 1980] gi|154699884|gb|EDN99622.1| SS1G_02480 [Sclerotinia sclerotiorum 1980]
  misc_feature (4)..(1771): NCBI GI: 85110870 Blast Desc: NCU06832 [Neurospora crassa OR74A] gi|28925359|gb|EAA34437.1| conserved [Neurospora crassa OR74A]
  misc_feature (1)..(1771): NCBI GI: 116204617 Blast Desc: CHGG_10192 [Chaetomium globosum CBS 148.51] gi|88176320|gb|EAQ83788.1| CHGG_10192 [Chaetomium globosum CBS 148.51]
  misc_feature (4)..(1758): NCBI GI: 18375978 Blast Desc: related to kinesin-like protein [Neurospora crassa]
  misc_feature (37)..(1594): NCBI GI: 29421290 Blast Desc: kinesin [Gibberella moniliformis]
  misc_feature (1)..(1591): NCBI GI: 29421246 Blast Desc: kinesin [Botryotinia fuckeliana]
  misc_feature: Useful for introducing or modulating the production of volatile compounds
MATSPPTSPGVKSPPPSRPQSMMMMKPAPRSNSRMSMSSKMGGGSRASDEEGGRTAVKVAIRVRPPLKPTDPGFDLIPQRFQVSRVQTMSNTSIAIDSQQGHSQQGKKVFVFDRVFGPETGQDGVWEYLKESINAFVQGYNVSLLAYGQSGAGKSYTMGTSGPSEQGDLESMGVIPRAATELFERLEGPAPAKNSNRNSMSQLRAPSRYSMQPPAPKADRNWQMKATYVEIYKESLHDLLLPDSTGPSERGAIAIREDTKGNILLTGLRQMDINSVDDLMNALNFGSTIRQTDATAINAKSSRSHAVFTLNLVQRKPKTQTPQHDKRMSVPLEAMSGGDTWVTTDSKLHFVDLAGSERLKNTGAQGERAKEGIDINAGLAALGKVISQLSSRQQGSHVSYRDSKLTRLLQDSLGGNAITYMIACVTPAEFHLNETLNTVHYAQRARAIQSKPRIQQVEEGDKQAIIERLKAEVAFLREALKSHSAAEGGVGERRNVVTGGRSERHHERESDLQNQLLDSQENYNSLSKRHAKLISEMAKARNDEALDNHTMEGTLADSATERLNRSTSFSHAVEQMVLEYETTIESLQSNYSENRNALSAAETRILQEETKYAYLHKVNEQLRERVQKLMAREEDTENYLKDLEEKLDGHTNGEAKNATIITELRKELGKLRANEGANEDYISTLEERLAEAEQDAELMQSEMEKLEAVIERQRSLGQLDSLLYELDHMKPEGKSKQPDAEGEHGATVGHRRTFSERSHKSHASRSSQNQPDVLPKVAETAETKSVIEEESPEQTAVQEMPNGDGQSRNESQEGSEQNPTATTSAEIGEQGYPPQSPAQREFVNDKLESVNQELVDLQVKHENTITAYDHLSAKYEEALRAMAEMQDQIDEARHPNRQRDSLLSVATPNESRPPSFLSDSKSSVGKDETYISSRSLSSELSSAMDSPATPDITDVETEAPKPSESSETLTVTADDSVSDNEELAAEVEKLKLLASEREVAKKELNERYIQLEKQHQESLDVVEELKTELAKAKYAEPPSPRAGATPVIRRKSSQNVMVIDRAHRSFAALRNIAAENFETDPDVMQNFEVNLNSCIHELHARSERIQELEASLASNKKEMESTKAIISGLTRERSSLKSSPIDISVVATMRDQLENNEQQLKTMKESHEAREKELLAELETLRISVQDAAEAKAMSTKQVLNGNAQDQEAELLAAQEMRISELQSELTSWEQKHKDALDALQVSEEQMKQSIRALESELATANAKFTEAQEKEARNGSQAEETATQHQSTIVALQSEIDSLKSIIEGKEARFAKLDEQQNTVRKQLEEASQARDFAAAEVESHKELLGQFETQIAEHERAIYGHEKTIEELHERHAREIDDIRAASKDEYDAQLNILMTEHAENIKLLEDDAADAHHELERVALQLGEALGVDTSIDKISERIEYLIADQKSFAIEQQRSVELEGHINELSTINNTIMRDLEAVKSTLNDILRVEGEDMRSGYPSVPEQLSAIKQKMADLEKKNKKQSRIVEELEDQLQTNFDQAQITNNRLSTLQTERNTQIEEAQNAQTKAEMELEAMRHEVAVLQARIEDADVPKRTNSFTSQQQVRKTSSVVSLPSPPPAIPLPPLPAGGSTSPVPPTPTGVRPPSNELNINHIREDQEARIISIEKHLKAERQLTATLEEALTDLENQSKKVKADNEGWKKRVSELESELQELRNRPQEDTRWRDSALLIEEERKKRQESERARAQLQERMNAINNKKKKKGSLNCF

SEQ ID NO: 7072 - DNA, 9303 bp, Muscodor strobelii; identical to SEQ ID NO: 7069
  misc_feature: SGI EST ID NO. CUFF.17671.1
  misc_feature: Variant of the nucleotide sequence at SEQ ID NO 7070

SEQ ID NO: 7073 - DNA, 1155 bp, Muscodor strobelii
  misc_feature: SGI cDNA ID NO. 562113
  misc_feature: Elevated expression when VOC is produced
  misc_feature: Encodes the peptide sequence at SEQ ID NO 7074
atgagctctacaataagtggtaataatggcgtattgtcgtctgtcgcagatgtggtggctgagagcgcattccagggcattgtttggggtggtttcgcattatgtgctcttgcattgagtagccgtttgtatattcgatactcggttttccgcaaattcttcttggaagactacttcatgctcgttgcctgggctatcatgggagcttcggctgctatctgccaggtatatgtgggcaatatctacattattgaggctgttggcaatgggctcatgcttccacctccctcattttctgataacttcacacaaggtctacgcgccgtgctcatcaacaatatcttgaccctcgtcgggatattccttgtcaagttcaacttcctattctttttcaaaagaattggcagccacgtaacagcttacttggttatctggtggatattcgcgttgattaagcttgcagcccttgcagttgagctcggtatactctcatatgagtgcactttgtccgatattgaaacgctctctgggtattgcacaacaactgaggcagtcaggaaagaatatactgccactattgtgtctgttgcggttgacgcactcacagatttactgatactgtgttttccctttgtcatactctggcgagtccagctcaatctgcacaagaaaatcattcttggcatactattctcactgaatggattcatcattgcggttaccatcatacggggcagcatatttggtggagtatacaagtcctttgatcgcgcaatcgaggaaaggcagtctcaaagtatcacgtgggtttggttctggctcacagtggaattcatcgttggattcttagtagcttgttctacctcctttcgttcacttttcagtcagacaaaaaagccaaggcagacaaaagaagcccctgcttatcttgatcacggtcgccaacaattagctaacattggctctgatcaatcaccgataaatcgggcaaagagacaacgaatctatgattctcttctgggtacatttgagactcttgaaggaagtacaagagttggccacgatttttccgagaagctaaatcctatcaatgtggaagaattaggccttgacttcactcgttctgatggatgggtctctgtttctgtcaactag

SEQ ID NO: 7074 - protein, 384 aa, Muscodor strobelii
  misc_feature: SGI Peptide ID NO. 562113
  misc_feature (19)..(321): NCBI GI: 242813625 Blast Desc: conserved [Talaromyces stipitatus ATCC 10500] gi|218714543|gb|EED13966.1| conserved [Talaromyces stipitatus ATCC 10500]
  misc_feature (1)..(316): NCBI GI: 154305703 Blast Desc: BC1G_07666 [Botryotinia fuckeliana B05.10] gi|150853185|gb|EDN28377.1| BC1G_07666 [Botryotinia fuckeliana B05.10]
  misc_feature (3)..(348): NCBI GI: 156031118 Blast Desc: SS1G_14167 [Sclerotinia sclerotiorum 1980] gi|154700558|gb|EDO00297.1| SS1G_14167 [Sclerotinia sclerotiorum 1980]
  misc_feature (48)..(299): NCBI GI: 145246718 Blast Desc: An12g05390 [Aspergillus niger] gi|134080329|emb|CAK46251.1| protein product [Aspergillus niger]
  misc_feature (18)..(321): NCBI GI: 171681283 Blast Desc: protein product [Podospora anserina] gi|170940600|emb|CAP65828.1| protein product [Podospora anserina]
  misc_feature (19)..(384): NCBI GI: 255940532 Blast Desc: Pc16g07010 [Penicillium chrysogenum Wisconsin 54-1255] gi|211585658|emb|CAP93371.1| Pc16g07010 [Penicillium chrysogenum Wisconsin 54-1255]
  misc_feature (19)..(303): NCBI GI: 169772027 Blast Desc: [Aspergillus oryzae RIB40] gi|83768342|dbj|BAE58481.1| protein product [Aspergillus oryzae]
  misc_feature (27)..(355): NCBI GI: 240110863 Blast Desc: CPC735_037250 [Coccidioides posadasii C735 delta SOWgp]
  misc_feature (19)..(303): NCBI GI: 238485366 Blast Desc: conserved [Aspergillus flavus NRRL3357] gi|220698800|gb|EED55139.1| conserved [Aspergillus flavus NRRL3357]
  misc_feature (19)..(244): NCBI GI: 171691608 Blast Desc: protein product [Podospora anserina] gi|170945752|emb|CAP71865.1| protein product [Podospora anserina]
  misc_feature: Useful for introducing or modulating the production of volatile compounds
MSSTISGNNGVLSSVADVVAESAFQGIVWGGFALCALALSSRLYIRYSVFRKFFLEDYFMLVAWAIMGASAAICQVYVGNIYIIEAVGNGLMLPPPSFSDNFTQGLRAVLINNILTLVGIFLVKFNFLFFFKRIGSHVTAYLVIWWIFALIKLAALAVELGILSYECTLSDIETLSGYCTTTEAVRKEYTATIVSVAVDALTDLLILCFPFVILWRVQLNLHKKIILGILFSLNGFIIAVTIIRGSIFGGVYKSFDRAIEERQSQSITWVWFWLTVEFIVGFLVACSTSFRSLFSQTKKPRQTKEAPAYLDHGRQQLANIGSDQSPINRAKRQRIYDSLLGTFETLEGSTRVGHDFSEKLNPINVEELGLDFTRSDGWVSVSVN

SEQ ID NO: 7075 - DNA, 1748 bp, Muscodor strobelii
  misc_feature: SGI EST ID NO. CUFF.17562.1
  misc_feature: Variant of the nucleotide sequence at SEQ ID NO 7073
gagcgtcgcgactatattgtagcttaagtccaaggcgagagtagcgacggaccagacacgatacgatataccaatttggtacatccattcgctttactcgtgcccacacttcatctacaatgcatgttgggcgatgcaagtctgttgtgctcttagcttttcagtagcctgcttggcgtcgcattggctatgaccaatatagttcaccgtcctgatagcactactcatcacgtttgttagatatcttcctacaggcacggctcaggcttgcaccgtcgctagtagtcattgttcccacgaagaaagatataactttgcttttcgggcacagctagcaaattgagaacaccaagtcactctcacatttgtcttcattattttaaatatcctacgccgtattaggttatcttattagtagttatcgagaatgagctctacaataagtggtaataatggcgtattgtcgtctgtcgcagatgtggtggctgagagcgcattccagggcattgtttggggtggtttcgcattatgtgctcttgcattgagtagccgtttgtatattcgatactcggttttccgcaaattcttcttggaagactacttcatgctcgttgcctgggctatcatgggagcttcggctgctatctgccaggtatatgtgggcaatatctacattattgaggctgttggcaatgggctcatgcttccacctccctcattttctgataacttcacacaaggtctacgcgccgtgctcatcaacaatatcttgaccctcgtcgggatattccttgtcaagttcaacttcctattctttttcaaaagaattggcagccacgtaacagcttacttggttatctggtggatattcgcgttgattaagcttgcagcccttgcagttgagctcggtatactctcatatgagtgcactttgtccgatattgaaacgctctctgggtattgcacaacaactgaggcagtcaggaaagaatatactgccactattgtgtctgttgcggttgacgcactcacagatttactgagtaagcaagaattgagtctattcctccaggttgagctacaaggagcagtttccatgatattggtttggcaaagagtcactaatatttgtgtcaagtactgtgttttccctttgtcatactctggcgagtccagctcaatctgcacaagaaaatcattcttggcatactattctcactgaatggattcatcattgcggttaccatcatacggggcagcatatttggtggagtatacaagtcctttgatcgcgcaatcgaggaaaggcagtctcaaagtatcacgtgggtttggttctggctcacagtggaattcatcgttggattcttagtagcttgttctacctcctttcgttcacttttcagtcagacaaaaaagccaaggcagacaaaagaagcccctgcttatcttgatcacggtcgccaacaattagctaacattggctctgatcaatcaccgataaatcgggcaaagagacaacgaatctatgattctcttctgggtacatttgagactcttgaaggaagtacaagagttggccacgatttttccgagaagctaaatcctatcaatgtggaagaattaggccttgacttcactcgttctgatggatgggtctctgtttctgtcaactagattttatcaagaccagactaaatttacgtaaggataagactatttaatacacagcgaaaacttgaacaatt

SEQ ID NO: 7076 - DNA, 1542 bp, Muscodor strobelii
  misc_feature: SGI cDNA ID NO. 562114
  misc_feature: Elevated expression when VOC is produced
  misc_feature: Encodes the peptide sequence at SEQ ID NO 7077
atgtttgcactcatcgtgaaggcaattggcgtcgcgttgtcggcctacctgtttctctatgccctcttgcgcttcactcaggatggtaaagagccacccgcgatggcaacgacaattccgtttatcagccccatattaggcatgaggcagagaaactcgagatattacaattatctaagggataaatattctcaacctatattcactctccgactacccttcacacgcctctacatcattacgtctacttctctgattcctgccgtgcaacgtcaattccgaactttgtctttcaaccctgtgcaaattaaagctgtgacaaactttgcatcgccgagtcagcaagcattagatcttgtcgcacgagacattgacaacgagaagggtttcattccgggctttttgaaggcggtatacccgaccttgactggtactatgcttgatgcattgaatcagagaacagtcaatgtcattctcgccgagtttgacaaattggcagagagtggccattgccacactttggagctgtacaagtggatggatgaacaaatcacctatgcaaccacagatggcatttacggtccccataacccgctgcgagatccaaaaaatctcgaggcatggcacgtgtatgaagcaaagacaatgacccttgtaatgggaatcctgccatcgctatttgccgccgatgcaatcaaagcgcgtgcttttctctggagaaagtatgatcactacttttctcagagttatcacctcgaaggatcagactatattcagcgtcgtcatgcatatatgtgcgagcgtgggcttttagctgaagacatagccaaaattgagctcacaggagtctttcctctgattggaaacacaattcctacagcattttggctggtatatagaattttttcttcctctgcggtccttcaggattgccatcgtgaagtgtcgcgagccgtgtcagagaaggatggcatcagtactattgacgcctcgatcatcaaagattcctgtcccatcctttcgagcacctaccaagaagtcttccgattccatggcatgggaacttcggtacgtgttgccttagaagatcatctgcttgagggcaagcatctgatcaaaaagggagggatggtgatgatttcaggccgcgttcagcatagtgaccccggcctttggggaagcgatgtggacgagttcaagcacacccgttttgtgaagtctccggacaacacacgccacaaccctgttgcctttcggggatttggtggtggcacaacgctctgccccggtcggcattttgcgacaactgaaatattgttatttgcaacgcttctgatgctgcgatttgatgtgcggctagccaatggtcttaaagaatggcctatgccaccaacagacaaatcgtcccaggcagcggcaatggatcaacctggccacgacatcaagattgagctcataccgaaagcgaaacaaaagtggaaagtcgtattttcgaacaagtcaaacaacaaaactcgatttgttgctgaagatattttgtga

SEQ ID NO: 7077 - protein, 513 aa, Muscodor strobelii
  misc_feature: SGI Peptide ID NO. 562114
  misc_feature (33)..(483): Pfam Id: PF00067 Pfam Desc: Cytochrome P450
  misc_feature (346)..(483): Pfam Id: PF00067 Pfam Desc: Cytochrome P450
  misc_feature (1)..(502): NCBI GI: 225558023 Blast Desc: conserved [Ajellomyces capsulatus G186AR]
  misc_feature (5)..(492): NCBI GI: 225681045 Blast Desc: conserved [Paracoccidioides brasiliensis Pb03] gi|226292259|gb|EEH47679.1| conserved [Paracoccidioides brasiliensis Pb18]
  misc_feature (1)..(452): NCBI GI: 240273269 Blast Desc: cytochrome P450 oxidoreductase [Ajellomyces capsulatus H143]
  misc_feature (1)..(485): NCBI GI: 145252772 Blast Desc: An16g05910 [Aspergillus niger] gi|134083453|emb|CAK46931.1| protein product [Aspergillus niger]
  misc_feature (25)..(499): NCBI GI: 169609679 Blast Desc: SNOG_07932 [Phaeosphaeria nodorum SN15] gi|160701894|gb|EAT84208.2| SNOG_07932 [Phaeosphaeria nodorum SN15]
  misc_feature (1)..(452): NCBI GI: 154280549 Blast Desc: [Ajellomyces capsulatus NAm1] gi|150411266|gb|EDN06654.1| [Ajellomyces capsulatus NAm1]
  misc_feature (48)..(485): NCBI GI: 169608169 Blast Desc: SNOG_07153 [Phaeosphaeria nodorum SN15] gi|160701581|gb|EAT85804.2| SNOG_07153 [Phaeosphaeria nodorum SN15]
  misc_feature (27)..(483): NCBI GI: 154303094 Blast Desc: BC1G_09567 [Botryotinia fuckeliana B05.10] gi|150855030|gb|EDN30222.1| BC1G_09567 [Botryotinia fuckeliana B05.10]
  misc_feature (4)..(511): NCBI GI: 156056715 Blast Desc: SS1G_04088 [Sclerotinia sclerotiorum 1980] gi|154701874|gb|EDO01613.1| SS1G_04088 [Sclerotinia sclerotiorum 1980]
  misc_feature (10)..(511): NCBI GI: 171678379 Blast Desc: protein product [Podospora anserina] gi|170937259|emb|CAP61916.1| protein product [Podospora anserina]
  misc_feature: Useful for introducing or modulating the production of volatile compounds
MFALIVKAIGVALSAYLFLYALLRFTQDGKEPPAMATTIPFISPILGMRQRNSRYYNYLRDKYSQPIFTLRLPFTRLYIITSTSLIPAVQRQFRTLSFNPVQIKAVTNFASPSQQALDLVARDIDNEKGFIPGFLKAVYPTLTGTMLDALNQRTVNVILAEFDKLAESGHCHTLELYKWMDEQITYATTDGIYGPHNPLRDPKNLEAWHVYEAKTMTLVMGILPSLFAADAIKARAFLWRKYDHYFSQSYHLEGSDYIQRRHAYMCERGLLAEDIAKIELTGVFPLIGNTIPTAFWLVYRIFSSSAVLQDCHREVSRAVSEKDGISTIDASIIKDSCPILSSTYQEVFRFHGMGTSVRVALEDHLLEGKHLIKKGGMVMISGRVQHSDPGLWGSDVDEFKHTRFVKSPDNTRHNPVAFRGFGGGTTLCPGRHFATTEILLFATLLMLRFDVRLANGLKEWPMPPTDKSSQAAAMDQPGHDIKIELIPKAKQKWKVVFSNKSNNKTRFVAEDIL

SEQ ID NO: 7078 - DNA, 2299 bp, Muscodor strobelii
  misc_feature: SGI EST ID NO. CUFF.17542.0
  misc_feature: Variant of the nucleotide sequence at SEQ ID NO 7076
gcggccgattcgcgacgcaaaacttcagttccaaggtctccctgctccaaatgatctttttctgaactcacatcctttctgttttttatatctcctgctacagtgatttagtcacccgtgagcaccgacctcttcatctggtgatcagtgtggagtcacttccagtgtttcctctaataaacagtattctatggtattgtcaatcctgtcgcatctcagcctatctattatggtgcacgatgtttgcactcatcgtgaaggcaattggcgtcgcgttgtcggcctacctgtttctctatgccctcttgcgcttcactcaggatggtaaagagccacccgcgatggcaacgacaattccgtttatcagccccatattaggcatgaggcagagaaactcgagatattacaattatctaagggataaatattctcaacctatattcactctccgactacccttcacacgcctctacatcattacgtctacttctctgattcctgccgtgcaacgtcaattccgaactttgtctttcaaccctgtgcaaattaaagctgtgacaaactttgcatcgccgagtcagcaagcattagatcttgtcgcacgagacattgacaacgagaagggtttcattccgggctttttgaaggcggtatacccgaccttgactggtactatgcttgatgcattgaatcagagaacagtcaatgtcattctcgccgagtttgacaaattggcagagagtggccattgccacactttggagctgtacaagtggatggatgaacaaatcacctatgcaaccacagatggcatttacggtccccataacccgctgcgagatccaaaaaatctcgaggcatggcacgtgtatgaagcaaagacaatgacccttgtaatgggaatcctgccatcgctatttgccgccgatgcaatcaaagcgcgtgcttttctctggagaaagtatgatcactacttttctcagagttatcacctcgaaggatcagactatattcagcgtcgtcatgcatatatgtgcgagcgtgggcttttagctgaagacatagccaaaattgagctcacaggagtctttcctctgattggaaacacaattcctacagcattttggctggtatatagaattttttcttcctctgcggtccttcaggattgccatcgtgaagtgtcgcgagccgtgtcagagaaggatggcatcagtactattgacgcctcgatcatcaaagattcctgtcccatcctttcgagcacctaccaagaagtcttccgattccatggcatgggaacttcggtacgtgttgccttagaagatcatctgcttgagggcaagcatctgatcaaaaagggagggatggtgatgatttcaggccgcgttcagcatagtgaccccggcctttggggaagcgatgtggacgagttcaagcacacccgttttgtgaagtctccggacaacacacgccacaaccctgttgcctttcggggatttggtggtggcacaacgctctgccccggtcggcattttgcgacaactgaaatattgttatttgcaacgcttctgatgctgcgatttgatgtgcggctagccaatggtcttaaagaatggcctatgccaccaacagacaaatcgtcccaggcagcggcaatggatcaacctggccacgacatcaagattgagctcataccgaaagcgaaacaaaagtggaaagtcgtattttcgaacaagtcaaacaacaaaactcgatttgttgctgaagatattttgtgaggggttcaatgcaaatatcttgcattgcaccaccagaccatcgtacggtaagacgtatcagcgcaacgcggaccagttctggcccgtctcacagaatcgtccttgagtttcgcgtattgctagagagcataacttatttattaatgctagacctgatgatattcccaaggccatcgctttcccagtgagccaagccggtggggtgaatgaaacatagcgtctcttgcaaactgagcagagcgactcgaaaatggattcattctataatttttggaagtacggcattaatagatattctattgatagatggtcaatgtccacttcatatcgtagtgagcgatattctgcagccaacaccacaaaaagatcctgttgcagcgcggtagaagttctaggcagacacaacttgctttgcgcatgtaggtttcatatcatcgtgttcaatttcgtgtagttattgtgtacatggctcgcgcgaaaggtattacataactatgcaaccgctgagagtcaggaat

SEQ ID NO: 7079 - DNA, 1095 bp, Muscodor strobelii
  misc_feature: SGI cDNA ID NO. 562115
  misc_feature: Encodes the peptide sequence at SEQ ID NO 7080
atgaacgctgggaatagcatagggctgggtgagataaatgaaaatcgatctaatggcgctcgacaaatcacacccctagtgtatccacttgaggaactcgccgtgaagactgatacacttgtccaatctattgttctagacgacgaatctcgagcgattggagcccttcttgaggatggtacagagatacggtctcggaatattatcgttgcggctggtgcttatcgaactcctcagctactcatgctgtcgggcattggaccaagagatgctctcgagacttgcggcatcgatgtcaaggttgaaagctctgaagttgggaagaacttcaatgatcacatcatggtgcaaatgaactggaagctgaaagacccgtcacaaggctacgcactagggtctgcgaatcctgtcttcactcaacccgagttcaaaaaaggtgctcctatcagctatatcgcctcgaccactgttcctcgggaagtcctagagaaggctattgcaaaagacgaaggagaaaacaacgtgactaacgaacaccctcttctcaaaagagattgggctttgatggagaacatcgtgatacatgttggtagacccccagtagcgatggatggcagtcacatcagtactacgttaatggggatgaagcctacctcacgaggcattgtcaccattgcctcaaaggatcctcgggacgatcccctcctagacccaaactattttgctaccgaggtcgacaaaactgtgtggcgctattcattacgcaaaattagtgaactcatggctggcgaaacagcactaggtggcatcgtgtctggagagacaccgctgccaggcatggagccgctccgacctgattcgacagaccaagctcttgacgagagagtcaagaagcagggaatttccgcatttcacggttccagctcctgctccatgggttcggtggttgacgctgagctacgggtcgggggcgtttcaaatcttcgcatcgtcgacgcttcggtctttcctatttcgattggtgcacatatccaggctgctgtctatgcacttgccgaacaagccgctgtcatcatcgcaggagaacgatcatag

SEQ ID NO: 7080 - protein, 364 aa, Muscodor strobelii
  misc_feature: SGI Peptide ID NO. 562115
  misc_feature (210)..(355): Pfam Id: PF05199 Pfam Desc: GMC oxidoreductase
  misc_feature (289)..(355): Pfam Id: PF05199 Pfam Desc: GMC oxidoreductase
  misc_feature (210)..(246): Pfam Id: PF05199 Pfam Desc: GMC oxidoreductase
  misc_feature (61)..(128): Pfam Id: PF00732 Pfam Desc: GMC oxidoreductase
  misc_feature (2)..(361): NCBI GI: 46115062 Blast Desc: FG03373.1 [Gibberella zeae PH-1]
  misc_feature (1)..(348): NCBI GI: 145259027 Blast Desc: An04g08890 [Aspergillus niger] gi|134074864|emb|CAK38976.1| protein product [Aspergillus niger]
  misc_feature (2)..(360): NCBI GI: 256724344 Blast Desc: NECHADRAFT_87530 [Nectria haematococca mpVI 77-13-4]
  misc_feature (2)..(359): NCBI GI: 145244078 Blast Desc: An11g05600 [Aspergillus niger] gi|134079234|emb|CAK40717.1| protein product [Aspergillus niger]
  misc_feature (2)..(359): NCBI GI: 67526147 Blast Desc: AN3531.2 [Aspergillus nidulans FGSC A4] gi|40739666|gb|EAA58856.1| AN3531.2 [Aspergillus nidulans FGSC A4] gi|259481951|tpe|CBF75954.1| TPA: GMC oxidoreductase nidulans
  misc_feature (2)..(362): NCBI GI: 145234543 Blast Desc: An03g00130 [Aspergillus niger] gi|134057591|emb|CAK37991.1| protein product [Aspergillus niger]
  misc_feature (3)..(361): NCBI GI: 169769302 Blast Desc: [Aspergillus oryzae RIB40] gi|83766979|dbj|BAE57119.1| protein product [Aspergillus oryzae]
  misc_feature (3)..(361): NCBI GI: 238501768 Blast Desc: glucose dehydrogenase, [Aspergillus flavus NRRL3357] gi|220692355|gb|EED48702.1| glucose dehydrogenase, [Aspergillus flavus NRRL3357]
  misc_feature (2)..(360): NCBI GI: 154308157 Blast Desc: BC1G_07824 [Botryotinia fuckeliana B05.10] gi|150852909|gb|EDN28101.1| BC1G_07824 [Botryotinia fuckeliana B05.10]
  misc_feature (2)..(362): NCBI GI: 242779381 Blast Desc: glucose dehydrogenase, [Talaromyces stipitatus ATCC 10500] gi|218723050|gb|EED22468.1| glucose dehydrogenase, [Talaromyces stipitatus ATCC 10500]
  misc_feature (1)..(362): SWISSPROT Homolog: EC 1.1.99.1 Choline dehydrogenase
MNAGNSIGLGEINENRSNGARQITPLVYPLEELAVKTDTLVQSIVLDDESRAIGALLEDGTEIRSRNIIVAAGAYRTPQLLMLSGIGPRDALETCGIDVKVESSEVGKNFNDHIMVQMNWKLKDPSQGYALGSANPVFTQPEFKKGAPISYIASTTVPREVLEKAIAKDEGENNVTNEHPLLKRDWALMENIVIHVGRPPVAMDGSHISTTLMGMKPTSRGIVTIASKDPRDDPLLDPNYFATEVDKTVWRYSLRKISELMAGETALGGIVSGETPLPGMEPLRPDSTDQALDERVKKQGISAFHGSSSCSMGSVVDAELRVGGVSNLRIVDASVFPISIGAHIQAAVYALAEQAAVIIAGERS

SEQ ID NO: 7081 - DNA, 782 bp, Muscodor strobelii
  misc_feature: SGI EST ID NO. CUFF.17549.0
  misc_feature: Variant of the nucleotide sequence at SEQ ID NO 7079
ccagggtctacgcgccgagtctaccctctggcgaagactattcaagagtcttgagccaaagtgggggtcaacatgcttccagaagcagatatgaacgctgggaatagcatagggctgggtgagataaatgaaaatcgatctaatggcgctcgacaaatcacacccctagtgtatccacttgaggaactcgccgtgaagactgatacacttgtccaatctattgttctagacgacgaatctcgagcgattggagcccttcttgaggatggtacagagatacggtctcggaatattatcgttgcggctggtgcttatcgaactcctcagctactcatgctgtcgggcattggaccaagagatgctctcgagacttgcggcatcgatgtcaaggttgaaagctctgaagttgggaagaacttcaatgatcacatcatggtgcaaatgaactggaagctgaaagacccgtcacaaggctacgcactagggtctgcgaatcctgtcttcactcaacccgagttcaaaaaaggtgctcctatcagctatatcgcctcgaccactgttcctcgggaagtcctagagaaggctattgcaaaagacgaaggagaaaacaacgtgactaacgaacaccctcttctcaaaagagattgggctttgatggagaacatcgtgatacatgttggtagacccccagtagcgatggatggcagtcacatcagtactacgttaatggggatgaagcctacctcacgaggcattgtcaccattgcctcaaaggatcctcg

SEQ ID NO: 7082 - DNA, 1077 bp, Muscodor strobelii
  misc_feature: SGI cDNA ID NO. 562116
  misc_feature: Encodes the peptide sequence at SEQ ID NO 7083
atgaacgctgggaatagcatagggctggcctgcttgggtaacggacgactaatgtatttacagtatccacttgaggaactcgccgtgaagactgatacacttgtccaatctattgttctagacgacgaatctcgagcgattggagcccttcttgaggatggtacagagatacggtctcggaatattatcgttgcggctggtgcttatcgaactcctcagctactcatgctgtcgggcattggaccaagagatgctctcgagacttgcggcatcgatgtcaaggttgaaagctctgaagttgggaagaacttcaatgatcacatcatggtgcaaatgaactggaagctgaaagacccgtcacaaggctacgcactagggtctgcgaatcctgtcttcactcaacccgagttcaaaaaaggtgctcctatcagctatatcgcctcgaccactgttcctcgggaagtcctagagaaggctattgcaaaagacgaaggagaaaacaacgtgactaacgaacaccctcttctcaaaagagattgggctttgatggagaacatcgtgatacatgttggtagacccccagtagcgatggatggcagtcacatcagtactacgttaatggggatgaagcctacctcacgaggcattgtcaccattgcctcaaaggatcctcgggacgatcccctcctagacccaaactattttgctaccgaggtcgacaaaactgtgtggcgctattcattacgcaaaattagtgaactcatggctggcgaaacagcactaggtggcatcgtgtctggagagacaccgctgccaggcatggagccgctccgacctgattcgacagaccaagctcttgacgagagagtcaagaagcagggaatttccgcatttcacggttccagctcctgctccatgggttcggtggttgacgctgagctacgggtcgggggcgtttcaaatcttcgcatcgtcgacgcttcggtctttcctatttcgattggtgcacatatccaggctgctgtctatgcacttgccgaacaagccgctgtcatcatcgcaggagaacgatcatag

SEQ ID NO: 7083 - protein, 358 aa, Muscodor strobelii
  misc_feature: SGI Peptide ID NO. 562116
  misc_feature (204)..(349): Pfam Id: PF05199 Pfam Desc: GMC oxidoreductase
  misc_feature (283)..(349): Pfam Id: PF05199 Pfam Desc: GMC oxidoreductase
  misc_feature (204)..(240): Pfam Id: PF05199 Pfam Desc: GMC oxidoreductase
  misc_feature (55)..(122): Pfam Id: PF00732 Pfam Desc: GMC oxidoreductase
  misc_feature (2)..(355): NCBI GI: 46115062 Blast Desc: FG03373.1 [Gibberella zeae PH-1]
  misc_feature (2)..(353): NCBI GI: 145244078 Blast Desc: An11g05600 [Aspergillus niger] gi|134079234|emb|CAK40717.1| protein product [Aspergillus niger]
  misc_feature (1)..(342): NCBI GI: 145259027 Blast Desc: An04g08890 [Aspergillus niger] gi|134074864|emb|CAK38976.1| protein product [Aspergillus niger]
  misc_feature (2)..(354): NCBI GI: 256724344 Blast Desc: NECHADRAFT_87530 [Nectria haematococca mpVI 77-13-4]
  misc_feature (22)..(353): NCBI GI: 145234543 Blast Desc: An03g00130 [Aspergillus niger] gi|134057591|emb|CAK37991.1| protein product [Aspergillus niger]
  misc_feature (22)..(355): NCBI GI: 169769302 Blast Desc: [Aspergillus oryzae RIB40] gi|83766979|dbj|BAE57119.1| protein product [Aspergillus oryzae]
  misc_feature (48)..(353): NCBI GI: 67900560 Blast Desc: AN7267.2 [Aspergillus nidulans FGSC A4] gi|40741948|gb|EAA61138.1| AN7267.2 [Aspergillus nidulans FGSC A4] gi|259483387|tpe|CBF78736.1| TPA: conserved [Aspergillus FGSC
  misc_feature (22)..(355): NCBI GI: 238501768 Blast Desc: glucose dehydrogenase, [Aspergillus flavus NRRL3357] gi|220692355|gb|EED48702.1| glucose dehydrogenase, [Aspergillus flavus NRRL3357]
  misc_feature (31)..(353): NCBI GI: 67526147 Blast Desc: AN3531.2 [Aspergillus nidulans FGSC A4] gi|40739666|gb|EAA58856.1| AN3531.2 [Aspergillus nidulans FGSC A4] gi|259481951|tpe|CBF75954.1| TPA: GMC oxidoreductase nidulans
  misc_feature (19)..(354): NCBI GI: 154308157 Blast Desc: BC1G_07824 [Botryotinia fuckeliana B05.10] gi|150852909|gb|EDN28101.1| BC1G_07824 [Botryotinia fuckeliana B05.10]
  misc_feature (27)..(356): SWISSPROT Homolog: EC 1.1.99.1 Choline dehydrogenase
MNAGNSIGLACLGNGRLMYLQYPLEELAVKTDTLVQSIVLDDESRAIGALLEDGTEIRSRNIIVAAGAYRTPQLLMLSGIGPRDALETCGIDVKVESSEVGKNFNDHIMVQMNWKLKDPSQGYALGSANPVFTQPEFKKGAPISYIASTTVPREVLEKAIAKDEGENNVTNEHPLLKRDWALMENIVIHVGRPPVAMDGSHISTTLMGMKPTSRGIVTIASKDPRDDPLLDPNYFATEVDKTVWRYSLRKISELMAGETALGGIVSGETPLPGMEPLRPDSTDQALDERVKKQGISAFHGSSSCSMGSVVDAELRVGGVSNLRIVDASVFPISIGAHIQAAVYALAEQAAVIIAGERS

SEQ ID NO: 7084 - DNA, 480 bp, Muscodor strobelii
  misc_feature: SGI cDNA ID NO. 562117
  misc_feature: Encodes the peptide sequence at SEQ ID NO 7085
atgtctgctccagcctggctacgcttgctcccggtcatctcttccacatcgtccttgtggtacgcgtgggatcaatacgagcaactgaccatatcgcgccagcccgggctcagcagcatgagcgatcaaatcgtgccgcagtacttcactgcgtttttcaatcgaggaactcctagggtactaggacttcttgtcaccaccgtcgtttcttcgggcgccatcttacgatactcctcctcatcgacaggcctacaacagcaggcttcggctccttggcatgttgcgggcatcttgtttgccgttgctcacctggcgtgggtaccggttactctcccatccgtgagagccattatgaacaacgccaaggataggaatcttgccaaactcgatgagtggcttcggctacatgtgtggcgaagtctcacaactgagatgatgacgtgggtttgctgcatcatggcagctatcaagtcctcctga

SEQ ID NO: 7085 - protein, 159 aa, Muscodor strobelii
  misc_feature: SGI Peptide ID NO. 562117
  misc_feature (7)..(154): NCBI GI: 145228559 Blast Desc: An01g01475 [Aspergillus niger] gi|134054679|emb|CAK43520.1| [Aspergillus niger]
  misc_feature (5)..(154): NCBI GI: 212534222 Blast Desc: conserved [Penicillium marneffei ATCC 18224] gi|210069666|gb|EEA23756.1| conserved [Penicillium marneffei ATCC 18224]
  misc_feature (7)..(154): NCBI GI: 212544170 Blast Desc: integral membrane protein, [Penicillium marneffei ATCC 18224] gi|210065208|gb|EEA19302.1| integral membrane protein, [Penicillium marneffei ATCC 18224]
  misc_feature (7)..(154): NCBI GI: 242811669 Blast Desc: integral membrane protein, [Talaromyces stipitatus ATCC 10500] gi|218714136|gb|EED13559.1| integral membrane protein, [Talaromyces stipitatus ATCC 10500]
  misc_feature (7)..(158): NCBI GI: 241864948 Blast Desc: [Metarhizium anisopliae]
  misc_feature (7)..(145): NCBI GI: 256730046 Blast Desc: NECHADRAFT_102747 [Nectria haematococca mpVI 77-13-4]
  misc_feature (7)..(145): NCBI GI: 85094936 Blast Desc: NCU06120 [Neurospora crassa OR74A] gi|28921440|gb|EAA30746.1| [Neurospora crassa OR74A]
  misc_feature (7)..(154): NCBI GI: 256731043 Blast Desc: NECHADRAFT_102832 [Nectria haematococca mpVI 77-13-4]
  misc_feature (7)..(150): NCBI GI: 119485851 Blast Desc: integral membrane protein, [Neosartorya fischeri NRRL 181] gi|119410424|gb|EAW20371.1| integral membrane protein, [Neosartorya fischeri NRRL 181]
  misc_feature (11)..(158): NCBI GI: 46123481 Blast Desc: FG06118.1 [Gibberella zeae PH-1]
MSAPAWLRLLPVISSTSSLWYAWDQYEQLTISRQPGLSSMSDQIVPQYFTAFFNRGTPRVLGLLVTTVVSSGAILRYSSSSTGLQQQASAPWHVAGILFAVAHLAWVPVTLPSVRAIMNNAKDRNLAKLDEWLRLHVWRSLTTEMMTWVCCIMAAIKSS

SEQ ID NO: 7086 - DNA, 3570 bp, Muscodor strobelii
  misc_feature: SGI cDNA ID NO. 562118
  misc_feature: Encodes the peptide sequence at SEQ ID NO 7087
atggaggagagacgtccgggcggtgctgggggtcccaacactcctggaaacaggacgagtggcattccaaagccctcttcccggcttcccttgcctcggtcaggcatcccgacaccgactactgtttcgcgttcccaaaatacttcctctacgccctcctctactactcctaaaccctcctcagcacagcctggtgccattggtagcatccgtaacacacgcttgcgcccggcagcatcaagggagcagctagtgaatccttctgctactctccccaggtcctttcgacctagtcaatctacatactcacagcaaatcaccccgaaagatgtcggttctcggaacggaagttcatcacgcgataggatacagcagtcaattcttagtcaaccaagtgacactagtagcccgttcaagaagcctctggctcccaagcgaagaccatccactcagttcagccatgccactccccaatcatctactacaacaatccccgaagatgaatcggttaatcacgacaacgtcgcctcatcacctacggacgagacacccgagtatcctccactggtcacttcagcccagcaagggctgactttcgattccctttcagagttgccatataaaccgagaccatccctaagtgagaggaccatcgcaacactggccaactctcctgcagtcaagagaagaggtagtgacttctttgtcgagtctggaggtgtgaagaggccacaatccaaaggaagcgggggatcacgacctggatcaagctaccagtcagatgggtcaaatggacgttcaggaaggcctcttagccggcccggctcaagctctgagcctctagacacaaacaatgctagcttcagagcgtccactaacacatatagacctcctttgcctccggtccagggcactccatccaagcgtgtgtctgccttcggatctgtcggcacgccaggtacaaaaagtacaccaacggtgaattcacgaacatcattgcgcaagatgccctcgcttgcttcgctggcgacttctataccacgaaccccaagccccgagaagcagttcggtctctctgtttccaagagcggctctcgaactttggcagcgaggccgctgaaaacacgtgcatcagttcagggcctgttcatgaaaccttctatgccctcactccgcgatgctccgcctcagatcataccgcctccgtctgcacggaaggtatctatcacctcatccccaagaacatctggcgagggccgtgacagccgtggtctatctagtccttcaaccacatccacagcccccaccgttctctcagtcgacgagcctgctccatcggccattcgcaaatcatcttccgctctgcgggatcagatcgccaaagcgaaagctgcaaaacgagctgcggatagacgagtatctagtccacaagcatcggcagcgctcaagtcgcccgtcattcccacggataatggattggattttgggttctccgatgacccatttggtcagaagaagttcgaagatacgaaccgaaaggctttacagtcgcgcattatcacagcgagatcaagcggcagactcaatatcgctgctatgggactaaaagagattcccaacgaggttttgaagatgtacgaactggagtcatttggaggctcgggcggagcatgggcagagagcgtggatttgaccagacttgtggcctcggataacgagctagaggacatcagcgacactatattccctgatattgatcccaatactgccgaaaccgacgaaatggatgatcagggacggatattctggggtctggaatcagctgaccttcataacaactctctcatctctcttccactaggcttacgacgcctcgagcagctgacgtcgttaaacttgtcaggaaataagctcactaacaactcccttgaaatcattgctcaatgtcgtggccttagagatctcaaactggccaacaatttactttacggctctctgggtgacttcttcatccttgagaacatagagagtcttgacattcacggaaataatgtttccgctttgccttcagggctcgagaaaatgaggagacttcgcattattaatctggatgagaacgccttcgagtctctcccttttcagagtctttcggcactaccgcttagtgagctaactgtgcgaaagaataagcttgcgggcatattgattgacagccgagttagctgtctctcgcagcttcagattctggattgctctggcaatcagctgagctacatcttccctccagaggccaccgaaagactgcgcctcccctcactacatcaattgacggtatcgatgaaccgtctgaaagccttgcctgatatgaacgattgggatagtatcctaaccgtcaatgccgatgacaacagtattgccgctcttccggaaggattcattagccgcgagactcttagacatgccggattctcgagcaatgatatccgcattatccctcctgaaattgcccgcatggacaatctcgtcatgcttcgaatcacaggtaatccattgagagataaaaagttcacatctttggcgacagatgaattgaaagacgcactattcgcaagactagagccattgcctggtcatgacatgggaagcgtggagaatttcgcaaatggcatcgattctttcggaaaccacgcgatttccaatagtcgtcctggcgttgaatctgagggccaaagaacaccagtcaagaagacaaacgatggcgaagacgagtctggactgtcagatacagatgattttgctacacctcccacttccgctcctcactcgcccatccaacccgcagctaggtcccgagggcagaccctttctagtcaaacgtggccagtgaagcctggaggcatcctcgacagatccaatacggcatcatcctccctacaccccgtggtctgttccaagctcgcggctgtggagtctgtaacagaaattcgtctccgacataatacgttctcgcaatttccaaactccctatctttcttctgcgataccctaacatcgctttgcctggcccacaaccagttgaccggcgagagctggctaaccgaacggattgatcttactgctctcagagagctgaatttgcagtctaatttcatcacaagtctcacacctttgacttctaatctttgcgctcccaatctccagagactcgacgtttcgctgaacagaatcgtcaagcttccaaaactccgagaaaacttccctagtctctcagtccttttcatagccaacaatcgattagaagagttggaccccgatgccgttcaaggcgtcaagattgtggatgccagtaacaatgagatagcccatcttaatcctcgcctcggcttgctcgggcttgagaggctcgatgtcatgggcaacaggttccgcgttcctaggtggaacgttctcgaacgtggcactgaagcaaccctacgatggcttagaagccgcgtgcctgtcgccgaaatggcggagtggcgcacaaagtcgggtatcacagatgacgattctggagacggcgaggactag

SEQ ID NO: 7087 - protein, 1189 aa, Muscodor strobelii
  misc_feature: SGI Peptide ID NO. 562118
  misc_feature (17)..(1189): NCBI GI: 116201845 Blast Desc: CHGG_08807 [Chaetomium globosum CBS 148.51] gi|88177325|gb|EAQ84793.1| CHGG_08807 [Chaetomium globosum CBS 148.51]
  misc_feature (22)..(1188): NCBI GI: 256733846 Blast Desc: NECHADRAFT_35175 [Nectria haematococca mpVI 77-13-4]
  misc_feature (18)..(1189): NCBI GI: 145611424 Blast Desc: MGG_00393 [Magnaporthe grisea 70-15] gi|145018716|gb|EDK02995.1| MGG_00393 [Magnaporthe grisea 70-15]
  misc_feature (22)..(1183): NCBI GI: 46127815 Blast Desc: FG08285.1 [Gibberella zeae PH-1]
  misc_feature (18)..(1182): NCBI GI: 171681806 Blast Desc: protein product [Podospora anserina] gi|170940862|emb|CAP66512.1| protein product [Podospora anserina]
  misc_feature (18)..(1186): NCBI GI: 85097805 Blast Desc: NCU05545 [Neurospora crassa OR74A] gi|28922000|gb|EAA31271.1| [Neurospora crassa OR74A]
  misc_feature (624)..(1189): NCBI GI: 261361063 Blast Desc: leucine-rich repeat-containing protein [Verticillium albo-atrum VaMs.102]
  misc_feature (13)..(1175): NCBI GI: 154323542 Blast Desc: BC1G_00170 [Botryotinia fuckeliana B05.10] gi|150842399|gb|EDN17592.1| BC1G_00170 [Botryotinia fuckeliana B05.10]
  misc_feature (210)..(1181): NCBI GI: 226289588 Blast Desc: leucine-rich repeat-containing protein [Paracoccidioides brasiliensis Pb18]
  misc_feature (181)..(1173): NCBI GI: 70982203 Blast Desc: conserved leucine-rich repeat protein [Aspergillus fumigatus Af293] gi|66844253|gb|EAL84592.1| conserved leucine-rich repeat protein [Aspergillus fumigatus Af293] repeat
MEERRPGGAGGPNTPGNRTSGIPKPSSRLPLPRSGIPTPTTVSRSQNTSSTPSSTTPKPSSAQPGAIGSIRNTRLRPAASREQLVNPSATLPRSFRPSQSTYSQQITPKDVGSRNGSSSRDRIQQSILSQPSDTSSPFKKPLAPKRRPSTQFSHATPQSSTTTIPEDESVNHDNVASSPTDETPEYPPLVTSAQQGLTFDSLSELPYKPRPSLSERTIATLANSPAVKRRGSDFFVESGGVKRPQSKGSGGSRPGSSYQSDGSNGRSGRPLSRPGSSSEPLDTNNASFRASTNTYRPPLPPVQGTPSKRVSAFGSVGTPGTKSTPTVNSRTSLRKMPSLASLATSIPRTPSPEKQFGLSVSKSGSRTLAARPLKTRASVQGLFMKPSMPSLRDAPPQIIPPPSARKVSITSSPRTSGEGRDSRGLSSPSTTSTAPTVLSVDEPAPSAIRKSSSALRDQIAKAKAAKRAADRRVSSPQASAALKSPVIPTDNGLDFGFSDDPFGQKKFEDTNRKALQSRIITARSSGRLNIAAMGLKEIPNEVLKMYELESFGGSGGAWAESVDLTRLVASDNELEDISDTIFPDIDPNTAETDEMDDQGRIFWGLESADLHNNSLISLPLGLRRLEQLTSLNLSGNKLTNNSLEIIAQCRGLRDLKLANNLLYGSLGDFFILENIESLDIHGNNVSALPSGLEKMRRLRIINLDENAFESLPFQSLSALPLSELTVRKNKLAGILIDSRVSCLSQLQILDCSGNQLSYIFPPEATERLRLPSLHQLTVSMNRLKALPDMNDWDSILTVNADDNSIAALPEGFISRETLRHAGFSSNDIRIIPPEIARMDNLVMLRITGNPLRDKKFTSLATDELKDALFARLEPLPGHDMGSVENFANGIDSFGNHAISNSRPGVESEGQRTPVKKTNDGEDESGLSDTDDFATPPTSAPHSPIQPAARSRGQTLSSQTWPVKPGGILDRSNTASSSLHPVVCSKLAAVESVTEIRLRHNTFSQFPNSLSFFCDTLTSLCLAHNQLTGESWLTERIDLTALRELNLQSNFITSLTPLTSNLCAPNLQRLDVSLNRIVKLPKLRENFPSLSVLFIANNRLEELDPDAVQGVKIVDASNNEIAHLNPRLGLLGLERLDVMGNRFRVPRWNVLERGTEATLRWLRSRVPVAEMAEWRTKSGITDDDSGDGED

SEQ ID NO: 7088 - DNA, 4557 bp, Muscodor strobelii
  misc_feature: SGI EST ID NO. CUFF.17617.1
  misc_feature: Variant of the nucleotide sequence at SEQ ID NO 7086
gtcgcgtctagcgtgacgttacccagcagcgcggtgcacatccaagagccaccgcaaattaccatctccatcgcgaccactcgaatcgataatgacagtgaagcaccaaccaggcctgtctctgtgctagcaaccccccaattcactcccttgccagccagcccgtgtgaagcggactgggtcccctttccttcgtgcattctgttcctgcatatcgtcccttcattggagagagactgcttgtttgccagctcccaaacatctaaattcacttacaattggccctcggagtggcatcagtcttcacatgttcggctattagtcagactatatatatactgcctggctgccggcatggaggagagacgtccgggcggtgctgggggtcccaacactcctggaaacaggacgagtggcattccaaagccctcttcccggcttcccttgcctcggtcaggcatcccgacaccgactactgtttcgcgttcccaaaatacttcctctacgccctcctctactactcctaaaccctcctcagcacagcctggtgccattggtagcatccgtaacacacgcttgcgcccggcagcatcaagggagcagctagtgaatccttctgctactctccccaggtcctttcgacctagtcaatctacatactcacagcaaatcaccccgaaagatgtcggttctcggaacggaagttcatcacgcgataggatacagcagtcaattcttagtcaaccaagtgacactagtagcccgttcaagaagcctctggctcccaagcgaagaccatccactcagttcagccatgccactccccaatcatctactacaacaatccccgaagatgaatcggttaatcacgacaacgtcgcctcatcacctacggacgagacacccgagtatcctccactggtcacttcagcccagcaagggctgactttcgattccctttcagagttgccatataaaccgagaccatccctaagtgagaggaccatcgcaacactggccaactctcctgcagtcaagagaagaggtagtgacttctttgtcgagtctggaggtgtgaagaggccacaatccaaaggaagcgggggatcacgacctggatcaagctaccagtcagatgggtcaaatggacgttcaggaaggcctcttagccggcccggctcaagctctgagcctctagacacaaacaatgctagcttcagagcgtccactaacacatatagacctcctttgcctccggtccagggcactccatccaagcgtgtgtctgccttcggatctgtcggcacgccaggtacaaaaagtacaccaacggtgaattcacgaacatcattgcgcaagatgccctcgcttgcttcgctggcgacttctataccacgaaccccaagccccgagaagcagttcggtctctctgtttccaagagcggctctcgaactttggcagcgaggccgctgaaaacacgtgcatcagttcagggcctgttcatgaaaccttctatgccctcactccgcgatgctccgcctcagatcataccgcctccgtctgcacggaaggtatctatcacctcatccccaagaacatctggcgagggccgtgacagccgtggtctatctagtccttcaaccacatccacagcccccaccgttctctcagtcgacgagcctgctccatcggccattcgcaaatcatcttccgctctgcgggatcagatcgccaaagcgaaagctgcaaaacgagctgcggatagacgagtatctagtccacaagcatcggcagcgctcaagtcgcccgtcattcccacggataatggattggattttgggttctccgatgacccatttggtcagaagaagttcgaagatacgaaccgaaaggctttacagtcgcgcattatcacagcgagatcaagcggcagactcaatatcgctgctatgggactaaaagagattcccaacgaggttttgaagatgtacgaactggagtcatttggaggctcgggcggagcatgggcagagagcgtggatttgaccagacttgtggcctcggataacgagctagaggacatcagcgacactatattccctgatattgatcccaatactgccgaaaccgacgaaatggatgatcagggacggatattctggggtctggaatcagctgaccttcataacaactctctcatctctcttccactaggcttacgacgcctcgagcagctgacgtcgttaaacttgtcaggaaataagctcactaacaactcccttgaaatcattgctcaatgtcgtggccttagagatctcaaactggccaacaatttactttacggctctctgggtgacttcttcatccttgagaacatagagagtcttgacattcacggaaataatgtttccgctttgccttcagggctcgagaaaatgaggagacttcgcattattaatctggatgagaacgccttcgagtctctcccttttcagagtctttcggcactaccgcttagtgagctaactgtgcgaaagaataagcttgcgggcatattgattgacagccgagttagctgtctctcgcagcttcagattctggattgctctggcaatcagctgagctacatcttccctccagaggccaccgaaagactgcgcctcccctcactacatcaattgacggtatcgatgaaccgtctgaaagccttgcctgatatgaacgattgggatagtatcctaaccgtcaatgccgatgacaacagtattgccgctcttccggaaggattcattagccgcgagactcttagacatgccggattctcgagcaatgatatccgcattatccctcctgaaattgcccgcatggacaatctcgtcatgcttcgaatcacaggtaatccattgagagataaaaagttcacatctttggcgacagatgaattgaaagacgcactattcgcaagactagagccattgcctggtcatgacatgggaagcgtggagaatttcgcaaatggcatcgattctttcggaaaccacgcgatttccaatagtcgtcctggcgttgaatctgagggccaaagaacaccagtcaagaagacaaacgatggcgaagacgagtctggactgtcagatacagatgattttgctacacctcccacttccgctcctcactcgcccatccaacccgcagctaggtcccgagggcagaccctttctagtcaaacgtggccagtgaagcctggaggcatcctcgacagatccaatacggcatcatcctccctacaccccgtggtctgttccaagctcgcggctgtggagtctgtaacagaaattcgtctccgacataatacgttctcgcaatttccaaactccctatctttcttctgcgataccctaacatcgctttgcctggcccacaaccagttgaccggcgagagctggctaaccgaacggattgatcttactgctctcagagagctgaatttgcagtctaatttcatcacaagtctcacacctttgacttctaatctttgcgctcccaatctccagagactcgacgtttcgctgaacagaatcgtcaagcttccaaaactccgagaaaacttccctagtctctcagtccttttcatagccaacaatcgattagaagagttggaccccgatgccgttcaaggcgtcaagattgtggatgccagtaacaatgagatagcccatcttaatcctcgcctcggcttgctcgggcttgagaggctcgatgtcatgggcaacaggttccgcgttcctaggtggaacgttctcgaacgtggcactgaagcaaccctacgatggcttagaagccgcgtgcctgtcgccgaaatggcggagtggcgcacaaagtcgggtatcacagatgacgattctggagacggcgaggactaggggtccgcttcacatttgcttttcgtcttgcttgagacttaatgaggaagaagtatatggcgttcttttcaactgtaggaataactaactgtacaagtgttggtcttgttgtgtaatgaggagttgcatctggaatggaaaaaactggagtataggcatagcctgccctgagataccttgttgtaatgtttgcaattggcgatcatgagatcatggaaggataccgtcgtgtactgagagacaaataatcaattgtatgagtataatcgctgactgctggcatcggtggtagcctaatcaaccgtatgaatgtagttgcctttcactgggcactaatacttatttggttgaatgtcatcacgcatggtcgacgaccgtccctagtggtcattcgaaagtcaccgtctacatccatcatccctttttttcgagtccgaacctgacaaacatcttgtgccagctatttgcgtaaaagccgcagtcccgaccccaatggcatcatcgtttacagattcttctaactatataccagctgaaataattaaactattaaatttaatgctgataaatgactctagcctattaatttctcgaaatctttccgtggcatcggctgcataatgtcgcgctagg

SEQ ID NO: 7089 - DNA, 636 bp, Muscodor strobelii
  misc_feature: SGI cDNA ID NO. 562119
  misc_feature: Encodes the peptide sequence at SEQ ID NO 7090
atggatctcatgatcgcgcgagcaagggctaaacacccgcgtctgatgcacgccatcgagagctccgatgtggtcacattgcggcgtataatgaccgcgatgtgtatggaatctgaagtctgtcgtggagagatcgagaatcgaatgcttgcgcgaaagcgtgacattattgagatatccagttctgaggattactctgaggatgggtccgaagacgacgcttccgaagatgattccgaggatgactccgaagaggatagaaggccccctccgaaaaagagagtgaagatagccaaaatcaagaccgccgaaaaagtcaagacagcagacacttccgatgacagcgtactactgtctagattcgagaaatgcgagacgtgcaaggagaccttcgatgtcactatgaaccacaagaaagcgtgtcggacgcatagcggcctactcgaaatcgatgaggagatgttccctgacgatgatcaaatcatgtatgatccgagtagcgtcgatccgtatactgactggcgccgcaaatcatgtcccgagggtttcgtatatgaatgctgcgaccaggattgtagagccgaaggatgcgaagtagggcctcataagcccctgagaaagctcagaggagtctag

SEQ ID NO: 7090 - protein, 211 aa, Muscodor strobelii
  misc_feature: SGI Peptide ID NO. 562119
  misc_feature (118)..(205): NCBI GI: 169614265 Blast Desc: SNOG_10270 [Phaeosphaeria nodorum SN15] gi|111061485|gb|EAT82605.1| SNOG_10270 [Phaeosphaeria nodorum SN15]
  misc_feature (120)..(209): NCBI GI: 169617505 Blast Desc: SNOG_11932 [Phaeosphaeria nodorum SN15] gi|111059856|gb|EAT80976.1| SNOG_11932 [Phaeosphaeria nodorum SN15]
  misc_feature (118)..(204): NCBI GI: 242209331 Blast Desc: [Postia placenta Mad-698-R] gi|220730423|gb|EED84280.1| [Postia placenta Mad-698-R]
  misc_feature (116)..(205): NCBI GI: 169845395 Blast Desc: [Coprinopsis cinerea okayama7#130] gi|116509482|gb|EAU92377.1| [Coprinopsis cinerea okayama7#130]
  misc_feature (108)..(203): NCBI GI: 255937007 Blast Desc: Pc13g11120 [Penicillium chrysogenum Wisconsin 54-1255] gi|211584150|emb|CAP92181.1| Pc13g11120 [Penicillium chrysogenum Wisconsin 54-1255]
  misc_feature (14)..(208): NCBI GI: 156043715 Blast Desc: [Sclerotinia sclerotiorum 1980] gi|154695248|gb|EDN94986.1| [Sclerotinia sclerotiorum 1980]
MDLMIARARAKHPRLMHAIESSDVVTLRRIMTAMCMESEVCRGEIENRMLARKRDIIEISSSEDYSEDGSEDDASEDDSEDDSEEDRRPPPKKRVKIAKIKTAEKVKTADTSDDSVLLSRFEKCETCKETFDVTMNHKKACRTHSGLLEIDEEMFPDDDQIMYDPSSVDPYTDWRRKSCPEGFVYECCDQDCRAEGCEVGPHKPLRKLRGV

SEQ ID NO: 7091 - DNA, 2459 bp, Muscodor strobelii
  misc_feature: SGI EST ID NO. CUFF.17574.1
  misc_feature: Variant of the nucleotide sequence at SEQ ID NO 7089
tgtaaatcgagctactcgaccatttgctaacttcctttctttcctcatctctgactaacccaaatggaatatctgcactctatctttgaactggggtcagggattcgcgtcaatccaaattacttttgtcatttgaccacatgaacccgcgtttctttaactaaacaatcattattccgtacgacgggcagtatcgccactggcaacatcgtaggaactaaattacatcgaaaatacacagcgacaacatggatctcatgatcgcgcgagcaagggctaaacacccgcgtctgatgcacgccatcgagagctccgatgtggtcacattgcggcgtataatgaccgcgatgtgtatggaatctgaagtctgtcgtggagagatcgagaatcgaatgcttgcgcgaaagcgtgacattattgagatatccagttctgaggattactctgaggatgggtccgaagacgacgcttccgaagatgattccgaggatgactccgaagaggatagaaggccccctccgaaaaagagagtgaagatagccaaaatcaagaccgccgaaaaagtcaagacagcagacacttccgatgacagcgtactactgtctagattcgagaaatgcgagacgtgcaaggagaccttcgatgtcactatgaaccacaagaaagcgtgtcggacgcatagcggcctactcgaaatcgatgaggagatgttccctgacgatgatcaaatcatgtatgatccgagtagcgtcgatccgtatactgactggcgccgcaaatcatgtcccgagggtttcgtatatgaatgctgcgaccaggattgtagagccgaaggatgcgaagtagggcctcataagcccctgagaaagctcagaggagtctagatctatcaacgcacaaagtcgtcgccctgggggtaaaatgtgactatggcaacatacttgcttcgacgtagtcattgctaaggtcgtttatacctgattgccatattttgatgcgcatcgacgcagatcttagctcatcgccgccctcattcgtcttgatatacgtctgatcttgttcttcacacgctcgcgtcaagctttccgatccacatagcttcttgcgcgtcaactgagtccatatgtatgcatccaaagacctcgataaatcgtcactgcctggctgctggcaaccaactccacacatctggtgatctcagcttgtagagatcttcatatgttgctcgaaagacccagctggcagcgtagtctagcagattcttgaccggcgtgagcagcagtggcgcaaactcgtacagcaccgcgttatacgcggatctcccgaagatcagcgtctcaaatacttttggtcgactggccacccacgacaccggactatacactatcccatgccatttcaacctgactaagccgtagtcgagcaacgtgtggacttcggaatgggtgaagagccagacgggaaggacgacagcagggatcaagtttctcgagtcgagaaacgacgccgcgacagatataaaccacaagacccatatgattcgtaccgcccaatgcaaggagtcttcgccgttgactatgagaccctcacgtagcacttcggttatgaggattccgaaaatgagaagccagatgcatgtcgaccagcgcaggactttcaacaggagcttccagtcctgcagtatgaagaagctcaaaacgatcgtccatacaaacgaggcggtcaggaagaaaatcagcatctcaaggacctaagtgataagtctcgattgcctcgacgttaagcctggaatccgttggtatcaattccgatagcctaatgtgacacctacacaacccgagcctcgtgcaatagacttcaattgtcacttcacagaattgcgtctgtatttttgcgcattagaccgactaaaagttttgtttgttcatcatattcctgaaaccggaaaattagcacccctctttgttagattaggtacctacctatccacgagttcctcgtctaccacagagtgataccgattagaggctcttcgcgtgctattcatagactaataacatcaaacttagcttcttcagatgagtctgcttacttgaagagcaaccgtctcggaagattatcggttcaccccaatgcttgctgcccctcgaatcatgccgggaatgaactgcaaaattccaagctgtttcctctcagacatcgaaacgcatcctctttcacatagtacaagtcgctcttgctaggactacatgtctagttttaagtgctcctgctcagaagtgctgcttgttgtgctcgatcctgccttgaggagcagaccaacgagctggtaatcatgctctctgttatatcaacgagaaacagttgaagtcagtacaatcaacatgaagaagctaaagttgtgtaaactagatatgtgagaaatgatatttatttagcaagtaataccgaagtcatgc

SEQ ID NO: 7092 - DNA, 1488 bp, Muscodor strobelii
  misc_feature: SGI cDNA ID NO. 562120
  misc_feature: Reduced expression when VOC is produced
  misc_feature: Encodes the peptide sequence at SEQ ID NO 7093
atgatgctcaccgtcaaacagccccttcattacggctacaagcctttccatgatttaccgacaccgcctcgatcctcgccccccgtgacgatcttggacgcaccaccaaaactgaccgccacctcccagctgcaacgcagtccgccagctcagtccatgtcggcgcctcatcgtggtctgccactgccggcagccatggcactaaaccaacccccgccgccgcctggtcatcctttaccgcctactccaagttcaggactgcaagctcagccacctccggtttctacgcgcagccaaagcttggggccattgccgccaccaccccaatggcagggttctgaggagtcgatgcggaattggttgttgactaaggctgaggaagagcgcagaagacaggaagaggagaagactcggcaagaatccttacgcttagaacaaagaaggatcgagaatgagatgcttcgcacatcacttgatcgtggtatcccaccgtcgatgatcccagtggtcttcgcgggtatgagtggtggaatcttacctcaagcgaccttggatttcctccaacagcaactactaccacagcatcaccatggtcaagctttaagcgcccaggcaccgttgtctcctgagcatcgaagagactctcagcagtacgcctcatacagcggctcgagtggcgtcccacctacgcccgtgtccggagctggaccgcaggcgggatttgttccctaccaaggtcctggttcgccaacaagaccaagagctcagacgatgaccatgagcgggcccgccggccgtccgataggtgcgttggggggttcggcgctacctcgattgagtacgggagaaggtagcagtgcctccaccgggccttctcatggttcacatgggacacaacagcagcaggtatcaaccacacagcaagatacgcagccatctccttccatatactttcaccactggcaacctccaacttcacaggcaggctctggccagcaaggagcctcatccgtggattcgccaaagaaacgaaaagcaacgggaccccatcaagctccacctccccctaggcgatccagatctccgcccttcggacagttcgccagcacctccacgatatctaatcctccccccggccggcgcggacattcacggcagagaagcgatatctcggcatacgggtcggccagtcggactcgggatattctaggaccgcatcgcggattctccccgggcgtcgggcatcccgttgttgcgacatcgagagaaacgacgttcgccgagccttctcaccaaccccggagcagtgctcattcggtctcatccttgctgtcagaccaaccctcgcctcggttcatgccagacactagaacccacaggccggcagagggaggatatcattccagaggggcgtcggaagaaagagagcgaggtgcgcctccgcctccaccgccgcctccgacctcgcgcgaacgtggcaaagattaa

SEQ ID NO: 7093 - protein, 495 aa, Muscodor strobelii
  misc_feature: SGI Peptide ID NO. 562120
  misc_feature (2)..(448): NCBI GI: 171689510 Blast Desc: protein product [Podospora anserina] gi|170944717|emb|CAP70828.1| protein product [Podospora anserina]
  misc_feature (101)..(449): NCBI GI: 261354465 Blast Desc: conserved [Verticillium albo-atrum VaMs.102]
  misc_feature (53)..(477): NCBI GI: 28881098 Blast Desc: conserved [Neurospora crassa]
  misc_feature (53)..(477): NCBI GI: 85076374 Blast Desc: NCU01818 [Neurospora crassa OR74A] gi|28916946|gb|EAA26679.1| [Neurospora crassa OR74A]
  misc_feature (117)..(464): NCBI GI: 116199495 Blast Desc: CHGG_07903 [Chaetomium globosum CBS 148.51] gi|88179182|gb|EAQ86650.1| CHGG_07903 [Chaetomium globosum CBS 148.51]
  misc_feature (53)..(344): NCBI GI: 145606052 Blast Desc: MGG_06699 [Magnaporthe grisea 70-15] gi|145013786|gb|EDJ98427.1| MGG_06699 [Magnaporthe grisea 70-15]
  misc_feature (2)..(266): NCBI GI: 46123235 Blast Desc: FG05995.1 [Gibberella zeae PH-1]
  misc_feature (53)..(376): NCBI GI: 154303241 Blast Desc: BC1G_09369 [Botryotinia fuckeliana B05.10] gi|150854932|gb|EDN30124.1| BC1G_09369 [Botryotinia fuckeliana B05.10]
  misc_feature (2)..(257): NCBI GI: 256732984 Blast Desc: NECHADRAFT_122482 [Nectria haematococca mpVI 77-13-4]
  misc_feature (1)..(418): NCBI GI: 189211044 Blast Desc: conserved [Pyrenophora tritici-repentis Pt-1C-BFP] gi|187977946|gb|EDU44572.1| conserved [Pyrenophora tritici-repentis Pt-1C-BFP]
  misc_feature: Useful for introducing or modulating the production of volatile compounds
MMLTVKQPLHYGYKPFHDLPTPPRSSPPVTILDAPPKLTATSQLQRSPPAQSMSAPHRGLPLPAAMALNQPPPPPGHPLPPTPSSGLQAQPPPVSTRSQSLGPLPPPPQWQGSEESMRNWLLTKAEEERRRQEEEKTRQESLRLEQRRIENEMLRTSLDRGIPPSMIPVVFAGMSGGILPQATLDFLQQQLLPQHHHGQALSAQAPLSPEHRRDSQQYASYSGSSGVPPTPVSGAGPQAGFVPYQGPGSPTRPRAQTMTMSGPAGRPIGALGGSALPRLSTGEGSSASTGPSHGSHGTQQQQVSTTQQDTQPSPSIYFHHWQPPTSQAGSGQQGASSVDSPKKRKATGPHQAPPPPRRSRSPPFGQFASTSTISNPPPGRRGHSRQRSDISAYGSASRTRDILGPHRGFSPGVGHPVVATSRETTFAEPSHQPRSSAHSVSSLLSDQPSPRFMPDTRTHRPAEGGYHSRGASEERERGAPPPPPPPPTSRERGKD

SEQ ID NO: 7094 - DNA, 3145 bp, Muscodor strobelii
  misc_feature: SGI EST ID NO. CUFF.17738.0
  misc_feature: Variant of the nucleotide sequence at SEQ ID NO 7092
aaagaatcaagacggacaccaacccaaagccgggccacacaccctggccgccggctttccatcctggaaccctgagtaacccaagggatgctcagggatagacaaaactctgctggtactcgacaggtcagccttgtcgttaaaggaatgagacgaaagcttcccctcctaagtccccctcctccggcacgtctcgactcctgttgtcaagccacagctcgatgtgccttctctcctatgatgatttgtttacgattctcctagtgtctctctactggccattttacttctcgcgtcttgttgatctcctcgaacattacttgtgcgcctctgccgcatcccactgtctgtacccacgagcgggcatgactcgggagacacacaccaaaggctcattcttctgacggacaacatttccaccgtcgtcgtcttcactgctttatacgtagacttcttccgttctcgggctcctcccggccaacccaattcccttctcttgttgtcgacgactcggatcatcaactggtcactgcggctctggtgtcagttcgtccatcggctgcaccgcttccaatcaagcctgaccattgtgtactccacatctccattcgagttcaggttgcctttgaccctacctactttccattttgggcattgcctaaatcggccgcaagtagcaggatttattcatacagctcgatttaccgtgccctgtcttccaagatctacacagagctgtatctcactactgtaggtcttggccttcccgttgaaaacaaggactacgtctgcatcccctctcgtagcgtctagggtggttctcgaagtgctgccgtgccggcgcctgcccagctaggaacggcccaaatactacctcatcgacaatcgtcgccgtgtgccatgcctttttgaaattatatacttcctcacccatgtgcatggtaccgatcttcagatgaggctcgccttagggaccaaactatatcataagccccgattgcttcctgatcccacaccaccaagctggccgacctctccagctttcccacgcaaagccccttcattacggctacaagcctttccatgatttaccgacaccgcctcgatcctcgccccccgtgacgatcttggacgcaccaccaaaactgaccgccacctcccagctgcaacgcagtccgccagctcagtccatgtcggcgcctcatcgtggtctgccactgccggcagccatggcactaaaccaacccccgccgccgcctggtcatcctttaccgcctactccaagttcaggactgcaagctcagccacctccggtttctacgcgcagccaaagcttggggccattgccgccaccaccccaatggcagggttctgaggagtcgatgcggaattggttgttgactaaggctgaggaagagcgcagaagacaggaagaggagaagactcggcaagaatccttacgcttagaacaaagaaggatcgagaatgagatgcttcgcacatcacttgatcgtggtatcccaccgtcgatgatcccagtggtcttcgcgggtatgagtggtggaatcttacctcaagcgaccttggatttcctccaacagcaactactaccacagcatcaccatggtcaagctttaagcgcccaggcaccgttgtctcctgagcatcgaagagactctcagcagtacgcctcatacagcggctcgagtggcgtcccacctacgcccgtgtccggagctggaccgcaggcgggatttgttccctaccaaggtcctggttcgccaacaagaccaagagctcagacgatgaccatgagcgggcccgccggccgtccgataggtgcgttggggggttcggcgctacctcgattgagtacgggagaaggtagcagtgcctccaccgggccttctcatggttcacatgggacacaacagcagcaggtatcaaccacacagcaagatacgcagccatctccttccatatactttcaccactggcaacctccaacttcacaggcaggctctggccagcaaggagcctcatccgtggattcgccaaagaaacgaaaagcaacgggaccccatcaagctccacctccccctaggcgatccagatctccgcccttcggacagttcgccagcacctccacgatatctaatcctccccccggccggcgcggacattcacggcagagaagcgatatctcggcatacgggtcggccagtcggactcgggatattctaggaccgcatcgcggattctccccgggcgtcgggcatcccgttgttgcgacatcgagagaaacgacgttcgccgagccttctcaccaaccccggagcagtgctcattcggtctcatccttgctgtcagaccaaccctcgcctcggttcatgccagacactagaacccacaggccggcagagggaggatatcattccagaggggcgtcggaagaaagagagcgaggtgcgcctccgcctccaccgccgcctccgacctcgcgcgaacgtggcaaagattaacaggattgccaagcaactgatgactctcgcatggctcttcatgatactctagttcagttggtgagaacttattagacaatcatgctctacagccgcaactgtcgcattcgcgactagcgattcaatttcggcagctacatggacatgagcttacaagtagcttttcagatgatcatccagttaaccctttagttggctgtgccattcttcaaatattttacctggccaggaggtttcatttcggcattatcacggttcaaaagcatttaaatggggctagggcgcgtaattacgcgacaaagaggaatttgggttcgcattgggttacggaatggcattcatgttgtactattaagtcgccaacggctattgagatggaataagctcgcattgtacaaaatcaaacatcaacttaacgtcgaatactcatcatagcgcgctctgatgcaaaccatactcagatgcaaatgggatctcgcatacttgctcacgacgacatgttggtgttaagtgtaatttgatatagtctttaacattcaaatctccaatgattggctcattctgggttacagctgtcgggaattttatgatttgtcaaggtgtctacaaagggaagtcaggtc

SEQ ID NO: 7095 - DNA, 7536 bp, Muscodor strobelii
  misc_feature: SGI cDNA ID NO. 562121
  misc_feature: Encodes the peptide sequence at SEQ ID NO 7096
atggacaaccccgtggccatgctggacgagcatgatccacctccccgcatcctcgagcgcctgaaacagatcgccgggtattcgtgggacgagtctaagcggcccttccactccagctacgacaactggcatttcttcggcacgcgcttcgtctccctgcagactgacaccgcttccactcctacccctacacaaccgcatcttgctagtccgccgcctaccggccccagcccgagccggaccctctctgctgggctcctcgacatcgccccctcgcctggtaccaaagctgagcatgctggcgaacgagccaactcttcgactgccagcctgggcctctcgcctgctagtgaccagacagtgaacatcgaagagcgggaaatcgtcgcgcgcatctcgtaccatccactgcgcgaagagagagcttttcagacggcgaagaacctcattgccaccgcagacccggacggggagcataatgtcaagcccttggacctcatccgactgactccccagcccggcgatcgtggacctgttgtggtcgccatctacgagagcctcggccctaactacctatttcgcactatcgatctgggccctgccttctactatgccgtcaaagtgggagacaggctggaggcccatcgccgcgatgacttcaagctcgaccctccgatcagtttgctgtattttttagacttcgccatcggtgctgcgcagtgtctggagctcctacaccatcgccacggcatggcacatggtgagatcagagctgatgccttccattacaatgcggaaacaaatcaagtaaagctcatcagcttcggctccggcgtgcggtcattcgagcacggtctcaccagcactggttggtccacgctctccagagagctcggagccaagaacaagcttgtatacatcagtccagaacagacaggtcggatgcccgctgaaccagatacccggaccgatatctactcactgggcgtcttgttctggatgcttctcacacaacagcccgtcttcactggcgccacgcctcttgatatcgtgcaatgtgtgttgagtcgccggatccccatagtatccaatatccgtaacgatgtacccgagtccattggccgtatcattcagaaatgtacttccaaaaatacgtcagatcgatacaactctgtcagcgggctcagacatgacctgcaggagatacgaagattgctcgagataggtgaccaggaagctttgaggacgtggaccatggctgcaaaagatgtctcctcctacttcatgctacccaccgtcatgatcggccgcgatcgagaacaactagcagtgttgaaagtagtcgaacgagtggcgaaatctcatgcatcaacaaagcatcaaggcctaacccaactagaaagtctctctttgagctccaacagtctcgcgacagccgatgtctctagcgaccggtcgagctcgattgaaggagttgttgtacatggtaattcattcatgccagcaaacaatgctgacgtagagcgcattcgaggtaacaaccagtcacccgacggtgccgatgcgcagatgatctctggagatgcatcttcagccacatccacttcgtctccttatcgttcatcgaaaccgtccgatagacacctgtctatttctacaggcaacggtaacaaaaatagcctggacagttttagcgagcgtcaagcatcaagagttgcaagtagtgaggcgacttcgtcgaatttttcgagacagcttggctccgccaaatacaaacgcagaggatactccgaaattgtcacaatcgaaggcgctggagggctcggcaaaagtttcctggtccagcaagtcctcgccgatgcccggaaaaggggatattgtgcatccgcaaagttcgataccgccagacgtacggcatttggtgctttattgaaactggtggcttcactattcagacaagtctggggggagagaaatgcagacacaactctccacctcgcgctcaaggactatgctgggccgatgtggccaagcctccacaagatcctcggtttaccagaatttctttttggtccgccagaacagacccttaatagatctctgtctacagccacgagctcatcaggtggacgattcacaccacgacttcccgtgatgcggagcaactcttcaggaagctctccatccttcccccgggccaagagtcctcgtatagtagcgcagagctccgaggactatgtccgtacaggtgcatccacaaacacaatccgtttcctaaatacatttctggacatccttcggatcttcactacgcaccacgtcatttgcctatgtctcgacgatctacagtttgcagatgatgagtcgttagacttgattacccaggttgtttctgcgagactcaaaatggtcctcatcgtaacgtaccgacccgaagaattaggaccggagaggttgcacaaaattctgcacccagtagaaaacgaagagactcccaaagagggtcgttcccgggtcacaaaaatcgccctgtctcccttgacagaaagtgagatagtgcaatacatcgctttcacgcttggtatgtcgacagatgaggtcgctcctcttgcccttatcatacagaccaagactgccgggaatcctttttatatgagggagatgttgagtgcatgctaccgacgaagatgtatatggtttgactaccgtgaaaatcgctggatgtacgatttggaccgactttttgtgcaattcaggagcgaacatgggtacgacgttctggatagcgacttcatcacccgtcgactcaacgagttgcccccagcatcacgctggattctatcctgggcagcgctgctaggcaattccttctcctttgatctcgtctgccaactaatgagcggagagtttggtgttgttgaagatgaatgtgacgacgccaaagacaagcagcagcctacagtcttctcaaaacaagaagctgtcgcagggctacaagctgcagtaggcgcctctatcatcattcagggggaaacggacgaccgctttcggtttgctcatgatagatatgttcaagcagcagcgtgtttaaatgagtgcagtgttcggagcatgcatttcgtcgtcgcccaaaccctcatggacaagttcggacagacccttaaggccaaggacagtaccgcctcccatatctgtgagtctattgacttgataaagaaacgaatcccggatcgatatccataccgtaaacatctcatggactgcgcggcaggggctgtcgagaacggtgccaagccaacagctgtcaagtactaccgccatgctatacagcttctacagccagatccgtggacagcaggaatcaatgatgtctattacgatgagacgcttcaattacatctccgagctgcagaatgctacgtctatatgggtaatcatgaggaagctcggcaatttaccgatgcaattcttgacaatgctagatccgctgacgacagggctaccgcatgcctactccattctcgaattcagtttcaaagcgggaacgctttttcagctctcggtattctgaagcagagcttacagcagcttgaggttccatttgacgccgagcccactttcgaatcatgcgatgaagctttcatgcagctttgtacaaagattcaaaccataggtcgtgctcaagccataaacccatccaatgtggatcaggccaaacaaatgagcgccggcgtgatcctcggtgacgctgttcaggctgcatggtggagcagtgatcttgatttctataatctatcaatcgccctgatgaatatgcacttacgtgaaggcccaatgcctcagtccagcatggcattcttatacctagcgacgatagcaatcacgcgattcaacatgattgacttcgctgtgagattaggcagtaagttcactgaactgctcgaaaggttcaaggaccctgcctctttcgctcgtgggtctatggcatttgcagccttcgtcagtcacatccaaattcccctttgcgtgaccgtaagtcagtgcgaccaggtcatatgttatgcggcaagtgctggcgatcgcgcgtccatcattctcacttacggtctctcggtgcaactcaaattttttgcgagcgagaatgttattgatcttgagtctgtttgtcaatactgctgcgaggaagttcccggctggcaccaggacactagaggtggcgctttcttaatctcggttcgacagctatgtcgatcgctacagggcaagacaagaattaaagatgaaacaggtgttatgtcagatgatcaacacgactctgtgtcttacaagagctggcttctacacaccaccaacaacggtggcagatcagctcttctctatgaaaccatggagataataccattgtacctctatggacaccatgagaaagcatgcgaactcggacggagatgtatggacaaacttgatttgatatggtccattcgcaacaccagggttgtaatggtgttttacggacttgcgctctcgggacttctcctccgaagattagccgatccgcgcactgatatctcagaactgcagaacgaagttcaagatacaatcatgcaagtaaatcaactgaacgagaagattaaagcttggcaagtcgcttcgaacgtcaattaccttgcttggtcgaagtttctcgatgcgcaagttgcggagctgcgcggtgaacatggtacggctattcgccaatatgaagctgccctcgaccatgcctctgagtacaactttacgctcgaggaggctcttggaaattatttaatggctgggtttttcatcagacaatcggcgaggaggtcggcgatggctgtcttgaaggagtcagtgtcactgtggagacaatttggagcactaggcatcgctcactgtatcgaggaagagcacgtactactactacatggtcccactcccagttatcggaccgccgaagcagcagtccagacagacttcgccggagactctgcagctatcccatatgctacgcacggtgaagacgtccatcagatatcacaccctgcctttgaagaaacgaaagcgacacggatggcagcttggcgggggtcgacccaaacagaagtgggtgctggtcttccagccctcgatatgattgatctacatgctatactggtctcgtcacaggtcatttcatccgtactgcaaatcgatgtcttgcttaagacaatgtgcgatgtcatcctccagacgtgtggtggatctgtcacgcaagctgcgatcattgtacaagacgatgacgacaaggacaaaagtgcctggtgtattgccgccagtggtgatcctgagagaggtgccacagctcacacgccagggcgatctctcgctggcacttctcgggtcgccgagaacgtcgtgctatattgtacccgattccgcgaggtagtcttcacctctgatgttctcagcgatgagaggttcagcaatgtcgcagtctcttggtcgcagcgcaacccgcaaagcaaggccatcgttgccatgccaatttgccacggctctaaacccctccttggtgtactttacctcgaagggcaacctggctcattcacagacaggattgtcacagtgctgcagctgctggtcaatcagattggaatatcctactccaatgcactggctatgaagggccttgagaaggcatctagagaaaacgacactatgattgagatgcaaagacgagcactaaccaacgctattgaagcagaggccaaagccaaggtagcggaagccgaagctaatcgcaatgtcaaactcgccgaagaggctgcaaaggccaaaaacattttcctcgcgaacgtatctcacgagctgcgcactcctctgaatggcgtcatcggaaattcagaactactcagagacagcccgcttggcaaagaccaactcgaaatggccgactcgatacgagtatcggctgatcttctgcttactgtaataaatgatattcttgatttttctaagatggaggccgacaagatgaagctctatgtcatcgcattcaatccagaagagatggtacgcgaagtcgtaagagccgtttcttacagtaatcgggagaaagcttccaagaagaacgtcaaaatcgttcaggatattaatctgccgtctatgctcatttatggtgatcccacccgcctacaccaggtccttggaaatctcatcggcaacagcttgaagttcacagaggacggatcaatcactattggtgctagagtcgagagcgagacaagtgaacaggccacgcttaccttttgggtacaagatactggtgttggcatcccttccaagcaattagcgaagctgttcaaaccattcagtcaagcagatgcaagtactgcgaggaagtatgggggcagtggtcttggcctcagtatctgcaagtctttgattgagacaatgatgaaaggacaaatcgaacttgacagccaggaagacattggcacgaccgtctggttcactgttgctttcgacaaagccacggaagaggtttcagccggagatgttcaagacatcacaacacctccaacgcccgaacaaacacgtgatgctccgcagatgagtccgcagtatagcaccaaggaatctgtatcgaatcctaaggtggatctgacagtggtgcctaaggatcagctgcggatctgcatcgcggaggataacattatcaaccaaaagattgccgtccagtacgtgcgcaaacttggctacaagcacgttgatgcctatgacaatggacagaaagctattgaagggcttcggcagaaggctcaagagggcacgccataccatgtcatacttatggacgtgcaaatgcctatactggatggttatgatgcaactaagctactacgccaagatccaatcgaggaagtcaggaacattctagtcattgcaatgacagcgtcggctattcaaggcgaccgggaaaaatgcttagctgcaggtatgaatgattacctcgctaagccggtgaaagcagatatcttacaacgcaaactggatacctacacatctagaccagccaatcgaccgtctcaccaggctcctagccctcccacggttactgctccggaaatctcggtcagctctcctcctcttgtacaactaaagaaggatatgtcaccagaaaacacatcacgtgagcttcctacgattccacggcgtacctccagcgaagctgccaagggatcgagcaaaagtccagcatcaacagaggcatccaatgtcccacagcctcaggcagcgaagcggcaacctagaaggctggtgaaaagccgccaaaacagcgaagggataacgtcgttgagtcccagcgacaagcctaaatctgtgctgactaagagaaacctgagaccggatattgtccctttgggtggcgaagagcctcagtcatctgaagatcgggtctcgacgaagaatgataccccccttactactccggctttatctactacatcgactaacagtcccccacttttcaaatag

SEQ ID NO: 7096 - protein, 2511 aa, Muscodor strobelii
  misc_feature: SGI Peptide ID NO. 562121
  misc_feature (1739)..(1887): Pfam Id: PF01590 Pfam Desc: GAF domain
  misc_feature (2059)..(2175): Pfam Id: PF02518 Pfam Desc: Histidine kinase-, DNA gyrase B-, and HSP90-like ATPase
  misc_feature (1944)..(2009): Pfam Id: PF00512 Pfam Desc: His Kinase A (phosphoacceptor) domain
  misc_feature (2229)..(2351): Pfam Id: PF00072 Pfam Desc: Response regulator receiver domain
  misc_feature (779)..(2386): NCBI GI: 225681940 Blast Desc: ethylene receptor [Paracoccidioides brasiliensis Pb03]
  misc_feature (803)..(1813): NCBI GI: 154303215 Blast Desc: BC1G_09356 [Botryotinia fuckeliana B05.10] gi|150854919|gb|EDN30111.1| BC1G_09356 [Botryotinia fuckeliana B05.10]
  misc_feature (887)..(1803): NCBI GI: 261354466 Blast Desc: autoinducer 2 sensor kinase/phosphatase luxQ [Verticillium albo-atrum VaMs.102]
  misc_feature (13)..(1414): NCBI GI: 255936613 Blast Desc: Pc13g09080 [Penicillium chrysogenum Wisconsin 54-1255] gi|211583953|emb|CAP91977.1| Pc13g09080 [Penicillium chrysogenum Wisconsin 54-1255]
  misc_feature (1457)..(2429): NCBI GI: 255936613 Blast Desc: Pc13g09080 [Penicillium chrysogenum Wisconsin 54-1255] gi|211583953|emb|CAP91977.1| Pc13g09080 [Penicillium chrysogenum Wisconsin 54-1255]
  misc_feature (9)..(2355): NCBI GI: 39726359 Blast Desc: histidine kinase HHK1p [Gibberella moniliformis]
  misc_feature (12)..(2355): NCBI GI: 256732985 Blast Desc: [Nectria haematococca mpVI 77-13-4]
  misc_feature (12)..(2374): NCBI GI: 85076393 Blast Desc: NCU01823 [Neurospora crassa OR74A] gi|28916951|gb|EAA26684.1| conserved [Neurospora crassa OR74A]
  misc_feature (1)..(2464): NCBI GI: 46123237 Blast Desc: FG05996.1 [Gibberella zeae PH-1]
  misc_feature (1)..(2366): NCBI GI: 171689430 Blast Desc: protein product [Podospora anserina] gi|170944677|emb|CAP70788.1| protein product [Podospora anserina]
MDNPVAMLDEHDPPPRILERLKQIAGYSWDESKRPFHSSYDNWHFFGTRFVSLQTDTASTPTPTQPHLASPPPTGPSPSRTLSAGLLDIAPSPGTKAEHAGERANSSTASLGLSPASDQTVNIEEREIVARISYHPLREERAFQTAKNLIATADPDGEHNVKPLDLIRLTPQPGDRGPVVVAIYESLGPNYLFRTIDLGPAFYYAVKVGDRLEAHRRDDFKLDPPISLLYFLDFAIGAAQCLELLHHRHGMAHGEIRADAFHYNAETNQVKLISFGSGVRSFEHGLTSTGWSTLSRELGAKNKLVYISPEQTGRMPAEPDTRTDIYSLGVLFWMLLTQQPVFTGATPLDIVQCVLSRRIPIVSNIRNDVPESIGRIIQKCTSKNTSDRYNSVSGLRHDLQEIRRLLEIGDQEALRTWTMAAKDVSSYFMLPTVMIGRDREQLAVLKVVERVAKSHASTKHQGLTQLESLSLSSNSLATADVSSDRSSSIEGVVVHGNSFMPANNADVERIRGNNQSPDGADAQMISGDASSATSTSSPYRSSKPSDRHLSISTGNGNKNSLDSFSERQASRVASSEATSSNFSRQLGSAKYKRRGYSEIVTIEGAGGLGKSFLVQQVLADARKRGYCASAKFDTARRTAFGALLKLVASLFRQVWGERNADTTLHLALKDYAGPMWPSLHKILGLPEFLFGPPEQTLNRSLSTATSSSGGRFTPRLPVMRSNSSGSSPSFPRAKSPRIVAQSSEDYVRTGASTNTIRFLNTFLDILRIFTTHHVICLCLDDLQFADDESLDLITQVVSARLKMVLIVTYRPEELGPERLHKILHPVENEETPKEGRSRVTKIALSPLTESEIVQYIAFTLGMSTDEVAPLALIIQTKTAGNPFYMREMLSACYRRRCIWFDYRENRWMYDLDRLFVQFRSEHGYDVLDSDFITRRLNELPPASRWILSWAALLGNSFSFDLVCQLMSGEFGVVEDECDDAKDKQQPTVFSKQEAVAGLQAAVGASIIIQGETDDRFRFAHDRYVQAAACLNECSVRSMHFVVAQTLMDKFGQTLKAKDSTASHICESIDLIKKRIPDRYPYRKHLMDCAAGAVENGAKPTAVKYYRHAIQLLQPDPWTAGINDVYYDETLQLHLRAAECYVYMGNHEEARQFTDAILDNARSADDRATACLLHSRIQFQSGNAFSALGILKQSLQQLEVPFDAEPTFESCDEAFMQLCTKIQTIGRAQAINPSNVDQAKQMSAGVILGDAVQAAWWSSDLDFYNLSIALMNMHLREGPMPQSSMAFLYLATIAITRFNMIDFAVRLGSKFTELLERFKDPASFARGSMAFAAFVSHIQIPLCVTVSQCDQVICYAASAGDRASIILTYGLSVQLKFFASENVIDLESVCQYCCEEVPGWHQDTRGGAFLISVRQLCRSLQGKTRIKDETGVMSDDQHDSVSYKSWLLHTTNNGGRSALLYETMEIIPLYLYGHHEKACELGRRCMDKLDLIWSIRNTRVVMVFYGLALSGLLLRRLADPRTDISELQNEVQDTIMQVNQLNEKIKAWQVASNVNYLAWSKFLDAQVAELRGEHGTAIRQYEAALDHASEYNFTLEEALGNYLMAGFFIRQSARRSAMAVLKESVSLWRQFGALGIAHCIEEEHVLLLHGPTPSYRTAEAAVQTDFAGDSAAIPYATHGEDVHQISHPAFEETKATRMAAWRGSTQTEVGAGLPALDMIDLHAILVSSQVISSVLQIDVLLKTMCDVILQTCGGSVTQAAIIVQDDDDKDKSAWCIAASGDPERGATAHTPGRSLAGTSRVAENVVLYCTRFREVVFTSDVLSDERFSNVAVSWSQRNPQSKAIVAMPICHGSKPLLGVLYLEGQPGSFTDRIVTVLQLLVNQIGISYSNALAMKGLEKASRENDTMIEMQRRALTNAIEAEAKAKVAEAEANRNVKLAEEAAKAKNIFLANVSHELRTPLNGVIGNSELLRDSPLGKDQLEMADSIRVSADLLLTVINDILDFSKMEADKMKLYVIAFNPEEMVREVVRAVSYSNREKASKKNVKIVQDINLPSMLIYGDPTRLHQVLGNLIGNSLKFTEDGSITIGARVESETSEQATLTFWVQDTGVGIPSKQLAKLFKPFSQADASTARKYGGSGLGLSICKSLIETMMKGQIELDSQEDIGTTVWFTVAFDKATEEVSAGDVQDITTPPTPEQTRDAPQMSPQYSTKESVSNPKVDLTVVPKDQLRICIAEDNIINQKIAVQYVRKLGYKHVDAYDNGQKAIEGLRQKAQEGTPYHVILMDVQMPILDGYDATKLLRQDPIEEVRNILVIAMTASAIQGDREKCLAAGMNDYLAKPVKADILQRKLDTYTSRPANRPSHQAPSPPTVTAPEISVSSPPLVQLKKDMSPENTSRELPTIPRRTSSEAAKGSSKSPASTEASNVPQPQAAKRQPRRLVKSRQNSEGITSLSPSDKPKSVLTKRNLRPDIVPLGGEEPQSSEDRVSTKNDTPLTTPALSTTSTNSPPLFK

SEQ ID NO: 7097 - DNA, 8961 bp, Muscodor strobelii
  misc_feature: SGI EST ID NO. CUFF.17647.1
  misc_feature: Variant of the nucleotide sequence at SEQ ID NO 7095
cccgcttttcaggtaccgtagaaacaagacgcctgcccgcctgtattggtaattactgccttggtgtactgtactacctgaggtacataaggtacctacatctggatcacagcacgatttcacgtgttgagttaatctaaggctcacacctctgcaaacatgaaacggaaggccataacaatgttgtaatagctatcagtaagctcatcgaagagatttcaagcagagtcgcgcaatacaataggtagatatcattggaattcagaggtgtcaaaaaccacctacctctactacacgattcaagctggtggttctaaacctagtcgggttggtgtagagtcgcaccagaagctaaggctggtccatctcagactcagtctctccgtcaccactggcatcgacggcactggcacttgacgtgcctgaagcgtcgcaactgcctggtctgttgatgtgcgaagtcgcggttccctgctgtccatcgggacaagctatggcagactagccccaacgactccctgctgcacgacacaaaacaccatgaggatcgccgcgctgccgctcccgcacttgactaccacctcctccaccacttgacagcgccgtccgcagcgcgtgtctctcttcgttgcggcatcttggccggccgaggagcatcgcatcccatgcggcaccgcgcgacacgatggacaaccccgtggccatgctggacgagcatgatccacctccccgcatcctcgagcgcctgaaacagatcgccgggtattcgtgggacgagtctaagcggcccttccactccagctacgacaactggcatttcttcggcacgcgcttcgtctccctgcagactgacaccgcttccactcctacccctacacaaccgcatcttgctagtccgccgcctaccggccccagcccgagccggaccctctctgctgggctcctcgacatcgccccctcgcctggtaccaaagctgagcatgctggcgaacgagccaactcttcgactgccagcctgggcctctcgcctgctagtgaccagacagtgaacatcgaagagcgggaaatcgtcgcgcgcatctcgtaccatccactgcgcgaagagagagcttttcagacggcgaagaacctcattgccaccgcagacccggacggggagcataatgtcaagcccttggacctcatccgactgactccccagcccggcgatcgtggacctgttgtggtcgccatctacgagagcctcggccctaactacctatttcgcactatcgatctgggccctgccttctactatgccgtcaaagtgggagacaggctggaggcccatcgccgcgatgacttcaagctcgaccctccgatcagtttgctgtattttttagacttcgccatcggtgctgcgcagtgtctggagctcctacaccatcgccacggcatggcacatggtgagatcagagctgatgccttccattacaatgcggaaacaaatcaagtaaagctcatcagcttcggctccggcgtgcggtcattcgagcacggtctcaccagcactggttggtccacgctctccagagagctcggagccaagaacaagcttgtatacatcagtccagaacagacaggtcggatgcccgctgaaccagatacccggaccgatatctactcactgggcgtcttgttctggatgcttctcacacaacagcccgtcttcactggcgccacgcctcttgatatcgtgcaatgtgtgttgagtcgccggatccccatagtatccaatatccgtaacgatgtacccgagtccattggccgtatcattcagaaatgtacttccaaaaatacgtcagatcgatacaactctgtcagcgggctcagacatgacctgcaggagatacgaagattgctcgagataggtgaccaggaagctttgaggacgtggaccatggctgcaaaagatgtctcctcctacttcatgctacccaccgtcatgatcggccgcgatcgagaacaactagcagtgttgaaagtagtcgaacgagtggcgaaatctcatgcatcaacaaagcatcaaggcctaacccaactagaaagtctctctttgagctccaacagtctcgcgacagccgatgtctctagcgaccggtcgagctcgattgaaggagttgttgtacatggtaattcattcatgccagcaaacaatgctgacgtagagcgcattcgaggtaacaaccagtcacccgacggtgccgatgcgcagatgatctctggagatgcatcttcagccacatccacttcgtctccttatcgttcatcgaaaccgtccgatagacacctgtctatttctacaggcaacggtaacaaaaatagcctggacagttttagcgagcgtcaagcatcaagagttgcaagtagtgaggcgacttcgtcgaatttttcgagacagcttggctccgccaaatacaaacgcagaggatactccgaaattgtcacaatcgaaggcgctggagggctcggcaaaagtttcctggtccagcaagtcctcgccgatgcccggaaaaggggatattgtgcatccgcaaagttcgataccgccagacgtacggcatttggtgctttattgaaactggtggcttcactattcagacaagtctggggggagagaaatgcagacacaactctccacctcgcgctcaaggactatgctgggccgatgtggccaagcctccacaagatcctcggtttaccagaatttctttttggtccgccagaacagacccttaatagatctctgtctacagccacgagctcatcaggtggacgattcacaccacgacttcccgtgatgcggagcaactcttcaggaagctctccatccttcccccgggccaagagtcctcgtatagtagcgcagagctccgaggactatgtccgtacaggtgcatccacaaacacaatccgtttcctaaatacatttctggacatccttcggatcttcactacgcaccacgtcatttgcctatgtctcgacgatctacagtttgcagatgatgagtcgttagacttgattacccaggttgtttctgcgagactcaaaatggtcctcatcgtaacgtaccgacccgaagaattaggaccggagaggttgcacaaaattctgcacccagtagaaaacgaagagactcccaaagagggtcgttcccgggtcacaaaaatcgccctgtctcccttgacagaaagtgagatagtgcaatacatcgctttcacgcttggtatgtcgacagatgaggtcgctcctcttgcccttatcatacagaccaagactgccgggaatcctttttatatgagggagatgttgagtgcatgctaccgacgaagatgtatatggtttgactaccgtgaaaatcgctggatgtacgatttggaccgactttttgtgcaattcaggagcgaacatgggtacgacgttctggatagcgacttcatcacccgtcgactcaacgagttgcccccagcatcacgctggattctatcctgggcagcgctgctaggcaattccttctcctttgatctcgtctgccaactaatgagcggagagtttggtgttgttgaagatgaatgtgacgacgccaaagacaagcagcagcctacagtcttctcaaaacaagaagctgtcgcagggctacaagctgcagtaggcgcctctatcatcattcagggggaaacggacgaccgctttcggtttgctcatgatagatatgttcaagcagcagcggtaagctgtttaaatgagtgcagtgttcggagcatgcatttcgtcgtcgcccaaaccctcatggacaagttcggacagacccttaaggccaaggacagtaccgcctcccatatctgtgagtctattgacttgataaagaaacgaatcccggatcgatatccataccgtaaacatctcatggactgcgcggcaggggctgtcgagaacggtgccaagccaacagctgtcaagtactaccgccatgctatacagcttctacagccagatccgtggacagcaggaatcaatgatgtctattacgatgagacgcttcaattacatctccgagctgcagaatgctacgtctatatgggtaatcatgaggaagctcggcaatttaccgatgcaattcttgacaatgctagatccgctgacgacagggctaccgcatgcctactccattctcgaattcagtttcaaagcgggaacgctttttcagctctcggtattctgaagcagagcttacagcagcttgaggttccatttgacgccgagcccactttcgaatcatgcgatgaagctttcatgcagctttgtacaaagattcaaaccataggtcgtgctcaagccataaacccatccaatgtggatcaggccaaacaaatgagcgccggcgtgatcctcggtgacgctgttcaggctgcatggtggagcagtgatcttgatttctataatctatcaatcgccctgatgaatatgcacttacgtgaaggcccaatgcctcagtccagcatggcattcttatacctagcgacgatagcaatcacgcgattcaacatgattgacttcgctgtgagattaggcagtaagttcactgaactgctcgaaaggttcaaggaccctgcctctttcgctcgtgggtctatggcatttgcagccttcgtcagtcacatccaaattcccctttgcgtgaccgtaagtcagtgcgaccaggtcatatgttatgcggcaagtgctggcgatcgcgcgtccatcattctcacttacggtctctcggtgcaactcaaattttttgcgagcgagaatgttattgatcttgagtctgtttgtcaatactgctgcgaggaagttcccggctggcaccaggacactagaggtggcgctttcttaatctcggttcgacagctatgtcgatcgctacagggcaagacaagaattaaagatgaaacaggtgttatgtcagatgatcaacacgactctgtgtcttacaagagctggcttctacacaccaccaacaacggtggcagatcagctcttctctatgaaaccatggagataataccattgtacctctatggacaccatgagaaagcatgcgaactcggacggagatgtatggacaaacttgatttgatatggtccattcgcaacaccagggttgtaatggtgttttacggacttgcgctctcgggacttctcctccgaagattagccgatccgcgcactgatatctcagaactgcagaacgaagttcaagatacaatcatgcaagtaaatcaactgaacgagaagattaaagcttggcaagtcgcttcgaacgtcaattaccttgcttggtcgaagtttctcgatgcgcaagttgcggagctgcgcggtgaacatggtacggctattcgccaatatgaagctgccctcgaccatgcctctgagtacaactttacgctcgaggaggctcttggaaattatttaatggctgggtttttcatcagacaatcggcgaggaggtcggcgatggctgtcttgaaggagtcagtgtcactgtggagacaatttggagcactaggcatcgctcactgtatcgaggaagagcacgtactactactacatggtcccactcccagttatcggaccgccgaagcagcagtccagacagacttcgccggagactctgcagctatcccatatgctacgcacggtgaagacgtccatcagatatcacaccctgcctttgaagaaacgaaagcgacacggatggcagcttggcgggggtcgacccaaacagaagtgggtgctggtcttccagccctcgatatgattgatctacatgctatactggtctcgtcacaggtcatttcatccgtactgcaaatcgatgtcttgcttaagacaatgtgcgatgtcatcctccagacgtgtggtggatctgtcacgcaagctgcgatcattgtacaagacgatgacgacaaggacaaaagtgcctggtgtattgccgccagtggtgatcctgagagaggtgccacagctcacacgccagggcgatctctcgctggcacttctcgggtcgccgagaacgtcgtgctatattgtacccgattccgcgaggtagtcttcacctctgatgttctcagcgatgagaggttcagcaatgtcgcagtctcttggtcgcagcgcaacccgcaaagcaaggccatcgttgccatgccaatttgccacggctctaaacccctccttggtgtactttacctcgaagggcaacctggctcattcacagacaggattgtcacagtgctgcagctgctggtcaatcagattggaatatcctactccaatgcactggctatgaagggccttgagaaggcatctagagaaaacgacactatgattgagatgcaaagacgagcactaaccaacgctattgaagcagaggccaaagccaaggtagcggaagccgaagctaatcgcaatgtcaaactcgccgaagaggctgcaaaggccaaaaacattttcctcgcgaacgtatctcacgagctgcgcactcctctgaatggcgtcatcggaaattcagaactactcagagacagcccgcttggcaaagaccaactcgaaatggccgactcgatacgagtatcggctgatcttctgcttactgtaataaatgatattcttgatttttctaagatggaggccgacaagatgaagctctatgtcatcgcattcaatccagaagagatggtacgcgaagtcgtaagagccgtttcttacagtaatcgggagaaagcttccaagaagaacgtcaaaatcgttcaggatattaatctgccgtctatgctcatttatggtgatcccacccgcctacaccaggtccttggaaatctcatcggcaacagcttgaagttcacagaggacggatcaatcactattggtgctagagtcgagagcgagacaagtgaacaggccacgcttaccttttgggtacaagatactggtgttggcatcccttccaagcaattagcgaagctgttcaaaccattcagtcaagcagatgcaagtactgcgaggaagtatgggggcagtggtcttggcctcagtatctgcaagtctttgattgagacaatgatgaaaggacaaatcgaacttgacagccaggaagacattggcacgaccgtctggttcactgttgctttcgacaaagccacggaagaggtttcagccggagatgttcaagacatcacaacacctccaacgcccgaacaaacacgtgatgctccgcagatgagtccgcagtatagcaccaaggaatctgtatcgaatcctaaggtggatctgacagtggtgcctaaggatcagctgcggatctgcatcgcggaggataacattatcaaccaaaagattgccgtccagtacgtgcgcaaacttggctacaagcacgttgatgcctatgacaatggacagaaagctattgaagggcttcggcagaaggctcaagagggcacgccataccatgtcatacttatggacgtgcaaatgcctatactggatggttatgatgcaactaagctactacgccaagatccaatcgaggaagtcaggaacattctagtcattgcaatgacagcgtcggctattcaaggcgaccgggaaaaatgcttagctgcaggtatgaatgattacctcgctaagccggtgaaagcagatatcttacaacgcaaactggatacctacacatctagaccagccaatcgaccgtctcaccaggctcctagccctcccacggttactgctccggaaatctcggtcagctctcctcctcttgtacaactaaagaaggatatgtcaccagaaaacacatcacgtgagcttcctacgattccacggcgtacctccagcgaagctgccaagggatcgagcaaaagtccagcatcaacagaggcatccaatgtcccacagcctcaggcagcgaagcggcaacctagaaggctggtgaaaagccgccaaaacagcgaagggataacgtcgttgagtcccagcgacaagcctaaatctgtgctgactaagagaaacctgagaccggatattgtccctttgggtggcgaagagcctcagtcatctgaagatcgggtctcgacgaagaatgataccccccttactactccggctttatctactacatcgactaacagtcccccacttttcaaatagacctccgtgccacaatggcacaatgggggtacatttgaccttttttttcgttcacgtcgaacgttctcgacctatcagaaccctactctttctattcatggcgaagcattcatatttatcaggttcggtatagacaacaggtatacatacacggaagacttttgtttcggagccttgttttactatgattgctggagcgtgcatcacaagcacctaagacgcgtgagcattgtgcatttttggttgaacggctgggctatgggctatggcaaggttgggaaccagaaccaattggcggcattgataaagactgccaaccaactttcttcggtacggctgcatgggtgcatagacgaatgactggtcggtatacctacttctgcctgagcggtagactgaagaatgaggcgtctaggtctgaatacacgaggaacgcaaaaagggtgtgtatatatgaataaaagtaaaatgagataaagaaattgaaactacatcatatgataagaactgttgtggttgtatatgatgacgatatggcactgaaaattctaaaaggaattatcatcggacttgtttgaccatggtcaactcttcaatgaatagagcataacgactgacttttggcttgtagaacatgataaagtgagagagtggttcgcattcacatgtcagaagacgttgacatcttttgaagaactacttgttcaggttgcagtgaggccattttaacgtac

SEQ ID NO: 7098 - DNA, 1557 bp, Muscodor strobelii
  misc_feature: SGI cDNA ID NO. 562122
  misc_feature: Reduced expression when VOC is produced
  misc_feature: Encodes the peptide sequence at SEQ ID NO 7099
atggcatcagagaacgtagacgtccttgtcattggcatgggccccactggtctgggtgctgccaagcgacttcaacaattgaacggcccatcatggctgatcctcgactccggcgagaaggctggaggtttggcatcaactgatgtcacccctgaaggtttcctttacgatgtcggtggccacgtcatcttctcacactacaagtacttcgacgactgcatcaacgaggctctccccaaagaggacgactggtacacgcaccagcgtatctcatatgtccgctacaagagcctttgggttccctaccccttccaaaacaacatctccgtcctgcctaaggacgaccaggccatgtgtctggatggtgtaattgatgccgctctcgaagcccgcacttccactaccaagcccaagaacttcgacgagtggatcgtacggatgatgggagagggtattgccgacatcttcatgagaccctataactacaaggtctgggctgttcctccgatcaagatgcaatgtgcctggctcggtgagcgtgttgctgctcctgacgtcaagaccgtagtcaagaacactgttctcggtaaggttgctggaaactggggtcccaacgccactttccgcttccctgcccgtgatggaaccggtggtatctggatcgccgtcgccgaaactttgcccaaggagaagaagcgatttggcaagaagggtaccgttaccaaggtcgacgccgagaagaaaattgtcactcttgcagatggcagcacaatcggctacaataagctgatctccaccatgaatgttgaccaattagtcgagaccatgggcaacaaggagctcatctccctcagcaagggtctatactactcgtcaacccacgtcatcggtgtcggtatccgtggagagcgccctgaacgcattggtgataagtgctggctttactaccctgaggataactgtcccttttaccgtgccaccatcttctccaactactccccatacaaccagcctgccgctgacgtcaagctccccacgatcgctatcgctaatggcagcaagccatcaagcagcgagcctaaggagggaccttactggtctatcatgcttgaggtatcgcagtcttctatgaagcctgtcgacgaggcaaacatcctcaaggactgtattcagggtctcatcaacaccgacatgatcaagcccgaggatgagattgtttcgacctaccatcgcaagttcgaccatggttaccctactcctgctttggagcgtgagggtgtcctgaaggagctccttcccaagcttcaagacatggacatctggtcgcgtggccgcttcggcagctggcgatacgaagtcggtaaccaggatcactctttcatgctgggtgttgaggctgccgacaacattgttactggcgcagtggaattgaccctcaactaccctgactttgtcaataccagacaaaatgtcgaacgccgtctggaccagggtggcatcggagttgcctccaagaagattgccaaccacacaagagccccttccaaggccaagtag

SEQ ID NO: 7099 - protein, 518 aa, Muscodor strobelii
  misc_feature: SGI Peptide ID NO. 562122
  misc_feature (15)..(95): Pfam Id: PF01593 Pfam Desc: Flavin containing amine oxidoreductase
  misc_feature (3)..(500): NCBI GI: 145606056 Blast Desc: conserved [Magnaporthe grisea 70-15] gi|145013788|gb|EDJ98429.1| conserved [Magnaporthe grisea 70-15]
  misc_feature (1)..(513): NCBI GI: 171689428 Blast Desc: protein product [Podospora anserina] gi|170944676|emb|CAP70787.1| protein product [Podospora anserina]
  misc_feature (1)..(497): NCBI GI: 85080822 Blast Desc: NCU01824 [Neurospora crassa OR74A] gi|28881245|emb|CAD70483.1| conserved [Neurospora crassa] gi|28917679|gb|EAA27372.1| NCU01824 [Neurospora crassa OR74A]
  misc_feature (1)..(512): NCBI GI: 256732986 Blast Desc: [Nectria haematococca mpVI 77-13-4]
  misc_feature (1)..(513): NCBI GI: 46123239 Blast Desc: FG05997.1 [Gibberella zeae PH-1]
  misc_feature (5)..(506): NCBI GI: 119491144 Blast Desc: NFIA_064610 [Neosartorya fischeri NRRL 181] gi|119411354|gb|EAW21297.1| conserved [Neosartorya fischeri NRRL 181]
  misc_feature (5)..(506): NCBI GI: 67008316 Blast Desc: UDP-galactopyranose mutase [Aspergillus fumigatus] gi|238817000|gb|ACR56867.1| UDP-galactopyranose mutase [Aspergillus fumigatus]
  misc_feature (5)..(506): NCBI GI: 115391603 Blast Desc: ATEG_04128 [Aspergillus terreus NIH2624] gi|114194230|gb|EAU35930.1| ATEG_04128 [Aspergillus terreus NIH2624]
  misc_feature (5)..(499): NCBI GI: 261200735 Blast Desc: UDP-galactopyranose mutase [Ajellomyces dermatitidis SLH14081] gi|239593840|gb|EEQ76421.1| UDP-galactopyranose mutase [Ajellomyces dermatitidis SLH14081]
  misc_feature (5)..(506): NCBI GI: 238489765 Blast Desc: conserved [Aspergillus flavus NRRL3357] gi|220698508|gb|EED54848.1| conserved [Aspergillus flavus NRRL3357]
  misc_feature: Useful for introducing or modulating the production of volatile compounds
MASENVDVLVIGMGPTGLGAAKRLQQLNGPSWLILDSGEKAGGLASTDVTPEGFLYDVGGHVIFSHYKYFDDCINEALPKEDDWYTHQRISYVRYKSLWVPYPFQNNISVLPKDDQAMCLDGVIDAALEARTSTTKPKNFDEWIVRMMGEGIADIFMRPYNYKVWAVPPIKMQCAWLGERVAAPDVKTVVKNTVLGKVAGNWGPNATFRFPARDGTGGIWIAVAETLPKEKKRFGKKGTVTKVDAEKKIVTLADGSTIGYNKLISTMNVDQLVETMGNKELISLSKGLYYSSTHVIGVGIRGERPERIGDKCWLYYPEDNCPFYRATIFSNYSPYNQPAADVKLPTIAIANGSKPSSSEPKEGPYWSIMLEVSQSSMKPVDEANILKDCIQGLINTDMIKPEDEIVSTYHRKFDHGYPTPALEREGVLKELLPKLQDMDIWSRGRFGSWRYEVGNQDHSFMLGVEAADNIVTGAVELTLNYPDFVNTRQNVERRLDQGGIGVASKKIANHTRAPSKAK

SEQ ID NO: 7100 - DNA, 2375 bp, Muscodor strobelii
  misc_feature: SGI EST ID NO. CUFF.17634.0
  misc_feature: Variant of the nucleotide sequence at SEQ ID NO 7098
ctcccatacacacccccaaaaccaaaaaccccaagcccaaagcccctaataataagagctcctgctctctttttctgatgcacggtgaattcccaatgctctagaacttctcgttccctctcccattgtcatacacatcttcacatagacctcatactcaattcaccatggcatcagagaacgtagacgtccttgtcattggcatgggccccactggtctgggtgctgccaagcgacttcaacaattgaacggcccatcatggctgatcctcgactccggcgagaaggctggaggtttggcatcaactgatgtcacccctgaaggtttcctttacgatgtcggtggccacgtcatcttctcacactacaagtacttcgacgactgcatcaacgaggctctccccaaagaggacgactggtacacgcaccagcgtatctcatatgtccgctacaagagcctttgggttccctaccccttccaaaacaacatctccgtcctgcctaaggacgaccaggccatgtgtctggatggtgtaattgatgccgctctcgaagcccgcacttccactaccaagcccaagaacttcgacgagtggatcgtacggatgatgggagagggtattgccgacatcttcatgagaccctataactacaaggtctgggctgttcctccgatcaagatgcaatgtgcctggctcggtgagcgtgttgctgctcctgacgtcaagaccgtagtcaagaacactgttctcggtaaggttgctggaaactggggtcccaacgccactttccgcttccctgcccgtgatggaaccggtggtatctggatcgccgtcgccgaaactttgcccaaggagaagaagcgatttggcaagaagggtaccgttaccaaggtcgacgccgagaagaaaattgtcactcttgcagatggcagcacaatcggctacaataagctgatctccaccatgaatgttgaccaattagtcgagaccatgggcaacaaggagctcatctccctcagcaagggtctatactactcgtcaacccacgtcatcggtgtcggtatccgtggagagcgccctgaacgcattggtgataagtgctggctttactaccctgaggataactgtcccttttaccgtgccaccatcttctccaactactccccatacaaccagcctgccgctgacgtcaagctccccacgatcgctatcgctaatggcagcaagccatcaagcagcgagcctaaggagggaccttactggtctatcatgcttgaggtatcgcagtcttctatgaagcctgtcgacgaggcaaacatcctcaaggactgtattcagggtctcatcaacaccgacatgatcaagcccgaggatgagattgtttcgacctaccatcgcaagttcgaccatggttaccctactcctgctttggagcgtgagggtgtcctgaaggagctccttcccaagcttcaagacatggacatctggtcgcgtggccgcttcggcagctggcgatacgaagtcggtaaccaggatcactctttcatgctgggtgttgaggctgccgacaacattgttactggcgcagtggaattgaccctcaactaccctgactttgtcaataccagacaaaatgtcgaacgccgtctggaccagggtggcatcggagttgcctccaagaagattgccaaccacacaagagccccttccaaggccaagtagagaatttcagagatttggatgcatatggagagcatgagcgccgaagccattgatttggattgatgaattacaacgcaatggtggccttccgtggagtttaatgagatgtggttcccgagactatagggacaacgaatgttgatgcagtacaatgttatgtcagggtgttttcttggttgatgatatcttgcggtaatgaggcatgcgggaacatctggctgaccatcttgcatcggtagacaagatgataaaaaggattagacagacatagagtcaagactatacaatgagtacagtaaggtagatagtccaactgatcttctcacaaaaagagaggataaaccatgagctcaaccgagagtgtcaggccctttcatcgacgtgtaacgtgattacaccattgaactgcctccttatagaatcccgtggtctaaatctttataatgaaagggaccactcctaaaacacagggacggaccattaggtgttcgtcagattatctcttacatatcagtacaagtagcatacagacagcaaaagaatgaactctcaatcaaacctatatacattcatttttcttttccccttttccttttgttattgggttttcaattgcaaaaagtgcctgcacatgagtatgtgaaatcccca

SEQ ID NO: 7101 - DNA, 1197 bp, Muscodor strobelii
  misc_feature: SGI cDNA ID NO. 562123
  misc_feature: Encodes the peptide sequence at SEQ ID NO 7102
atggccgacgagaaggaacgtgtctcgggcgagagcccgcgtgaggctaagggccctctgctcccaacatcgactgctgatgccaccgaaaagccacaacctcctaagccggccctccatcctgcactctatgtcatctcttggatcagtatctcgtcctcggtcatcctgttcaacaaatggatcctagacaccctcgagttccgctatcctgtggtcttgaccacctaccatttgtcctttgcgaccgtcgctacgcagttgatggcccgctacaccacactccttgatggccgcaaatctgtcaagatgaccggtcgtgtctacctacgggccattgtccccatcggcttcttcttcagcttgagtctcatctgtggcaacttgacgtacttgtacctcagtgttgcctttatccagatgatcaaggccaccacccctgtcgctgtgcttttgtcgagctggaccatgggtatcgccccagtcaacctgaagcaactggccaatgtgtctgccatcgttgttggtgttgtcatcgcatcttttggagagatcaaattcgtctggattggtttcctctaccagctcggaggtgtcctgtttgaggccatccgcttgaaccttgtccaagctctgctcagctctgctgaatacaagatggatcctctggtctcactgtactactttgcccccatttgcgccgccatgaacggtgtcgttgcgcttatttgggaggtacctcatgtcactttggaccaagtttacaatgtgggcctgttcacgttcttcttgaacggtctctgcgccttcctactgaacgtctccgttgtcttcctgatcggcaagacctctgcggtgattatgactctctgtggtgttctcaaggatgtccttttggtgcttgcctccatggccatctggtccactcccatctccggtctgcaaaccttcggctattccattgctctggctggaatgatttactacaagcttggtgccactgcgatcaagggctacgccactgaagccggtagatattgggccgaatttggtgccgcccgtcctgccctccgcaaagtagtcatagtcggcggcattgtattgttcgtcttcatcctgtttggtggcctggccccagcttacaactacgacccacgcgactacatcagcaaaatacctggtgtgtctcaatcgtga

SEQ ID NO: 7102 - protein, 398 aa, Muscodor strobelii
  misc_feature: SGI Peptide ID NO. 562123
  misc_feature (191)..(331): Pfam Id: PF03151 Pfam Desc: Triose-phosphate Transporter family
  misc_feature (3)..(389): NCBI GI: 242784009 Blast Desc: DUF250 domain membrane protein [Talaromyces stipitatus ATCC 10500] gi|218720447|gb|EED19866.1| DUF250 domain membrane protein [Talaromyces stipitatus ATCC 10500]
  misc_feature (3)..(391): NCBI GI: 171689426 Blast Desc: protein product [Podospora anserina] gi|170944675|emb|CAP70786.1| protein product [Podospora anserina]
  misc_feature (2)..(384): NCBI GI: 67525311 Blast Desc: AN3113.2 [Aspergillus nidulans FGSC A4] gi|40744508|gb|EAA63684.1| AN3113.2 [Aspergillus nidulans FGSC A4] gi|259485937|tpe|CBF83383.1| TPA: DMT family organic anion
  misc_feature (3)..(391): NCBI GI: 116199513 Blast Desc: CHGG_07912 [Chaetomium globosum CBS 148.51] gi|88179191|gb|EAQ86659.1| CHGG_07912 [Chaetomium globosum CBS 148.51]
  misc_feature (4)..(394): NCBI GI: 238489763 Blast Desc: DUF250 domain membrane protein [Aspergillus flavus NRRL3357] gi|220698507|gb|EED54847.1| DUF250 domain membrane protein [Aspergillus flavus NRRL3357]
  misc_feature (3)..(389): NCBI GI: 212527534 Blast Desc: DUF250 domain membrane protein [Penicillium marneffei ATCC 18224] gi|212527536|ref|XP_002143925.1| DUF250 domain membrane protein [Penicillium marneffei ATCC 18224] DUF250 domain
  misc_feature (2)..(384): NCBI GI: 46123241 Blast Desc: FG05998.1 [Gibberella zeae PH-1]
  misc_feature (2)..(392): NCBI GI: 256732545 Blast Desc: [Nectria haematococca mpVI 77-13-4]
  misc_feature (1)..(390): NCBI GI: 156053734 Blast Desc: SS1G_05714 [Sclerotinia sclerotiorum 1980] gi|154703495|gb|EDO03234.1| SS1G_05714 [Sclerotinia sclerotiorum 1980]
  misc_feature (1)..(390): NCBI GI: 154303223 Blast Desc: BC1G_09360 [Botryotinia fuckeliana B05.10] gi|150854923|gb|EDN30115.1| BC1G_09360 [Botryotinia fuckeliana B05.10]
MADEKERVSGESPREAKGPLLPTSTADATEKPQPPKPALHPALYVISWISISSSVILFNKWILDTLEFRYPVVLTTYHLSFATVATQLMARYTTLLDGRKSVKMTGRVYLRAIVPIGFFFSLSLICGNLTYLYLSVAFIQMIKATTPVAVLLSSWTMGIAPVNLKQLANVSAIVVGVVIASFGEIKFVWIGFLYQLGGVLFEAIRLNLVQALLSSAEYKMDPLVSLYYFAPICAAMNGVVALIWEVPHVTLDQVYNVGLFTFFLNGLCAFLLNVSVVFLIGKTSAVIMTLCGVLKDVLLVLASMAIWSTPISGLQTFGYSIALAGMIYYKLGATAIKGYATEAGRYWAEFGAARPALRKVVIVGGIVLFVFILFGGLAPAYNYDPRDYISKIPGVSQS

SEQ ID NO: 7103 - DNA, 2268 bp, Muscodor strobelii
  misc_feature: SGI EST ID NO. CUFF.18022.0
  misc_feature: Variant of the nucleotide sequence at SEQ ID NO 7101
tggcaaggcaggcagcaatgttagcaggaggtatctgagcaagtgaatgccttaaagctgttcctcgagttgacaaccttcgttccacactcactaggtcgtaccgcttcccatctcggcccatcccatctgcacgcccgaagctgttcccgtcgtattctgcgccatcccggcgtcctcgcactgtattttcccgcacgcagatcgctgctacggcctactgtagtactcccgtcgtacagagctcaggctaagtgctaattagcggccacttgtgcagtgattcgcggcagttcgagtctaagtcgtcaaccaaacgcctgccaatcgcgcactgcctcccattgtgtcgtatcgtccaactttacgcaacaccgggccgcactcttcactcccactacccagaccactttgttccattaaccttcccccctacctggtctcgccttgtcattcattctttcaacgccacgagcttttgttcctctctttcttgctactccaatctcccaccacccttcgttaatcatcgtgatggccgacgagaaggaacgtgtctcgggcgagagcccgcgtgaggctaagggccctctgctcccaacatcgactgctgatgccaccgaaaagccacaacctcctaagccggccctccatcctgcactctatgtcatctcttggatcagtatctcgtcctcggtcatcctgttcaacaaatggatcctagacaccctcgagttccgctatcctgtggtcttgaccacctaccatttgtcctttgcgaccgtcgctacgcagttgatggcccgctacaccacactccttgatggccgcaaatctgtcaagatgaccggtcgtgtctacctacgggccattgtccccatcggcttcttcttcagcttgagtctcatctgtggcaacttgacgtacttgtacctcagtgttgcctttatccagatgatcaaggccaccacccctgtcgctgtgcttttgtcgagctggaccatgggtatcgccccagtcaacctgaagcaactggccaatgtgtctgccatcgttgttggtgttgtcatcgcatcttttggagagatcaaattcgtctggattggtttcctctaccagctcggaggtgtcctgtttgaggccatccgcttgaaccttgtccaagctctgctcagctctgctgaatacaagatggatcctctggtctcactgtactactttgcccccatttgcgccgccatgaacggtgtcgttgcgcttatttgggaggtacctcatgtcactttggaccaagtttacaatgtgggcctgttcacgttcttcttgaacggtctctgcgccttcctactgaacgtctccgttgtcttcctgatcggcaagacctctgcggtgattatgactctctgtggtgttctcaaggatgtccttttggtgcttgcctccatggccatctggtccactcccatctccggtctgcaaaccttcggctattccattgctctggctggaatgatttactacaagcttggtgccactgcgatcaagggctacgccactgaagccggtagatattgggccgaatttggtgccgcccgtcctgccctccgcaaagtagtcatagtcggcggcattgtattgttcgtcttcatcctgtttggtggcctggccccagcttacaactacgacccacgcgactacatcagcaaaatacctggtgtgtctcaatcgtgaagtcaggattgatacgacgatgacctacgatgcgcttacgacattacaaacgtctccagtcgcgagatgagaatatgatctccacaacaacaaaaagcatcgtttgcgcgcaaaatgactgtaccgaagttgtgtaatatacggacggattcactggatttggttttaggaagtcgctccgcctagggggaaatggagagcaactgtttccgatcaggctggccgtgttgtgtaccaatatagatggcgaatcacggagtcaagtgtacaaggggatcggttccaccgttgcatgcacggcaagaaggtagacgtatcgattctagattcaaggagaattttgttagacccaaatcatcagggcgtagaactattgatcaataatgacaggctagtcccttcctcaaaggtatgattacatcatcccctgggtttagtttggtcaaggatattatgtgtaatggctctcttcagcatctggtccactggtactgagtcagtgatcatcgaattgacttcacatgagtttgtatgaga

SEQ ID NO: 7104 - DNA, 468 bp, Muscodor strobelii
  misc_feature: SGI cDNA ID NO. 562124
  misc_feature: Reduced expression when VOC is produced
  misc_feature: Encodes the peptide sequence at SEQ ID NO 7105
atgaagttcctcaaggttggccgtgtcgccatcatcacccgcggccgctacgccggcaagaaggtacgtttgttgacattcttctgcgttgcattgagacacatcgaattggcggcgatcgagtcgtcatcatccagcccgtcgacagcggcaacaaggcacaccccttcgggccacgccctggtagccggcatcgagcgataccccgccaaggtcacacgccgcatgtccaagacgcgccaggagaagcgctccaagatcaagcctttcgtcaaggccatcaactacaaccacttaatgcccacccgatacacacttgagctcgagggtctcaagggagccctcactgcagagaccttcaaggaggtcagccagcgcgaggatgccaagaagaacgtcaagaaggtcctcgaggagcgctacacgagcggcaagaacagatggttcttcactcccctccgattttaa

SEQ ID NO: 7105 - protein, 155 aa, Muscodor strobelii
  misc_feature: SGI Peptide ID NO. 562124
  misc_feature (71)..(155): Pfam Id: PF01777 Pfam Desc: Ribosomal L27e protein family
  misc_feature (1)..(155): NCBI GI: 145606060 Blast Desc: ribosomal protein L27 [Magnaporthe grisea 70-15] gi|145013790|gb|EDJ98431.1| ribosomal protein L27 [Magnaporthe grisea 70-15]
  misc_feature (1)..(155): NCBI GI: 256732987 Blast Desc: [Nectria haematococca mpVI 77-13-4]
  misc_feature (1)..(155): NCBI GI: 171689420 Blast Desc: protein product [Podospora anserina] gi|170944672|emb|CAP70783.1| protein product [Podospora anserina]
  misc_feature (1)..(153): NCBI GI: 46123243 Blast Desc: FG05999.1 [Gibberella zeae PH-1]
  misc_feature (1)..(155): NCBI GI: 85080835 Blast Desc: 60S ribosomal protein L27 [Neurospora crassa OR74A] gi|28881243|emb|CAD70481.1| 60S large subunit ribosomal protein [Neurospora crassa] gi|28917682|gb|EAA27375.1| 60S ribosomal L27
  misc_feature (1)..(155): NCBI GI: 116199511 Blast Desc: conserved [Chaetomium globosum CBS 148.51] gi|88179190|gb|EAQ86658.1| conserved [Chaetomium globosum CBS 148.51]
  misc_feature (1)..(155): NCBI GI: 261354470 Blast Desc: 60S ribosomal protein L27-B [Verticillium albo-atrum VaMs.102]
  misc_feature (1)..(155): NCBI GI: 154313422 Blast Desc: 60S ribosomal protein L27 [Botryotinia fuckeliana B05.10] gi|156042904|ref|XP_001588009.1| SS1G_11251 [Sclerotinia sclerotiorum 1980] gi|150849477|gb|EDN24670.1| 60S ribosomal L27
  misc_feature (1)..(155): NCBI GI: 212526892 Blast Desc: 60S ribosomal protein L27e [Penicillium marneffei ATCC 18224] gi|210073001|gb|EEA27088.1| 60S ribosomal protein L27e [Penicillium marneffei ATCC 18224]
  misc_feature (1)..(155): NCBI GI: 145255413 Blast Desc: An18g05020 [Aspergillus niger] gi|134084547|emb|CAK43300.1| protein product [Aspergillus niger]
  misc_feature: Useful for introducing or modulating the production of volatile compounds
MKFLKVGRVAIITRGRYAGKKVRLLTFFCVALRHIELAAIESSSSSPSTAATRHTPSGHALVAGIERYPAKVTRRMSKTRQEKRSKIKPFVKAINYNHLMPTRYTLELEGLKGALTAETFKEVSQREDAKKNVKKVLEERYTSGKNRWFFTPLRF

SEQ ID NO: 7106 - DNA, 1063 bp, Muscodor strobelii
  misc_feature: SGI EST ID NO. CUFF.18026.0
  misc_feature: Variant of the nucleotide sequence at SEQ ID NO 7104
ctgccatcggactgggcacacaacaccacacagaaattcacccaccccacccaggcaaaatctcggcccagtaaacccaccaatttttgtacttgcagctgctgctcctaatcttcttcgattttgacgacgacaatactaaccaccaacacccaccccagcccgccaacatgaagttcctcaaggttggccgtgtcgccatcatcacccgcggccgctacgccggcaagaaggtcgtcatcatccagcccgtcgacagcggcaacaaggcacaccccttcgggccacgccctggtagccggcatcgagcgataccccgccaaggtcacacgccgcatgtccaagacgcgccaggagaagcgctccaagatcaagcctttcgtcaaggccatcaactacaaccacttaatgcccacccgatacacacttgagctcgagggtctcaagggagccctcactgcagagaccttcaaggaggtcagccagcgcgaggatgccaagaagaacgtcaagaaggtcctcgaggagcgctacacgagcggcaagaacagatggttcttcactcccctccgattttaaactacacactcacctcctctaacgtcatctgccttccgtgcgttcggtctggtctgtctgtttccggggtgaaggggcgaaaatgagcaattcgggaactgggaagaaagggttctggtcgcgttcgggtcggaaagcatgtacattcggcatgcaaatcatgagtcacatcaaactgcaaatgacaatgaaatttgcagtatagggcaaaataaagagaaaccattttcaaaaagtcttctcgctgcgggtcgtgttttctgtagaacacgccacctcgctctgtccctacttcacgctgtccgacgatgatgaaggtgaggaaacatagctcatccctaccggaacgaacgaacagcataggtgtcacggtagatatcctaaagcagtccaagagcgatctcacgagcccaatactagcttcagctacgctccttgtctccttcgatctacttgatacactcacctcctgcatgctttatat

SEQ ID NO: 7107 - DNA, 792 bp, Muscodor strobelii
  misc_feature: SGI cDNA ID NO. 562125
  misc_feature: Elevated expression when VOC is produced
  misc_feature: Encodes the peptide sequence at SEQ ID NO 7108
atggcccaatcgtcccttagccggcgagacttcaacgttctggagaagattaaagatccggaagccaatccctcggcggtggtgatcgttgactccgcattaccgaaagaccccaatatcacggacacgaccatatatgaacgagtcgctgaaaaagagagaaacatcatattatctatgcagcagctggaaatgcaactcgcaggcctaaaaccacgagcagaaaccgagccagccgtggactaccgggaatgcgtagagcaactcgggcagttgatttcggagaatcccacatatgccagtgctcgaaacaatagagctcaagctttgagaagactttatggtgatacaatgattttgccgggtagtagcgatcccagagcattgatacgagacgcaacgcaagacgagctatccagtgcagcggctaaaacgctctctgacctggacgaggcgattggattgttgactccaaggacacccttcgcccccatctcgccagtggccggaaagacattgtcgttggcccatacacagagagctgcactatattacatgaccgctaaacaattccggtcgggatcagtggtatccatcagtgggcgaaaggaagaggcatggactaagattgacttcgaaacagcggcgtcgcgggacttctccttgggaggaagatatggaaatgagatagccaaagggctagctgtgagcaccaatccaacagcaaagctgtgtggccagatagttaaagaggcgatgaagaaggagtatgggccggcttttgcttcgtaa

SEQ ID NO: 7108 - protein, 263 aa, Muscodor strobelii
  misc_feature: SGI Peptide ID NO. 562125
  misc_feature (1)..(263): NCBI GI: 164428214 Blast Desc: NCU01829 [Neurospora crassa OR74A] gi|28881242|emb|CAD70480.1| [Neurospora crassa] gi|157072057|gb|EAA27377.2| conserved [Neurospora crassa OR74A]
  misc_feature (1)..(262): NCBI GI: 116199509 Blast Desc: CHGG_07910 [Chaetomium globosum CBS 148.51] gi|88179189|gb|EAQ86657.1| CHGG_07910 [Chaetomium globosum CBS 148.51]
  misc_feature (1)..(262): NCBI GI: 256732988 Blast Desc: NECHADRAFT_99973 [Nectria haematococca mpVI 77-13-4]
  misc_feature (1)..(261): NCBI GI: 145606062 Blast Desc: MGG_06692 [Magnaporthe grisea 70-15] gi|145013791|gb|EDJ98432.1| MGG_06692 [Magnaporthe grisea 70-15]
  misc_feature (4)..(258): NCBI GI: 156050087 Blast Desc: SS1G_07629 [Sclerotinia sclerotiorum 1980] gi|154692031|gb|EDN91769.1| SS1G_07629 [Sclerotinia sclerotiorum 1980]
  misc_feature (1)..(262): NCBI GI: 46123245 Blast Desc: FG06000.1 [Gibberella zeae PH-1]
  misc_feature (1)..(262): NCBI GI: 171689422 Blast Desc: protein product [Podospora anserina] gi|170944673|emb|CAP70784.1| protein product [Podospora anserina]
  misc_feature (4)..(244): NCBI GI: 154317980 Blast Desc: BC1G_02973 [Botryotinia fuckeliana B05.10] gi|150843631|gb|EDN18824.1| BC1G_02973 [Botryotinia fuckeliana B05.10]
  misc_feature (1)..(148): NCBI GI: 261354472 Blast Desc: conserved [Verticillium albo-atrum VaMs.102]
  misc_feature (5)..(256): NCBI GI: 238487764 Blast Desc: conserved [Aspergillus flavus NRRL3357] gi|220699999|gb|EED56338.1| conserved [Aspergillus flavus NRRL3357]
  misc_feature: Useful for introducing or modulating the production of volatile compounds
MAQSSLSRRDFNVLEKIKDPEANPSAVVIVDSALPKDPNITDTTIYERVAEKERNIILSMQQLEMQLAGLKPRAETEPAVDYRECVEQLGQLISENPTYASARNNRAQALRRLYGDTMILPGSSDPRALIRDATQDELSSAAAKTLSDLDEAIGLLTPRTPFAPISPVAGKTLSLAHTQRAALYYMTAKQFRSGSVVSISGRKEEAWTKIDFETAASRDFSLGGRYGNEIAKGLAVSTNPTAKLCGQIVKEAMKKEYGPAFAS

SEQ ID NO: 7109 - DNA, 1266 bp, Muscodor strobelii
  misc_feature: SGI cDNA ID NO. 562126
  misc_feature: Elevated expression when VOC is produced
  misc_feature: Encodes the peptide sequence at SEQ ID NO 7110
atggctccttcagctattacagactctcctcctcgggagttctcgacgacactgccagcccacgcagacgattatgccgtgcaagccggtgttccagatttccacggatacgaccacgtcacttggtgggtgggcaatgcaaaacaagctgcttcatattacaacacgctatttggctttcggactgtggcatatcggggactagagacaggcagcagatatctcacatcatatgtcgtggccaaccatgatgtccgcttcgtcttcacatctccaactcgttcatatgcacacttaccttccgatgagccaatctcggaggaagattattctctcctaaaagaaatacacgaccatctcgagcggcatggtgacgctgtaaaagatgtcgcttttgaagtcgacgatgtaaaagcagtatatgaccgtgccatttccggagcagacggtgttggcatctccgtccagccccctcgtatgttccgtggtcagggcaaagagggtgaagtagagacagccgtcattcgcacatacggagacacaacccatacattgatatcacgacacaactacactggtccgtttctgccaggcttcgtagcaagaaatccccctccatcctcagtttcattaccatctatcgacctagtccgcatcgaccactgcgtaggcaatcaaggttggaacgagatggtcgctgcgtgtgatttctacgagcgctgcctctccttccatcgtttctggagcgtcgacgataagactatatgcacagagttctccgcattgaacagcatcgtcatgagcagtgccaacgccgttgtcaaaatgcccatcaacgagccggcaccaggcaagaagaagtctcagatcgaggaatacgtcattttcaattctggtgcaggagtgcagcacatcgcgctgctgacagatgacatcgtcgccactgtaaccgccatgcgtgcccgtggtgtagaattcatttccgttccttcaacatactacgagacaatgcgtcatcgcctcaagacagagaagagggattgggaactcggacaaaacttagaaacgctcgagagcctaagtatactgattgattacgatgagggtggatatctcctccagctattcaccaagccccttatggaccgccccactgtcttcgtcgagattatcgagagacatggcttcgagggctttggcgcgggtaacttcaagagtctgtttgaggctattgagcgggagcaggctgagaggggtaatttgtaa

SEQ ID NO: 7110 - protein, 421 aa, Muscodor strobelii
  misc_feature: SGI Peptide ID NO. 562126
  misc_feature (218)..(375): Pfam Id: PF00903 Pfam Desc: Glyoxalase/Bleomycin resistance protein/Dioxygenase superfamily
  misc_feature (1)..(421): NCBI GI: 85080847 Blast Desc: 4-hydroxyphenylpyruvate dioxygenase [Neurospora crassa OR74A] gi|74629496|sp|Q872T7.1|HPPD_NEUCR RecName: Full=4-hydroxyphenylpyruvate dioxygenase; Short=HPPDase; crassa]
  misc_feature (1)..(421): NCBI GI: 171689424 Blast Desc: protein product [Podospora anserina] gi|170944674|emb|CAP70785.1| protein product [Podospora anserina]
  misc_feature (1)..(421): NCBI GI: 46123247 Blast Desc: FG06001.1 [Gibberella zeae PH-1]
  misc_feature (1)..(421): NCBI GI: 39977613 Blast Desc: MGG_06691 [Magnaporthe grisea 70-15] gi|74630846|sp|Q96X22.1|HPPD_MAGGR RecName: Full=4-hydroxyphenylpyruvate dioxygenase; Short=HPPDase; grisea]
  misc_feature (1)..(421): NCBI GI: 116199507 Blast Desc: CHGG_07909 [Chaetomium globosum CBS 148.51] gi|88179188|gb|EAQ86656.1| CHGG_07909 [Chaetomium globosum CBS 148.51]
  misc_feature (1)..(421): NCBI GI: 156050089 Blast Desc: 4-hydroxyphenylpyruvate dioxygenase [Sclerotinia sclerotiorum 1980] gi|154692032|gb|EDN91770.1| 4-hydroxyphenylpyruvate dioxygenase [Sclerotinia sclerotiorum
  misc_feature (1)..(421): NCBI GI: 154317978 Blast Desc: BC1G_02972 [Botryotinia fuckeliana B05.10] gi|150843630|gb|EDN18823.1| BC1G_02972 [Botryotinia fuckeliana B05.10]
  misc_feature (1)..(421): NCBI GI: 255932355 Blast Desc: Pc12g09060 [Penicillium chrysogenum Wisconsin 54-1255] gi|211582353|emb|CAP80533.1| Pc12g09060 [Penicillium chrysogenum Wisconsin 54-1255]
  misc_feature (1)..(421): NCBI GI: 70989405 Blast Desc: 4-hydroxyphenylpyruvate dioxygenase [Aspergillus fumigatus Af293] gi|74669096|sp|Q4WHU1.1|HPPD1_ASPFU RecName: Full= 4-hydroxyphenylpyruvate dioxygenase 1; Short=HPPDase 1; 1;
  misc_feature (1)..(421): NCBI GI: 121710300 Blast Desc: 4-hydroxyphenylpyruvate dioxygenase, [Aspergillus clavatus NRRL 1] gi|119400916|gb|EAW11340.1| 4-hydroxyphenylpyruvate dioxygenase, [Aspergillus clavatus NRRL
  misc_feature (1)..(421): SWISSPROT Homolog: EC 1.13.11.27 4-hydroxyphenylpyruvate dioxygenase
  misc_feature: Useful for introducing or modulating the production of volatile compounds
MAPSAITDSPPREFSTTLPAHADDYAVQAGVPDFHGYDHVTWWVGNAKQAASYYNTLFGFRTVAYRGLETGSRYLTSYVVANHDVRFVFTSPTRSYAHLPSDEPISEEDYSLLKEIHDHLERHGDAVKDVAFEVDDVKAVYDRAISGADGVGISVQPPRMFRGQGKEGEVETAVIRTYGDTTHTLISRHNYTGPFLPGFVARNPPPSSVSLPSIDLVRIDHCVGNQGWNEMVAACDFYERCLSFHRFWSVDDKTICTEFSALNSIVMSSANAVVKMPINEPAPGKKKSQIEEYVIFNSGAGVQHIALLTDDIVATVTAMRARGVEFISVPSTYYETMRHRLKTEKRDWELGQNLETLESLSILIDYDEGGYLLQLFTKPLMDRPTVFVEIIERHGFEGFGAGNFKSLFEAIEREQAERGNL

SEQ ID NO: 7111 - DNA, 3691 bp, Muscodor strobelii
  misc_feature: SGI EST ID NO. CUFF.17636.0
  misc_feature: Variant of the nucleotide sequence at SEQ ID NO 7109
gtcgcgtttctgctcttagcttcgaattgagaagctgttcaaacaaacttccagcacgactatttgcaaatttgatcagtaccaacagatagtaatggctccgacaacttatataatctcacgggtcgcagaccctatcttcgccgtagctatcggcctaggagctgccactctgcgaattaaccgcgaagagaaagagaaaggcagaacatcccaacagtccatacagtcactgaagagtcgtttccttcattctaccggtctatcaaagagcaactagatttcttctagcctgtggacggctgcatccagtcaccatttctgaagccaaagatgtgccctctcaggagtgtggtcatggctaaggcccactaatctcaaaaaaaggacaagcccgttttattacgctccggacgagctctgcgcattacaggcaactagatggtgaaactgtattctattatgtccggatctgagtaatctaaaggtcagcggccaccgtttgccatgaggcgacattcactagggagatatcatttgccgccgatgatttgctctcccatccccgacgaccatgcttcctctctgatttctcacttgaaagaagctttacgaagcaaaagccggcccatactccttcttcatcgcctctttaactatctggccacacagctttgctgttggattggtgctcacagctagccctttggctatctcatttccatatcttcctcccaaggagaagtcccgcgacgccgctgtttcgaagtcaatcttagtccatgcctcttcctttcgcccactgatggataccactgatcccgaccggaattgtttagcggtcatgtaatatagtgcagctctctgtgtatgggccaacgacaatgtctttccggccactggcgagatgggggcgaagggtgtccttggagtcaacaatccaatcgcctcgtccaggtcagagagcgttttagccgctgcactggatagctcgtcttgcgttgcgtctcgtatcaatgctctgggatcgctactacccggcaaaatcattgtatcaccataaagtcttctcaaagcttgagctctattgtttcgagcactggcatatgtgggattctccgaaatcaactgcccgagttgctctacgcattcccggtagtccacggctggctcggtttctgctcgtggttttaggcctgcgagttgcatttccagctgctgcatagataatatgatgtttctctctttttcagcgactcgttcatatatggtcgtgtccgtgatattggggtctttcggtaatgcggagtcaacgatcaccaccgccgagggattggcttccggatctttaatcttctccagaacgttgaagtctcgccggctaagggacgattgggccatggctagttattcgacagaaggtgctattccacgaggatgttgatgatggaggcaaagtgctgtgggacgctgaaacggaccagttatatcgatcaccaaacaatagcacactgcagcgggagcagaagacggtagaatggtcaaaggcaattatgtgttttcttatcaacaaatacgcttccaaatcgtcgggatctggggcctgcttattgtatgagatacccctgcgtttgtcaccccacgttgatatcaatgattactgactagacggcagtctcggatcgattgaacaaatgacacacaatgcatttctccagttgtagccggactcgagaggcactgacattgacctcgaggccggaatggaatgtgggtggcgtcggaaatgctgcgcggcattgggcggctactttcggcccatcgaattctttgtcgctgattggcgccaaccttcgtccggatgtaccttgtctggtaattccaggagaagatgacaatggcgtacgcagttgcatgcaaggcgaaagctgttatccagacatagtgatacgtcacaaggcggtggttccctgttcaatacagtacatcgccggccgctgcccaaacgcggaattcaagccggactgttatgacctgtccatgacctccctcgttatccgccttccgggcatccattgcaaagcccgtttggccagtcagcagtgacttaagaattgattgtattctcatgctttcatttaaggctgtgattcagagagaaaatggcaatcatttgtctccaacgctctatgctcattgtctcattattttctacatagcggagattcaaagttaacatctagagcaacttgttcctagtaacttccaactgttactctcacctcccatattcgatcaaacaaactcataccctcagctatggctccttcagctattacagactctcctcctcgggagttctcgacgacactgccagcccacgcagacgattatgccgtgcaagccggtgttccagatttccacggatacgaccacgtcacttggtgggtgggcaatgcaaaacaagctgcttcatattacaacacgctatttggctttcggactgtggcatatcggggactagagacaggcagcagatatctcacatcatatgtcgtggccaaccatgatgtccgcttcgtcttcacatctccaactcgttcatatgcacacttaccttccgatgagccaatctcggaggaagattattctctcctaaaagaaatacacgaccatctcgagcggcatggtgacgctgtaaaagatgtcgcttttgaagtcgacgatgtaaaagcagtatatgaccgtgccatttccggagcagacggtgttggcatctccgtccagccccctcgtatgttccgtggtcagggcaaagagggtgaagtagagacagccgtcattcgcacatacggagacacaacccatacattgatatcacgacacaactacactggtccgtttctgccaggcttcgtagcaagaaatccccctccatcctcagtttcattaccatctatcgacctagtccgcatcgaccactgcgtaggcaatcaaggttggaacgagatggtcgctgcgtgtgatttctacgagcgctgcctctccttccatcgtttctggagcgtcgacgataagactatatgcacagagttctccgcattgaacagcatcgtcatgagcagtgccaacgccgttgtcaaaatgcccatcaacgagccggcaccaggcaagaagaagtctcagatcgaggaatacgtcattttcaattctggtgcaggagtgcagcacatcgcgctgctgacagatgacatcgtcgccactgtaaccgccatgcgtgcccgtggtgtagaattcatttccgttccttcaacatactacgagacaatgcgtcatcgcctcaagacagagaagagggattgggaactcggacaaaacttagaaacgctcgagagcctaagtatactgattgattacgatgagggtggatatctcctccagctattcaccaagccccttatggaccgccccactgtcttcgtcgagattatcgagagacatggcttcgagggctttggcgcgggtaacttcaagagtctgtttgaggctattgagcgggagcaggctgagaggggtaatttgtaattttagtctaatgaaaaagaatgttgcattttctagcgaatacacgttctctttacttcacattaaccgtttgggtcgcccacaaggtatatatcatatcaggtca

SEQ ID NO: 7112 - DNA, 474 bp, Muscodor strobelii
  misc_feature: SGI cDNA ID NO. 562127
  misc_feature: Encodes the peptide sequence at SEQ ID NO 7113
atgcctttcaccggccctggcacctatctcatcacggcctaccaggattctgggatgtgtctgaatgcctggggcgccacgaaaggctcgtctccaggccaggatgtcaagctttactccaaggccggcatggaagcaaacaacaaatgggtggtggctcaagtagagagcagtggagacaagggacccgtttatgtcatgattaacgagatcaacggaggctatctgtacgccacagcgaaaaacaccatcaccacaaaccaaaaagcactgcctactgatccctcggcgcgctggactttaaaggcgatacccaaggatacgaccaccgtctacacggtccaaaatgtctccatcccttccggacagctcaattgcaagggagcaggaacggcatcgggcacagaggtcattctgtgggacattaccgacaaagacaatgcagttttcaactttgacggggttactgcttaa

SEQ ID NO: 7113 - protein, 157 aa, Muscodor strobelii
  misc_feature: SGI Peptide ID NO. 562127
MPFTGPGTYLITAYQDSGMCLNAWGATKGSSPGQDVKLYSKAGMEANNKWVVAQVESSGDKGPVYVMINEINGGYLYATAKNTITTNQKALPTDPSARWTLKAIPKDTTTVYTVQNVSIPSGQLNCKGAGTASGTEVILWDITDKDNAVFNFDGVTA

SEQ ID NO: 7114 - DNA, 2241 bp, Muscodor strobelii
  misc_feature: SGI cDNA ID NO. 562128
  misc_feature: Reduced expression when VOC is produced
  misc_feature: Encodes the peptide sequence at SEQ ID NO 7115
atggctgcaaagcccgtcgcgaccgcctcgggcgcagacccgagcggtgatgccgcccgcagacgtaacgtgcccggctctgcggctcccgggcctgtcgtttcaagccccgagctcgacgagaaaaagatccacggcgccaagaagagcccttctgtcctccagatccttgacgaatgggagttcatcatcgcgcccttagtcctcacagctttcgccttcttcacccgcctgtacaagatcggcctgagtcccatcgtaacgtgggatgaagcccactttggcaaattcggatcccactatatcaagcgcgagctcttcttcgacgttcatcctcctctaggcaagattcttgttggtctctccggtgtgttggccggctacaatggatccttcgagttcaagtccggcgagacataccccgaggagcttgattacaccttcatgcgcgccttcaacgccttctggggcatcctttgtgtgcccctggcctactacaccgctcgagagctccagctgaagcgcccggctgtctggcttgtcgccctcatggtcttgtgcgaaaactcatacactaccatcagccgtttcatcctcctcgattctatgctcctgttcggcactgtggccaccgtgttctgctggtccaagttccatcgccaacagagatacagcttcgagcccgaatggttcttctggctcttcatgactggcctgagcattggtttcgtttgcagcatcaagctggtcggtcttttcgtgactgccatggttggtctttacaccgtcgaggatctgtggaataagtatggcaacaagaagatctcctacccggagctcgctgcccacgtcagtgctcgtgtggttggtctgattgtcatccccttcctgatctacttgctctcttttgccctccactttgctatcttgaccagaagtggccccggcgacgcgcagatgagctctctattccaggcaaacctcgaaggaagcgagattggccgaaactcccctctcgaggtcgctctcggctccaaggtcacgctcaagaacatgggctacggtggtggtctccttcacagtcacgttcagacttatcccgatggctcaaaccagcagcaaatcacctgctaccatcacaaggatgccaacaatgagtggtggttctaccctaatcgctctgagctggcttggactcccgactccgatgctgaaccacgcttcgttggtaatggcgacatcgtccgcttgatccacacgcagaccggacgtaaccttcacagccacgatatcgccgcccctgtcaccaagagccaaaaggaggtttcctgctatggcaatttgaccattggtgacgacaaggaccattggcaagtggaaattgttaaggatgtgtcttcacgtgacaagacaaagttgcgtacattgactaccgctttccgtctcaagaatgctgtcatgggctgctaccttcgagctgccaatgtcaatcttcctcagtggggtttcaagcagatcgaggtcacctgtgacaagaagaataaccccaaggacacattcacacattggaacgtggagaatcatgtcaacgagaagctccctcctggagacccgggcaagtacaagtcgcctttcttccatgacttcatccatctcaacgttgccatgatgacatccaacaacgccctggtcccggatcctgataagcaagacgatctcgcgtctcaatggtggcagtggcccatcttgaatgttggtctgcgcatgtgcggatgggatgacaagatcgtcaagtacttcctccttggtaaccccttcgtatattgggccacgactgcgtcactgggtctggtcggtcttgtgaccgtgtggcacattctcagatggcagcgaggattcagggacctcaagcagcacgacatcgatcagatccactacgccggcatataccctgttattgggtggttccttcactacttgccatttgttgtcatggctcgtgtgacttacgtacaccactattaccctgccctctacttcgccatcttatctctcgggtttctcctcgacttctcgctgggcagccttaagaagccgatacagtggggcatctatagtgtcctgtacgccgtcgtcattggcctctacgtctacttcatgcctctctgctggggcatgacggacagcaaccagcagtacaagtacatgaagtggttcgacacttggagaatctcggactag

SEQ ID NO: 7115 - protein, 746 aa, Muscodor strobelii
  misc_feature: SGI Peptide ID NO. 562128
  misc_feature (357)..(534): Pfam Id: PF02815 Pfam Desc: MIR domain
  misc_feature (67)..(311): Pfam Id: PF02366 Pfam Desc: Dolichyl-phosphate-mannose-protein mannosyltransferase
  misc_feature (1)..(746): NCBI GI: 256730572 Blast Desc: glycosyltransferase family 39 [Nectria haematococca mpVI 77-13-4]
  misc_feature (7)..(746): NCBI GI: 116204893 Blast Desc: CHGG_10330 [Chaetomium globosum CBS 148.51] gi|88176458|gb|EAQ83926.1| CHGG_10330 [Chaetomium globosum CBS 148.51]
  misc_feature (2)..(746): NCBI GI: 164428088 Blast Desc: dolichyl-phosphate-mannose-protein mannosyltransferase 2 [Neurospora crassa OR74A] gi|157072006|gb|EAA27034.2| dolichyl-phosphate-mannose-protein mannosyltransferase 2 crassa
  misc_feature (2)..(746): NCBI GI: 9368945 Blast Desc: dolichyl-phosphate-mannose--protein mannosyltransferase [Neurospora crassa]
  misc_feature (10)..(746): NCBI GI: 46109306 Blast Desc: FG01535.1 [Gibberella zeae PH-1]
  misc_feature (1)..(746): NCBI GI: 156050067 Blast Desc: SS1G_07619 [Sclerotinia sclerotiorum 1980] gi|154692021|gb|EDN91759.1| SS1G_07619 [Sclerotinia sclerotiorum 1980]
  misc_feature (1)..(746): NCBI GI: 145612533 Blast Desc: MGG_07190 [Magnaporthe grisea 70-15] gi|145019677|gb|EDK03905.1| MGG_07190 [Magnaporthe grisea 70-15]
  misc_feature (94)..(746): NCBI GI: 171689102 Blast Desc: protein product [Podospora anserina] gi|170944513|emb|CAP70624.1| protein product [Podospora anserina]
  misc_feature (4)..(746): NCBI GI: 189195184 Blast Desc: protein O-mannosyl-transferase 2 [Pyrenophora tritici-repentis Pt-1C-BFP] gi|187979809|gb|EDU46435.1| protein O-mannosyl-transferase 2 [Pyrenophora tritici-repentis Pt-1C-BFP]
  misc_feature (1)..(746): NCBI GI: 240110912 Blast Desc: Dolichyl-phosphate-mannose--protein mannosyltransferase 2, [Coccidioides posadasii C735 delta SOWgp]
  misc_feature (40)..(746): SWISSPROT Homolog: EC 2.4.1.109 Dolichyl-phosphate-mannose-protein mannosyltransferase
  misc_feature: Useful for introducing or modulating the production of volatile compounds
MAAKPVATASGADPSGDAARRRNVPGSAAPGPVVSSPELDEKKIHGAKKSPSVLQILDEWEFIIAPLVLTAFAFFTRLYKIGLSPIVTWDEAHFGKFGSHYIKRELFFDVHPPLGKILVGLSGVLAGYNGSFEFKSGETYPEELDYTFMRAFNAFWGILCVPLAYYTARELQLKRPAVWLVALMVLCENSYTTISRFILLDSMLLFGTVATVFCWSKFHRQQRYSFEPEWFFWLFMTGLSIGFVCSIKLVGLFVTAMVGLYTVEDLWNKYGNKKISYPELAAHVSARVVGLIVIPFLIYLLSFALHFAILTRSGPGDAQMSSLFQANLEGSEIGRNSPLEVALGSKVTLKNMGYGGGLLHSHVQTYPDGSNQQQITCYHHKDANNEWWFYPNRSELAWTPDSDAEPRFVGNGDIVRLIHTQTGRNLHSHDIAAPVTKSQKEVSCYGNLTIGDDKDHWQVEIVKDVSSRDKTKLRTLTTAFRLKNAVMGCYLRAANVNLPQWGFKQIEVTCDKKNNPKDTFTHWNVENHVNEKLPPGDPGKYKSPFFHDFIHLNVAMMTSNNALVPDPDKQDDLASQWWQWPILNVGLRMCGWDDKIVKYFLLGNPFVYWATTASLGLVGLVTVWHILRWQRGFRDLKQHDIDQIHYAGIYPVIGWFLHYLPFVVMARVTYVHHYYPALYFAILSLGFLLDFSLGSLKKPIQWGIYSVLYAVVIGLYVYFMPLCWGMTDSNQQYKYMKWFDTWRISD

SEQ ID NO: 7116 - DNA, 3430 bp, Muscodor strobelii
  misc_feature: SGI EST ID NO. CUFF.18497.1
  misc_feature: Variant of the nucleotide sequence at SEQ ID NO 7114
ccagcagcagcaacgcgcgctaggtcgtacagggtacgcctgaactgacacgagataatctcattgatgaattgtggccagactgcgtagacagatccattggacctcctcagctcagggtgtcctgagtcctgctgctcctattcaccaccatcatcactgctgtccgttgacacacattcaccccttcatcgcttccttccttcttcttcttttgcgggggagagagatgctctgatgcaccaccagagctcttgactcttgtttcattgaatttgaatctacttctgaccctcgttaatccacgtatactaactactattaccttgacttttcttcgggtcctcccgttttcattgccgattactttcctcgacttttccgcacgcacctcctaccgcgtcacacttctctctatagccgccggccccttgtcccttccgaatggctgcaaagcccgtcgcgaccgcctcgggcgcagacccgagcggtgatgccgcccgcagacgtaacgtgcccggctctgcggctcccgggcctgtcgtttcaagccccgagctcgacgagaaaaagatccacggcgccaagaagagcccttctgtcctccagatccttgacgaatgggagttcatcatcgcgcccttagtcctcacagctttcgccttcttcacccgcctgtacaagatcggcctgagtcccatcgtaacgtgggatgaagcccactttggcaaattcggatcccactatatcaagcgcgagctcttcttcgacgttcatcctcctctaggcaagattcttgttggtctctccggtgtgttggccggctacaatggatccttcgagttcaagtccggcgagacataccccgaggagcttgattacaccttcatgcgcgccttcaacgccttctggggcatcctttgtgtgcccctggcctactacaccgctcgagagctccagctgaagcgcccggctgtctggcttgtcgccctcatggtcttgtgcgaaaactcatacactaccatcagccgtttcatcctcctcgattctatgctcctgttcggcactgtggccaccgtgttctgctggtccaagttccatcgccaacagagatacagcttcgagcccgaatggttcttctggctcttcatgactggcctgagcattggtttcgtttgcagcatcaagctggtcggtcttttcgtgactgccatggttggtctttacaccgtcgaggatctgtggaataagtatggcaacaagaagatctcctacccggagctcgctgcccacgtcagtgctcgtgtggttggtctgattgtcatccccttcctgatctacttgctctcttttgccctccactttgctatcttgaccagaagtggccccggcgacgcgcagatgagctctctattccaggcaaacctcgaaggaagcgagattggccgaaactcccctctcgaggtcgctctcggctccaaggtcacgctcaagaacatgggctacggtggtggtctccttcacagtcacgttcagacttatcccgatggctcaaaccagcagcaaatcacctgctaccatcacaaggatgccaacaatgagtggtggttctaccctaatcgctctgagctggcttggactcccgactccgatgctgaaccacgcttcgttggtaatggcgacatcgtccgcttgatccacacgcagaccggacgtaaccttcacagccacgatatcgccgcccctgtcaccaagagccaaaaggaggtttcctgctatggcaatttgaccattggtgacgacaaggaccattggcaagtggaaattgttaaggatgtgtcttcacgtgacaagacaaagttgcgtacattgactaccgctttccgtctcaagaatgctgtcatgggctgctaccttcgagctgccaatgtcaatcttcctcagtggggtttcaagcagatcgaggtcacctgtgacaagaagaataaccccaaggacacattcacacattggaacgtggagaatcatgtcaacgagaagctccctcctggagacccgggcaagtacaagtcgcctttcttccatgacttcatccatctcaacgttgccatgatgacatccaacaacgccctggtcccggatcctgataagcaagacgatctcgcgtctcaatggtggcagtggcccatcttgaatgttggtctgcgcatgtgcggatgggatgacaagatcgtcaagtacttcctccttggtaaccccttcgtatattgggccacgactgcgtcactgggtctggtcggtcttgtgaccgtgtggcacattctcagatggcagcgaggattcagggacctcaagcagcacgacatcgatcagatccactacgccggcatataccctgttattgggtggttccttcactacttgccatttgttgtcatggctcgtgtgacttacgtacaccactattaccctgccctctacttcgccatcttatctctcgggtttctcctcgacttctcgctgggcagccttaagaagccgatacagtggggcatctatagtgtcctgtacgccgtcgtcattggcctctacgtctacttcatgcctctctgctggggcatgacggacagcaaccagcagtacaagtacatgaagtggttcgacacttggagaatctcggactagggacctcgatgtaacgttcggagatggagacgtgattcatgtacgattctctacgatacgaagacgatgtcttgtagacatcgtctcatctagcatttactggagtcgggtcgcgggtggacgacacgacttgggccgccgaatacgggcggcatgcggttcggcaaccgcaggcacttttagacggggtttcctttcctctcacatgtaataatgatcgatactacaaaatctgggggcatgaaaacaatggaacagaatctctctctcgtatcgtgtatcactaacatccatttggtcgcctgctatgtaacgaatgacggttaggtccctgcctggtgtttacgtcaaggttcttcggtaggcttgtataaggacagtagtagttctcgcattgtcttacgcacataactcgatactcgatacgtaccaggtagcttatgtcgaggatgtcgcagagagggggtgtgataaacataggtctctccgattggatagagtcacgctgttacttgaccgggagtgccagtatgtgaataactaactagagggcaaagaagggaagaatagaagactgtaataacggtaaagacagtgatcatcccctgatacaagtagctagatagtaccgtttcgatgttgaatgaaaaccgtattatctaagcctcttgacgatactggtacttcccctctgcctctcctgtctcactcgttgttacttcaacgagccatcatcaccttcggt

SEQ ID NO: 7117 - DNA, 2205 bp, Muscodor strobelii
  misc_feature: SGI cDNA ID NO. 562129
  misc_feature: Reduced expression when VOC is produced
  misc_feature: Encodes the peptide sequence at SEQ ID NO 7118
atggtcatcgggccagctcgacagctgattgtgtctaatccggagaacgcatcacgggcgctgctgcttgacagccccagcctcttcaaaattcctccctcacactccagccgtctgccctccaacatccccctccgcaccctagcctcacgccccgaccacggccaatcgacgtcattgctggacgaccacagacagcaacagcagcaccgtcgttccgacgacgacgacgacgctgactacgacgagtggactgacaccggcgacctcgccgagcagctggcggatgaggaggatcccctgcgcaagaccctcgccgacacctccatccacgacgacctcctcgcccggggcggcgtgaagaacaacaagcgtgtgcagttccggcgctctgtcgacgagcacagctatccgcactcccgatccaactccggcgtcatcgacaaggaggccatccagatcccagacgtccctccacgccgcatcggccccgctgaacgcctcatcgccgccatcatgccgggcacggggcttcacggctttacgggcaaggcccttgtatatttcacgagtatatttgtgtcattaggtgtatttctattcgggtatgatcagggtgtcatgtcaggtatcatcacaggtccatacttccgatcttatttccatgatccttccagagccgaggttggcactatggtcgccattctggagataggtgctctgatatcttcacttgctgttggcaagattggagatgtgatcggtcgccgaaagaccatcctctacggttctatcatctttttcgtcggtggagctctgcagacctgtgcaacgaacatgccgatgatgatgttgggcagaatcgttgccggtctaggtgttgggtcgctgtccaccatcgtgcccgtctatcaatctgagatctcgccgccacataatcgagggaagcttgcgtgcattgaattctcgggcaacatcatcggttacacaacatctgtctgggtagactatttctgtggctacatcgagagcgactattcctggcgtgtcccactccttatgcagtgtgttatgggagctttgctaggtttaggtagcttggtcattgtggaatcaccaagatggttgctcgacaacgatcatgacgaggaaggaattgtcgtcattgctaacctctacggcggcggcgatattcacaactccaaggcacgtgaagagtatcgtgagatcaagatgaacgttcttctccagcgaatggagggcgagcgatcatactctgaaatgttccgacgttacaagacccgagtcttcatcgctatgtctgctcaggctctggcccagctcaacggtatcaacgtcatctcgtactatgcaccctacgtcttcgagtcggccggctgggttggacatgacgctatcaagatgaccggcataaatggccttacgtatcttctatctacgattccaccttggtatatcgttgatcgttggggtcggcgcatcattcttctgacgggtgctatcgccatggctttatccctgtccgctgtgtcctattttatacatctagacataaaacagacgccgacgttggttgtgatctttgtaatgatctacaatgctgcgttcgggtactcgtggggccctatcccctggctgtacccaccagagattctcccgctcagcattcggtccaagggcgccagtttgtcgaccgcagccaattgggcgttcaactggctcgtgggagaaatgacacctattctacaggagtggatcgaatggcggctttatctcatccacgcattcttctgcgtggtcagcttcgttgttgtgtattttatttatcctgagacgtgtggtgtaagactagaagacatggactcattgttcggagacgctagtactgccatcggaactccaggcatgaggtccgagaccggctccttccgcgccggatctccagttccgtcgctggatctgcgaggacggccgcttgggcccgacagtagcatcccaccgctggacatcgatccgccgcacgtgaacatggtcgatggcaagccacgactgcgatcggagagtcgcaactcacgtggtcgggtgggcgagtggttgacccggatggtaggccagacacgaggttctagcagtagcccagccagcaacgccagatatgcgccaattgaccagcgagaagactga

SEQ ID NO: 7118 - protein, 734 aa, Muscodor strobelii
  misc_feature: SGI Peptide ID NO. 562129
  misc_feature (194)..(587): Pfam Id: PF07690 Pfam Desc: Major Facilitator Superfamily
  misc_feature (190)..(631): Pfam Id: PF00083 Pfam Desc: Sugar (and other) transporter
  misc_feature (9)..(734): NCBI GI: 156050065 Blast Desc: SS1G_07618 [Sclerotinia sclerotiorum 1980] gi|154692020|gb|EDN91758.1| SS1G_07618 [Sclerotinia sclerotiorum 1980]
  misc_feature (4)..(734): NCBI GI: 28881104 Blast Desc: related to sugar transport protein STP1 [Neurospora crassa]
  misc_feature (25)..(688): NCBI GI: 261354477 Blast Desc: sugar transporter STL1 [Verticillium albo-atrum VaMs.102]
  misc_feature (19)..(734): NCBI GI: 171689498 Blast Desc: protein product [Podospora anserina] gi|170944711|emb|CAP70822.1| protein product [Podospora anserina]
  misc_feature (36)..(734): NCBI GI: 189195186 Blast Desc: high affinity glucose transporter [Pyrenophora tritici-repentis Pt-1C-BFP] gi|187979810|gb|EDU46436.1| high affinity glucose transporter [Pyrenophora tritici-repentis
  misc_feature (43)..(734): NCBI GI: 169764102 Blast Desc: [Aspergillus oryzae RIB40] gi|83770979|dbj|BAE61112.1| protein product [Aspergillus oryzae]
  misc_feature (178)..(734): NCBI GI: 154317998 Blast Desc: BC1G_02982 [Botryotinia fuckeliana B05.10] gi|150843640|gb|EDN18833.1| BC1G_02982 [Botryotinia fuckeliana B05.10]
  misc_feature (32)..(734): NCBI GI: 119196353 Blast Desc: CIMG_02551 [Coccidioides immitis RS]
  misc_feature (19)..(734): NCBI GI: 238842801 Blast Desc: receptor [Microsporum canis CBS 113480]
  misc_feature (38)..(734): NCBI GI: 169596909 Blast Desc: SNOG_01228 [Phaeosphaeria nodorum SN15] gi|160707397|gb|EAT90877.2| SNOG_01228 [Phaeosphaeria nodorum SN15]
  misc_feature: Useful for introducing or modulating the production of volatile compounds
MVIGPARQLIVSNPENASRALLLDSPSLFKIPPSHSSRLPSNIPLRTLASRPDHGQSTSLLDDHRQQQQHRRSDDDDDADYDEWTDTGDLAEQLADEEDPLRKTLADTSIHDDLLARGGVKNNKRVQFRRSVDEHSYPHSRSNSGVIDKEAIQIPDVPPRRIGPAERLIAAIMPGTGLHGFTGKALVYFTSIFVSLGVFLFGYDQGVMSGIITGPYFRSYFHDPSRAEVGTMVAILEIGALISSLAVGKIGDVIGRRKTILYGSIIFFVGGALQTCATNMPMMMLGRIVAGLGVGSLSTIVPVYQSEISPPHNRGKLACIEFSGNIIGYTTSVWVDYFCGYIESDYSWRVPLLMQCVMGALLGLGSLVIVESPRWLLDNDHDEEGIVVIANLYGGGDIHNSKAREEYREIKMNVLLQRMEGERSYSEMFRRYKTRVFIAMSAQALAQLNGINVISYYAPYVFESAGWVGHDAIKMTGINGLTYLLSTIPPWYIVDRWGRRIILLTGAIAMALSLSAVSYFIHLDIKQTPTLVVIFVMIYNAAFGYSWGPIPWLYPPEILPLSIRSKGASLSTAANWAFNWLVGEMTPILQEWIEWRLYLIHAFFCVVSFVVVYFIYPETCGVRLEDMDSLFGDASTAIGTPGMRSETGSFRAGSPVPSLDLRGRPLGPDSSIPPLDIDPPHVNMVDGKPRLRSESRNSRGRVGEWLTRMVGQTRGSSSSPASNARYAPIDQRED

SEQ ID NO: 7119 - DNA, 3259 bp, Muscodor strobelii
  misc_feature: SGI EST ID NO. CUFF.17681.0
  misc_feature: Variant of the nucleotide sequence at SEQ ID NO 7117
gctgaaagtacttgacaggcacaggttaaggagtgaagtcctctacgccccgtctttaacactgtacgtacgcggtcggagagtgctggattcgacgctcataggagagattggagctgaggacaaggccgtgtgattttaggaggattagcaggtgagaataggggatgcacaggttgtggtagcagcgaagaatgttgccgtattgccatgttgcctttccttcgcagccagacagaggaagtcgaaaacctcagcatttgtaaatcttccatcattctcttctcaaactcgcgtgcatcgcattttcgtccccgtttctgcgtcgattatcattgtaaaaccactgcatccatgtaaaagataggccgtctcaccgtcgcattactcgctcgtttttctatctcggaccgctgtcgtttttagctgggctctacgtgtaaaagcagcctttatcgcctaaccacggtaccgtgcacttcaactcgacccggctgcaccacccgtcccactcgctgctgcaggtgccttggtgatggtcatcgggccagctcgacagctgattgtgtctaatccggagaacgcatcgtctctccaccctccctcccttcacctcttcttcgtatctccatatcttgcagacgggcgctgctgcttgacagccccagcctcttcaaaattcctccctcacactccagccgtctgccctccaacatccccctccgcaccctagcctcacgccccgaccacggccaatcgacgtcattgctggacgaccacagacagcaacagcagcaccgtcgttccgacgacgacgacgacgctgactacgacgagtggactgacaccggcgacctcgccgagcagctggcggatgaggaggatcccctgcgcaagaccctcgccgacacctccatccacgacgacctcctcgcccggggcggcgtgaagaacaacaagcgtgtgcagttccggcgctctgtcgacgagcacagctatccgcactcccgatccaactccggcgtcatcgacaaggaggccatccagatcccagacgtccctccacgccgcatcggccccgctgaacgcctcatcgccgccatcatgccgggcacggggcttcacggctttacgggcaaggcccttgtatatttcacgagtatatttgtgtcattaggtgtatttctattcgggtatgatcagggtgtcatgtcaggtatcatcacaggtccatacttccgatcttatttccatgatccttccagagccgaggttggcactatggtcgccattctggagataggtgctctgatatcttcacttgctgttggcaagattggagatgtgatcggtcgccgaaagaccatcctctacggttctatcatctttttcgtcggtggagctctgcagacctgtgcaacgaacatgccgatgatgatgttgggcagaatcgttgccggtctaggtgttgggtcgctgtccaccatcgtgcccgtctatcaatctgagatctcgccgccacataatcgagggaagcttgcgtgcattgaattctcgggcaacatcatcggttacacaacatctgtctgggtagactatttctgtggctacatcgagagcgactattcctggcgtgtcccactccttatgcagtgtgttatgggagctttgctaggtttaggtagcttggtcattgtggaatcaccaagatggttgctcgacaacgatcatgacgaggaaggaattgtcgtcattgctaacctctacggcggcggcgatattcacaactccaaggcacgtgaagagtatcgtgagatcaagatgaacgttcttctccagcgaatggagggcgagcgatcatactctgaaatgttccgacgttacaagacccgagtcttcatcgctatgtctgctcaggctctggcccagctcaacggtatcaacgtcatctcgtactatgcaccctacgtcttcgagtcggccggctgggttggacatgacgctatcaagatgaccggcataaatggccttacgtatcttctatctacgattccaccttggtatatcgttgatcgttggggtcggcgcatcattcttctgacgggtgctatcgccatggctttatccctgtccgctgtgtcctattttatacatctagacataaaacagacgccgacgttggttgtgatctttgtaatgatctacaatgctgcgttcgggtactcgtggggccctatcccctggctgtacccaccagagattctcccgctcagcattcggtccaagggcgccagtttgtcgaccgcagccaattgggcgttcaactggctcgtgggagaaatgacacctattctacaggagtggatcgaatggcggctttatctcatccacgcattcttctgcgtggtcagcttcgttgttgtgtattttatttatcctgagacgtgtggtgtaagactagaagacatggactcattgttcggagacgctagtactgccatcggaactccaggcatgaggtccgagaccggctccttccgcgccggatctccagttccgtcgctggatctgcgaggacggccgcttgggcccgacagtagcatcccaccgctggacatcgatccgccgcacgtgaacatggtcgatggcaagccacgactgcgatcggagagtcgcaactcacgtggtcgggtgggcgagtggttgacccggatggtaggccagacacgaggttctagcagtagcccagccagcaacgccagatatgcgccaattgaccagcgagaagactgagcggctcatagacgaggctgctagctcgaacacgacgagagacgatagatttttatatagacaggaaggccggagtttggtggccatggcgatctacgatatctgccgcgtcattaccatgttatgagtacattcagagactagagcgagcttggagacttggagaagaagacattgatcagttcattatatcataatcagcgccttcctgtttggaaatgggaagtagagcacggcagacacactgagccgaggacagcgtggttggaatacatgctcagactccagagtgcccggccgctaataagacaccaggtttctctatccatccaggcgttgacggttggctgtaaggcactactagactattatgaggagccaaatacactactactatcttagctattgatagacgattatcagtagcttgaactaagatactatctcaaggatacaaagagcggca

SEQ ID NO: 7120 - DNA, 888 bp, Muscodor strobelii
  misc_feature: SGI cDNA ID NO. 562130
  misc_feature: Encodes the peptide sequence at SEQ ID NO 7121
atggggagcactcaatttgggaatttcgagaacttttgcagagactcgactcttcccatttgcaatgtcctcacaaaaagccacaaccaaattggagactttggtggttgcaccttgaatggcattacattgaaaaatgaccagcacctggcaaacctgggttcaattatcctctgtggtattgcaatcgcagtctcggcactgttacttctgcgatctgaacaaaagagggccgccgttggtcggagggaaatgcagttgtttttggtcgggttcatcataattgaaattgccgagatcttcaccgttggcggattccctctcaacccaactgtgagagtcgcttttacaggcatacatctcggcgcaatcattgcgacaacatggatccttctcctgaacgctgtcgtgggttaccaggtccttgacgacggtacacctctctctttggggctcatgctcctctcggcgggtgccctcttcatcggcactggctatatcaccttggacaccggattcagttggactggcaagtttgatagcagcttggagctacctctgcaccgaaacatcgctctttacgttttataccaactggtgccgctcattttcctggttgccttcttcgtcctggaaggcatccttgtcctacgtgttcttggtgaagtgcgaccaatgctctacctcgctggtgctgccgttttgtttgcccttggtcagatcttcaactacgttgtcagcccatacatatgcaatggcacctcaggcaagattgatggagcactctttgagacgctattcacgctcctcgctgtggtaatggtctgggtattctggtcgagcatcactgaggatgactggcccagtgcgcagcctggatacccttag

SEQ ID NO: 7121 - protein, 295 aa, Muscodor strobelii
  misc_feature: SGI Peptide ID NO. 562130
  misc_feature (1)..(295): NCBI GI: 261354475 Blast Desc: chitin synthase export chaperone [Verticillium albo-atrum VaMs.102]
  misc_feature (1)..(288): NCBI GI: 154318000 Blast Desc: BC1G_02983 [Botryotinia fuckeliana B05.10] gi|150843641|gb|EDN18834.1| BC1G_02983 [Botryotinia fuckeliana B05.10]
  misc_feature (1)..(288): NCBI GI: 156050061 Blast Desc: SS1G_07616 [Sclerotinia sclerotiorum 1980] gi|154692018|gb|EDN91756.1| SS1G_07616 [Sclerotinia sclerotiorum 1980]
  misc_feature (1)..(288): NCBI GI: 256732990 Blast Desc: NECHADRAFT_59951 [Nectria haematococca mpVI 77-13-4]
  misc_feature (1)..(288): NCBI GI: 255948668 Blast Desc: Pc22g11540 [Penicillium chrysogenum Wisconsin 54-1255] gi|211592118|emb|CAP98442.1| Pc22g11540 [Penicillium chrysogenum Wisconsin 54-1255]
  misc_feature (1)..(294): NCBI GI: 259484604 Blast Desc: TPA: export control protein CHS7-like, (AFU_orthologue; AFUA_1G07110) [Aspergillus nidulans FGSC A4]
  misc_feature (6)..(288): NCBI GI: 39977609 Blast Desc: MGG_06689 [Magnaporthe grisea 70-15] gi|145013794|gb|EDJ98435.1| MGG_06689 [Magnaporthe grisea 70-15]
  misc_feature (1)..(294): NCBI GI: 212538129 Blast Desc: export control protein CHS7-like, [Penicillium marneffei ATCC 18224] gi|210068962|gb|EEA23053.1| export control protein CHS7-like, [Penicillium marneffei ATCC 18224]
  misc_feature (1)..(294): NCBI GI: 242807482 Blast Desc: export control protein CHS7-like, [Talaromyces stipitatus ATCC 10500] gi|218715590|gb|EED15012.1| export control protein CHS7-like, [Talaromyces stipitatus ATCC 10500]
  misc_feature (1)..(288): NCBI GI: 119496365 Blast Desc: export control protein CHS7-like, [Neosartorya fischeri NRRL 181] gi|119413118|gb|EAW23059.1| export control protein CHS7-like, [Neosartorya fischeri NRRL 181]
MGSTQFGNFENFCRDSTLPICNVLTKSHNQIGDFGGCTLNGITLKNDQHLANLGSIILCGIAIAVSALLLLRSEQKRAAVGRREMQLFLVGFIIIEIAEIFTVGGFPLNPTVRVAFTGIHLGAIIATTWILLLNAVVGYQVLDDGTPLSLGLMLLSAGALFIGTGYITLDTGFSWTGKFDSSLELPLHRNIALYVLYQLVPLIFLVAFFVLEGILVLRVLGEVRPMLYLAGAAVLFALGQIFNYVVSPYICNGTSGKIDGALFETLFTLLAVVMVWVFWSSITEDDWPSAQPGYP

SEQ ID NO: 7122 - DNA, 4672 bp, Muscodor strobelii
  misc_feature: SGI EST ID NO. CUFF.17719.0
  misc_feature: Variant of the nucleotide sequence at SEQ ID NO 7120
tttgccttgacttgatttcgactaaagtagatggggggatttgctagggcgtggtagctatttgctaggttctaaaatcacctggcaacgccctccatccttcgctgtctctccctttactcgcacacctccaacccagacttcttgccacgaaggctgcaacacgcgccaacatcaccacaaattcgtttcccgaccgagcaggacactcaatcgctctggagcgtcgacgttaaagttgaaggagctaggcggggaagaaagcgtgactttggtttaattggattggcgactctcgactgcgacatccttctttattcgcgaacaacaagcggcagccacgacccgattttctgtttgaatctcgacgcagctcaaacgaccgccggcgactcacatcccgctttcagccatccacacgagacattatttcgcacgaggcttgcattccagctgcacaccggcactcgcacccttaattgtaccgctagagaatagcgcatagaagacgtttagattggaaagtgacgtggtgactttggaggacaaatcgttcaattcgcctgtcgcatagactctcctcgaagctcgataccttgcgccgtaccatccgattgttcgacttcaattcacgcggttctgcttgaagcactctgtatcttgcaattgggcttgcgggtcgttgcccgcccacacggtacaatggggagcactcaatttgggaatttcgagaacttttgcagagactcgactcttcccatttgcaatgtcctcacaaaaagccacaaccaaattggagactttggtggttgcaccttgaatggcattacattgaaaaatgaccagcacctggcaaacctgggttcaattatcctctgtggtattgcaatcgcagtctcggcactgttacttctgcgatctgaacaaaagagggccgccgttggtcggagggaaatgcagttgtttttggtcgggttcatcataattgaaattgccgagatcttcaccgttggcggattccctctcaacccaactgtgagagtcgcttttacaggcatacatctcggcgcaatcattgcgacaacatggatccttctcctgaacgctgtcgtgggttaccaggtccttgacgacggtacacctctctctttggggctcatgctcctctcggcgggtgccctcttcatcggcactggctatatcaccttggacaccggattcagttggactggcaagtttgatagcagcttggagctacctctgcaccgaaacatcgctctttacgttttataccaactggtgccgctcattttcctggttgccttcttcgtcctggaaggcatccttgtcctacgtgttcttggtgaagtgcgaccaatgctctacctcgctggtgctgccgttttgtttgcccttggtcagatcttcaactacgttgtcagcccatacatatgcaatggcacctcaggcaagattgatggagcactctttgagacgctattcacgctcctcgctgtggtaatggtctgggtattctggtcgagcatcactgaggatgactggcccagtgcgcagcctggatacccttagtccttttgtccctcatttgaataacggcgttggggttctgtttagcggtataatacccgtttgttttcgattccggggcctacatgctcaacgagtaatgccgtctctggaaagcaagcacacacattcacacacttcgaaattctaatttttgcgcacacggaccttttgaccaacagaaacattttcagcagcggatgatcattcataacgcaatacgcaatatgatgcaacgacatgttgtgcatgccgagacaggcgaaatggactctcatttcccacaagacacgattgagttgtgtgcatgtgttggcctgctcgatggaaaacttgttcatgataaaaaaaaaagagtatacccaagaagcgcgcgactaatgtatatgatgtcgtaatgagatagaaatcagacaactgtcaaacaacacccggcatcttcgttgtgtccctgtctcgcctgtgtgataaaactcgcatgctttgtgcaaatgcatctgctacttaaactgctacttacattgccacttcatgtgtactccttctacacgtgttgccccgaaggaatcatgtgcagatgcacgcagcaagccaacaaaagcgaaaggaagccaatgcagcaaagggggcaaaatgagtctatatttaggattcgctacgtaatgcaagaaggtggtagcacggaaagacgggagagacgggaggaatgtcaaaggtggatgtgattggctgattgccctttaatatagtgcaatcaacaaggctagaatgtcgaatagagggacccatcggagctctgcagccttgccgtcttctttattcaataccgtcatccatttcgcttgatcgtcgcattttgtatattaccactgtcgacatatgtagctgtctagatcaggccgcagtagctactatcgagacttagatcttcgaggctgcttcctccaaaattttactctctacgttctagcatttgaaacctgacgctatcactctcctcccttccctattatcttgcaaagctacacatacccatgcatatacatacccggacgtagtgagtatcgcagcttccagctgtcgtaatctcaacccctctcttgccccgcctcttgccgcaccctccaccttttcacccacatcataggccgagatggcagactcggacggcgactaccaggcagacgatgcctccgatgacgagttcggccaccagggagcgagcggctctctcgatacgagatcgaagtcgaaaggcaataaaccaaagaaaggcggaaagcgcgcgtgggaggatatacagagatcttgggacgatgtggtcgagggcgccgacgggaccctcaagggcacgatcgaggggcttgtcgaggccgagaaacgagcccgcctcctcagagacaccacgccactgcagcgcggcatcatacggcatctcgtcctcgtcctcgacatgtcctttgcgatgatggagaaagatctgctgcccacccgacacgagcttagcatggcctacgccgccgagtttgtccgagagtacttcgagcagaaccccatctcccaactcgctgtgatcggcatgcgtgacggtgtcgcggtacggatcagcgacatgagcggcaacccagcagaccacctggagaagctgaagggttgggtcaagcaggagccacagggtaacccgagtctgcagaacgcgctggagatgtgtcgcggcgctctctatcacacccctactcatggcacgcgcgaagtcctgattgtctacggcgcactgatgtccagtgacccgggcgatatccacgacacactacactcgctagtcaaagatcggatacgcgtctcgatcgttggactcgcagcgcaagttgctatctgcgaagagctagtctccaagacaaatggcggtgatacgtcaggatacaatgtcgctttgcacgagcagaacttcagagatttacttctcgccatcaccacaccacctgttacgcggacgaaggagcagagtaacgcaagtttactgcagatgggctttcctcctctcaagctcacagaagcgggaaccacgcaattctgtgcgtgccaccatcgcgcaacgagagaaggctacgaatgtacgcgctgcggcacgcgagtctgtcgcttgccagctgaatgtccaggctgtggcctcaccctcatcttctccacacatttagcacgctcgtatcaccatctcttcccactgcgaaactgggtcgaggtgccatggactgaagcccgacgttctcggtcgtgttactcatgtttgacaccctttccggcttctgtcggtgaaaggtcagcggcaaagggcctgagtgagtccgggcgctacgcctgcgaggtctgcaggaatcacttctgtatcgactgcgacctctttgcgcatgaggtcctgcataattgccctggctgccagagcgatacccgcggtgcgccaccacatgagaatgggaacggagaggtgaacggaattgctatggaggtcgattcttgacacgaaatcctttctgatgggccatccgcgcaacgggtttcgattccaaatgggatggcgtacagaaacaacgagctcggaggcaatctcaccagaaaccggagcaacctgacttagcgggtacataatcgcatcacacagtaatatagacggaaaaagaagagagaagggctctcttcccatccatcatggcatggcatggcatggcactttgagtttcagaggcattgtcacttcggcgttcggcgtgggagaaggtctcccaatttagtggcttctttccagaaagttagtcaaaaaggatacatgaacaggcaaaggaatctggaaagcagatttgggttttgcatgaggaagagctatcttgcatctcttgtgctatagaccggaatgaataaatgacactaagatcattatataattccctgtcttttctgatatggccactactggtaatgtctgagcgaaaagtgaatatgatcctgtttgcagggcttcaagcaagtgattagaaatttcatatcataggaaggtttaacgcaagacgtgatgattggtatgttttgt

SEQ ID NO: 7123 - DNA, 945 bp, Muscodor strobelii
  misc_feature: SGI cDNA ID NO. 562131
  misc_feature: Encodes the peptide sequence at SEQ ID NO 7124
atggggagcactcaatttgggaatttcgagaacttttgcagagactcgactcttcccatttgcaatgtcctcacaaaaagccacaaccaaattggagactttggtggttgcaccttgaatggcattacattgaaaaatgaccagcacctggcaaacctgggttcaattatcctctgtggtattgcaatcgcagtctcggcactgttacttctgcgatctgaacaaaagagggccgccgttggtcggagggaaatgcagttgtttttggtcgggttcatcataattgaaattgccgagatcttcaccgttggcggattccctctcaacccaactgtgagagtcgtacgtgatacccagcagtatagagactatttcttccaaactaacacacttggacaggcttttacaggcatacatctcggcgcaatcattgcgacaacatggatccttctcctgaacgctgtcgtgggttaccaggtccttgacgacggtacacctctctctttggggctcatgctcctctcggcgggtgccctcttcatcggcactggctatatcaccttggacaccggattcagttggactggcaagtttgatagcagcttggagctacctctgcaccgaaacatcgctctttacgttttataccaactggtgccgctcattttcctggttgccttcttcgtcctggaaggcatccttgtcctacgtgttcttggtgaagtgcgaccaatgctctacctcgctggtgctgccgttttgtttgcccttggtcagatcttcaactacgttgtcagcccatacatatgcaatggcacctcaggcaagattgatggagcactctttgagacgctattcacgctcctcgctgtggtaatggtctgggtattctggtcgagcatcactgaggatgactggcccagtgcgcagcctggatacccttag

SEQ ID NO: 7124 - protein, 314 aa, Muscodor strobelii
  misc_feature: SGI Peptide ID NO. 562131
  misc_feature (1)..(307): NCBI GI: 261354475 Blast Desc: chitin synthase export chaperone [Verticillium albo-atrum VaMs.102]
  misc_feature (1)..(307): NCBI GI: 154318000 Blast Desc: BC1G_02983 [Botryotinia fuckeliana B05.10] gi|150843641|gb|EDN18834.1| BC1G_02983 [Botryotinia fuckeliana B05.10]
  misc_feature (1)..(307): NCBI GI: 156050061 Blast Desc: SS1G_07616 [Sclerotinia sclerotiorum 1980] gi|154692018|gb|EDN91756.1| SS1G_07616 [Sclerotinia sclerotiorum 1980]
  misc_feature (1)..(307): NCBI GI: 256732990 Blast Desc: NECHADRAFT_59951 [Nectria haematococca mpVI 77-13-4]
  misc_feature (1)..(307): NCBI GI: 255948668 Blast Desc: Pc22g11540 [Penicillium chrysogenum Wisconsin 54-1255] gi|211592118|emb|CAP98442.1| Pc22g11540 [Penicillium chrysogenum Wisconsin 54-1255]
  misc_feature (1)..(313): NCBI GI: 259484604 Blast Desc: TPA: export control protein CHS7-like, (AFU_orthologue; AFUA_1G07110) [Aspergillus nidulans FGSC A4]
  misc_feature (6)..(307): NCBI GI: 39977609 Blast Desc: MGG_06689 [Magnaporthe grisea 70-15] gi|145013794|gb|EDJ98435.1| MGG_06689 [Magnaporthe grisea 70-15]
  misc_feature (1)..(313): NCBI GI: 212538129 Blast Desc: export control protein CHS7-like, [Penicillium marneffei ATCC 18224] gi|210068962|gb|EEA23053.1| export control protein CHS7-like, [Penicillium marneffei ATCC 18224]
  misc_feature (1)..(313): NCBI GI: 242807482 Blast Desc: export control protein CHS7-like, [Talaromyces stipitatus ATCC 10500] gi|218715590|gb|EED15012.1| export control protein CHS7-like, [Talaromyces stipitatus ATCC 10500]
  misc_feature (1)..(307): NCBI GI: 119496365 Blast Desc: export control protein CHS7-like, [Neosartorya fischeri NRRL 181] gi|119413118|gb|EAW23059.1| export control protein CHS7-like, [Neosartorya fischeri NRRL 181]
MGSTQFGNFENFCRDSTLPICNVLTKSHNQIGDFGGCTLNGITLKNDQHLANLGSIILCGIAIAVSALLLLRSEQKRAAVGRREMQLFLVGFIIIEIAEIFTVGGFPLNPTVRVVRDTQQYRDYFFQTNTLGQAFTGIHLGAIIATTWILLLNAVVGYQVLDDGTPLSLGLMLLSAGALFIGTGYITLDTGFSWTGKFDSSLELPLHRNIALYVLYQLVPLIFLVAFFVLEGILVLRVLGEVRPMLYLAGAAVLFALGQIFNYVVSPYICNGTSGKIDGALFETLFTLLAVVMVWVFWSSITEDDWPSAQPGYP

SEQ ID NO: 7125 - DNA, 4672 bp, Muscodor strobelii; identical to SEQ ID NO: 7122
  misc_feature: SGI EST ID NO. CUFF.17719.0
  misc_feature: Variant of the nucleotide sequence at SEQ ID NO 7123

SEQ ID NO: 7126 - DNA, 1365 bp, Muscodor strobelii
  misc_feature: SGI cDNA ID NO. 562132
  misc_feature: Encodes the peptide sequence at SEQ ID NO 7127
atggcagactcggacggcgactaccaggcagacgatgcctccgatgacgagttcggccaccagggagcgagcggctctctcgatacgagatcgaagtcgaaaggcaataaaccaaagaaaggcggaaagcgcgcgtgggaggatatacagagatcttgggacgatgtggtcgagggcgccgacgggaccctcaagggcacgatcgaggggcttgtcgaggccgagaaacgagcccgcctcctcagagacaccacgccactgcagcgcggcatcatacggcatctcgtcctcgtcctcgacatgtcctttgcgatgatggagaaagatctgctgcccacccgacacgagcttagcatggcctacgccgccgagtttgtccgagagtacttcgagcagaaccccatctcccaactcgctgtgatcggcatgcgtgacggtgtcgcggtacggatcagcgacatgagcggcaacccagcagaccacctggagaagctgaagggttgggtcaagcaggagccacagggtaacccgagtctgcagaacgcgctggagatgtgtcgcggcgctctctatcacacccctactcatggcacgcgcgaagtcctgattgtctacggcgcactgatgtccagtgacccgggcgatatccacgacacactacactcgctagtcaaagatcggatacgcgtctcgatcgttggactcgcagcgcaagttgctatctgcgaagagctagtctccaagacaaatggcggtgatacgtcaggatacaatgtcgctttgcacgagcagaacttcagagatttacttctcgccatcaccacaccacctgttacgcggacgaaggagcagagtaacgcaagtttactgcagatgggctttcctcctctcaagctcacagaagcgggaaccacgcaattctgtgcgtgccaccatcgcgcaacgagagaaggctacgaatgtacgcgctgcggcacgcgagtctgtcgcttgccagctgaatgtccaggctgtggcctcaccctcatcttctccacacatttagcacgctcgtatcaccatctcttcccactgcgaaactgggtcgaggtgccatggactgaagcccgacgttctcggtcgtgttactcatgtttgacaccctttccggcttctgtcggtgaaaggtcagcggcaaagggcctgagtgagtccgggcgctacgcctgcgaggtctgcaggaatcacttctgtatcgactgcgacctctttgcgcatgaggtcctgcataattgccctggctgccagagcgatacccgcggtgcgccaccacatgagaatgggaacggagaggtgaacggaattgctatggaggtcgattcttga

SEQ ID NO: 7127 - protein, 454 aa, Muscodor strobelii
  misc_feature: SGI Peptide ID NO. 562132
  misc_feature (374)..(430): Pfam Id: PF07975 Pfam Desc: TFIIH C1-like domain
  misc_feature (42)..(295): Pfam Id: PF04056 Pfam Desc: Ssl1-like
  misc_feature (1)..(434): NCBI GI: 156050059 Blast Desc: SS1G_07615 [Sclerotinia sclerotiorum 1980] gi|154692017|gb|EDN91755.1| SS1G_07615 [Sclerotinia sclerotiorum 1980]
  misc_feature (1)..(447): NCBI GI: 256732989 Blast Desc: [Nectria haematococca mpVI 77-13-4]
  misc_feature (1)..(453): NCBI GI: 46123249 Blast Desc: FG06002.1 [Gibberella zeae PH-1]
  misc_feature (1)..(447): NCBI GI: 39977611 Blast Desc: MGG_06690 [Magnaporthe grisea 70-15] gi|145013793|gb|EDJ98434.1| MGG_06690 [Magnaporthe grisea 70-15]
  misc_feature (1)..(454): NCBI GI: 171689514 Blast Desc: protein product [Podospora anserina] gi|170944719|emb|CAP70830.1| protein product [Podospora anserina]
  misc_feature (1)..(430): NCBI GI: 121717593 Blast Desc: transcription factor and DNA repair complex, core TFIIH, [Aspergillus clavatus NRRL 1] gi|119404294|gb|EAW14670.1| transcription factor and DNA repair complex, core TFIIH, clavatus
  misc_feature (1)..(430): NCBI GI: 145242846 Blast Desc: An09g06810 [Aspergillus niger] gi|134078553|emb|CAK40474.1| protein product [Aspergillus niger]
  misc_feature (1)..(438): NCBI GI: 212537907 Blast Desc: RNA polymerase TFIIH complex subunit Ssl1, [Penicillium marneffei ATCC 18224] gi|210068851|gb|EEA22942.1| RNA polymerase TFIIH complex subunit Ssl1, [Penicillium marneffei
  misc_feature (48)..(430): NCBI GI: 240109332 Blast Desc: TFIIH basal transcription factor complex p47 subunit , [Coccidioides posadasii C735 delta SOWgp]
  misc_feature (1)..(430): NCBI GI: 169776637 Blast Desc: [Aspergillus oryzae RIB40] gi|83771520|dbj|BAE61652.1| protein product [Aspergillus oryzae]
MADSDGDYQADDASDDEFGHQGASGSLDTRSKSKGNKPKKGGKRAWEDIQRSWDDVVEGADGTLKGTIEGLVEAEKRARLLRDTTPLQRGIIRHLVLVLDMSFAMMEKDLLPTRHELSMAYAAEFVREYFEQNPISQLAVIGMRDGVAVRISDMSGNPADHLEKLKGWVKQEPQGNPSLQNALEMCRGALYHTPTHGTREVLIVYGALMSSDPGDIHDTLHSLVKDRIRVSIVGLAAQVAICEELVSKTNGGDTSGYNVALHEQNFRDLLLAITTPPVTRTKEQSNASLLQMGFPPLKLTEAGTTQFCACHHRATREGYECTRCGTRVCRLPAECPGCGLTLIFSTHLARSYHHLFPLRNWVEVPWTEARRSRSCYSCLTPFPASVGERSAAKGLSESGRYACEVCRNHFCIDCDLFAHEVLHNCPGCQSDTRGAPPHENGNGEVNGIAMEVDS

SEQ ID NO: 7128 - DNA, 4672 bp, Muscodor strobelii; identical to SEQ ID NO: 7122
  misc_feature: SGI EST ID NO. CUFF.17719.0
  misc_feature: Variant of the nucleotide sequence at SEQ ID NO 7126

SEQ ID NO: 7129 - DNA, 675 bp, Muscodor strobelii
  misc_feature: SGI cDNA ID NO. 562133
  misc_feature: Encodes the peptide sequence at SEQ ID NO 7130
atgtctggtcttgaggtgctgggtgcttttgcttccacagcccagcttgtgggatacgtgctcacagtatcgttaaagctcaaagatattcgcaccaaaattcgagatgcgcccgaaagacttgatcagttcgatcgccaggccaaggagctcatttccatcgtgcatgatgttaggactacagtggcaaatgtcggtctactcataaactatcaaagtatccacgagcaaaaagagttgaaggatctcatcctgcaatattcgggagtagccacactctctgcacaggctacaccgctagcttatcctactccgtgcgcaacggagaatatcgatgccatgtctggtctcgtacagcggcaggcgggatcacattctttcgaagcattgactctcaggggtaacatcaatgtatccctaggaaatgcatcttctgctcctgatactatgcacttcatgaccggacattcattcataggcctaagagcaaccgagaattcattaatacacatgggcaatgtgggcggtaactcagaaggccacttgtttcattcgggaacaattgagaaaaatgaggcggttttgatcggcgattttcctgatttcaaccagaagaatttggccgttcgaccatatcgggctgaaatcactagacaacgtgatcatgaatgctga

SEQ ID NO: 7130 - protein, 224 aa, Muscodor strobelii
  misc_feature: SGI Peptide ID NO. 562133
MSGLEVLGAFASTAQLVGYVLTVSLKLKDIRTKIRDAPERLDQFDRQAKELISIVHDVRTTVANVGLLINYQSIHEQKELKDLILQYSGVATLSAQATPLAYPTPCATENIDAMSGLVQRQAGSHSFEALTLRGNINVSLGNASSAPDTMHFMTGHSFIGLRATENSLIHMGNVGGNSEGHLFHSGTIEKNEAVLIGDFPDFNQKNLAVRPYRAEITRQRDHEC

SEQ ID NO: 7131 - DNA, 1443 bp, Muscodor strobelii
  misc_feature: SGI EST ID NO. CUFF.17661.0
  misc_feature: Variant of the nucleotide sequence at SEQ ID NO 7129
ctgacatgggtccaatttggagctgtgtccaacgcctccaatacgtggacaagtaaccttcaaattcagcggatcgtttatttaattggccgccaatgttgtactggatatacttgcttcgccaggacgttgtacattgcgatcaatgatgcgaaagtgtcactacgaattataaaatggcgaatgcagtctcatgaggacacggtcaagccttaagattaggatatagctaaactcgagacctcccggaaccaaaactactcttgcaatgtctggtcttgaggtgctgggtgcttttgcttccacagcccagcttgtgggatacgtgctcacagtatcgttaaagctcaaagatattcgcaccaaaattcgagatgcgcccgaaagacttgatcagttcgatcgccaggccaaggagctcatttccatcgtgcaaaaaagcacttacgcgtctgggagagttatctaccagtcggcgtcgctattggtccatcggtaccagtaatttatggaaaaagctcgacgattgttttagtgatgttaggactacagtggcaaatgtcggtctactcataaactatcaaagtatccacgagcaaaaagagttgaaggatctcatcctgcaatattcgggagtagccacactctctgcacaggctacaccgctagcttatcctactccgtgcgcaacggagaatatcgatgccatgtctggtctcgtacagcggcaggcgggatcacattctttcgaagcattgactctcaggggtaacatcaatgtatccctaggaaatgcatcttctgctcctgatactatgcacttcatgaccggacattcattcataggcctaagagcaaccgagaattcattaatacacatgggcaatgtgggcggtaactcagaaggccacttgtttcattcgggaacaattgagaaaaatgaggcggttttgatcggcgattttcctgatttcaaccagaagaatttggccgttcgaccatatcgggctgaaatcactagacaacgtgatcatgaatgctgaggtagcagtgaaccatataaattgtaaatatcaggctactggtttagccaagcaattatcggaattgatgaggctctgctactagtacgatatttagattgtgatgtatcattagagagaaacatgcacaggcgactgttcattttacctaattcagtctacaggatgaacaagttaatgtagttcgattgtttctaggagagtcaacaaataatttggatttggctacaatgtttaaatggttattttgctctttacgtgagatacctatgtgagaagggcaatattgacaccctgatacctgcctgaagagccaagcccatggctcggtcagcgaagtggaatgtgccaactgtctctgcagtattactcgcttaaaaaggggtcgggcatacatgaa

SEQ ID NO: 7132 - DNA, 813 bp, Muscodor strobelii
  misc_feature: SGI cDNA ID NO. 562134
  misc_feature: Reduced expression when VOC is produced
  misc_feature: Encodes the peptide sequence at SEQ ID NO 7133
atgtcctctcccccgtggagctacatagccaagcttgtctgtataggagactcaggctgtggaaagtcgtcactcaccatccgcctttgcgaaggccgcttcagccctcaacatgatgtcaccatcggcgtcgaattcggctcgcgcatagtgcccgtagggcccccgtattccaaaacaaatcccaacgctatagcatcggccgacgaaaccgcttcgacagcttccacactagtgaaccccccgagcacttcagctaccgatggcaagaaaggagccgacgaggatgaacaaaagcacatgaagctttcgttatgggataccgcaggccaagaaatctacaaatccgtaacgcggagttacttccgtggtgcctccggcgcgctgctcgtcttcgacatcacgcggcgcgcaacgtttgtacatgcgactgactggctgaatgatctacgcgctatcgccgagccggacatcgtcgtgatactcgttggcaacaagctggactgcgtgcaatccgaatccggcgacgccgataagagcgacaagcgcgaggtgacgtatgccgaggcagcagaatgggcaaagaagaacaacgtcctccagtacgtcgagacgagcgctaagagtggcgagaatgtcgaggccgctttcatgcgcatcgctgagcgaatttacgagaggattatggccgggaagtacgatctcaacgatcgtaggtccggtgtaaaggggcccgggcccggtaccgccggagcgagaggcgtgaatctctcaacggctggcgggaagcccgcagctggaggctgctgttaa

SEQ ID NO: 7133 - protein, 270 aa, Muscodor strobelii
  misc_feature: SGI Peptide ID NO. 562134
  misc_feature (11)..(168): Pfam Id: PF08477 Pfam Desc: Miro-like protein
  misc_feature (11)..(226): Pfam Id: PF00071 Pfam Desc: Ras family
  misc_feature (87)..(168): Pfam Id: PF08477 Pfam Desc: Miro-like protein
  misc_feature (1)..(270): NCBI GI: 46109304 Blast Desc: FG01534.1 [Gibberella zeae PH-1]
  misc_feature (4)..(270): NCBI GI: 39971751 Blast Desc: MGG_07191 [Magnaporthe grisea 70-15] gi|145019678|gb|EDK03906.1| MGG_07191 [Magnaporthe grisea 70-15]
  misc_feature (1)..(270): NCBI GI: 154296769 Blast Desc: BC1G_12412 [Botryotinia fuckeliana B05.10] gi|150843251|gb|EDN18444.1| BC1G_12412 [Botryotinia fuckeliana B05.10]
  misc_feature (1)..(270): NCBI GI: 116204895 Blast Desc: conserved [Chaetomium globosum CBS 148.51] gi|88176459|gb|EAQ83927.1| conserved [Chaetomium globosum CBS 148.51]
  misc_feature (2)..(270): NCBI GI: 171689104 Blast Desc: protein product [Podospora anserina] gi|170944514|emb|CAP70625.1| protein product [Podospora anserina]
  misc_feature (2)..(270): NCBI GI: 85078999 Blast Desc: NCU01647 [Neurospora crassa OR74A] gi|28917325|gb|EAA27033.1| conserved [Neurospora crassa OR74A]
  misc_feature (2)..(270): NCBI GI: 9368944 Blast Desc: related to GTP-binding protein rab2 [Neurospora crassa]
  misc_feature (1)..(270): NCBI GI: 156050967 Blast Desc: SS1G_08072 [Sclerotinia sclerotiorum 1980] gi|154692471|gb|EDN92209.1| SS1G_08072 [Sclerotinia sclerotiorum 1980]
  misc_feature (3)..(270): NCBI GI: 212537939 Blast Desc: secretion related GTPase SrgD [Penicillium marneffei ATCC 18224] gi|210068867|gb|EEA22958.1| secretion related GTPase SrgD [Penicillium marneffei ATCC 18224]
  misc_feature (3)..(270): NCBI GI: 169597759 Blast Desc: SNOG_01667 [Phaeosphaeria nodorum SN15] gi|111070196|gb|EAT91316.1| SNOG_01667 [Phaeosphaeria nodorum SN15]
  misc_feature: Useful for introducing or modulating the production of volatile compounds
MSSPPWSYIAKLVCIGDSGCGKSSLTIRLCEGRFSPQHDVTIGVEFGSRIVPVGPPYSKTNPNAIASADETASTASTLVNPPSTSATDGKKGADEDEQKHMKLSLWDTAGQEIYKSVTRSYFRGASGALLVFDITRRATFVHATDWLNDLRAIAEPDIVVILVGNKLDCVQSESGDADKSDKREVTYAEAAEWAKKNNVLQYVETSAKSGENVEAAFMRIAERIYERIMAGKYDLNDRRSGVKGPGPGTAGARGVNLSTAGGKPAAGGCC

SEQ ID NO: 7134 - DNA, 1819 bp, Muscodor strobelii
  misc_feature: SGI EST ID NO. CUFF.17732.0
  misc_feature: Variant of the nucleotide sequence at SEQ ID NO 7132
cttctcttctattggttggacccattcatacctattcatgagagcaacggctttgtccatatacagtgtcaatcagagatatagtctccatctcaaactgtgtcttgccttgggctgccgatacagctttccgtatccgtgcctgtcagtccatatcatcatcagtgtgacctacctactcactgtcccacgtcttacacagcacctcctcgtctctctaccaccgcccagtcacggcttttgttgcatactcattcttgcccgtcatccagcatctatgggttattgaccattgtgatcatacaccttgatcacccggtgctccttttatcttgcttggatttctacctggatcctactctatcgctggcccatccacccagctccactctcgagcttcgcttgtacctggagaaaggcaacacatacctagctacgaggccacggtacttttgggtacatttttgacaataccaaacaaagtactctgtctcgaatatagacaacccgaagctcccgtgacagtccctcagacatcccaccttttgacccgctccagactgggaccgagtgcctttccaacgtctcactccccatcgtcatgtcctctcccccgtggagctacatagccaagcttgtctgtataggagactcaggctgtggaaagtcgtcactcaccatccgcctttgcgaaggccgcttcagccctcaacatgatgtcaccatcggcgtcgaattcggctcgcgcatagtgcccgtagggcccccgtattccaaaacaaatcccaacgctatagcatcggccgacgaaaccgcttcgacagcttccacactagtgaaccccccgagcacttcagctaccgatggcaagaaaggagccgacgaggatgaacaaaagcacatgaagctttcgttatgggataccgcaggccaagaaatctacaaatccgtaacgcggagttacttccgtggtgcctccggcgcgctgctcgtcttcgacatcacgcggcgcgcaacgtttgtacatgcgactgactggctgaatgatctacgcgctatcgccgagccggacatcgtcgtgatactcgttggcaacaagctggactgcgtgcaatccgaatccggcgacgccgataagagcgacaagcgcgaggtgacgtatgccgaggcagcagaatgggcaaagaagaacaacgtcctccagtacgtcgagacgagcgctaagagtggcgagaatgtcgaggccgctttcatgcgcatcgctgagcgaatttacgagaggattatggccgggaagtacgatctcaacgatcgtaggtccggtgtaaaggggcccgggcccggtaccgccggagcgagaggcgtgaatctctcaacggctggcgggaagcccgcagctggaggctgctgttaatgtgatcatagcgcatgagacaagactactaataatttgacgaagatgagaacagaggaggaaaagctaagctgggatccttcgtaccacaatcacagggaacaagccttttgatgcttaatcacccaatgttgcttggctggttgattgcagggatgttggttttccagctcgttgtaactgtacatataagcatgcaaaagcgcacacgcgtatgcattagcatacgatgagggaggactcgtatgtctggtggtcatggttcatgatgataccctgagtaataatgtctactactactgtgagcagttattagcatctacattctatctatgtttagcatggagataggagatgaataagatacgataggtttgagagcttactgttggctgaagcttttgg

SEQ ID NO: 7135 - DNA, 2241 bp, Muscodor strobelii
  misc_feature: SGI cDNA ID NO. 562135
  misc_feature: Encodes the peptide sequence at SEQ ID NO 7136
atgttttccgaatatgcctcccgctttctctcccagtcacagtcccgcatatccaacttcgccggacagcccgacagcaatgactctccccaccgccagacctcagatgcgcccactctgagatactcgagacagccaccgcgctcttcatatcaggctcgcctgggaaacccttatcagtcctctcagtccagcgccttgaacgagtttcgggaggatgacgatgaggacgatgtcagggaggccgctgatttccgcgctctgcagcactcacgccgtgttttgatgtccagccgcctcgaggatagttccgcttcggagaatgacgcaagccgagcctcgctcgaccaaagtggcgaacaggatagcaggttgtacgaggacacggatcgtcacatgggaatcaaaagtagctggaatggggaatctagttttaagagtagacaggacaaacgcaaggcgaaggaggagcaggccatctcaggaacatccggcaaacagaagaattcacggcagaattctgacagcgacgagagcgcaaagatggtggatgtgggcctagaatcgaccgtcatggacaactctgtaccggaagacctgctacaggaactggcacccgactcatcgccacctgcgtttcagcagttcaaatcgaccaggagcagtacgaagggcatacccggccgcaagacgtcgaatctggaacgcgaccagcgtctgatgcgacaagcgatcgctgaagaggacgaggaggatgatgagacggagaatctagtacagtcgcctgagaacatccctgcgcctccggcaccccgaatgtacggcgagatcttcgtgcacgaccagtttttcgcctggctgttcttgatcgcatttgcatctctcatcgctacctttgtcctggtctggctacatacttcggttccgacgaaaaggatcggtgacaccatttacacgacgctgcattcttctttctacttactagctgtcgatacgttggtttccatcatcgttgcgctagtatggatggcagctctcaagtcatttatccaacctttagtcctactcattttgttcggtgttcccatcgtcttattctcattctcattataccctctcatctccagtttccaaggccgtgagcatgggtcaagcttccaagacgtcgtcatgagatactcagctatagtacccgggatttgctccattctctgggtttggctgcttatcaagggtcgccacgaagtccatagggccatcgatattttagacttttccagtcgcatcctgggcgcaaatccagcacttgtactgttaggcttcggatccttggcttttgtggtggggtggacttgggtatggttgtggatgttcactcgcatctttttgggaggatacttcaaaaagtcaatatccacattcatcatcggcactgcgacgtggtggcttgccgtattcttctttctgatgtacgtctggaccctctccgttacgagcggagtggtccgggctaccactgctggtacggtgtccaactggtacttccaccgcaaccttcagacgcttgcctcgtcgaatgacattgtgaagggcgccttgggtcactctgtgactacagtgtttggcaccatttgcgcctccactctgctggcactggctgttcgactgcccattctaatactccctcgacgcatcgcaggcgcactggagtttattggatggcggctggcaccgcgcccagtgtcagtactaactaacccactggcactgacatacgcctccattcactcgctacctctgatggagtctgcatcgcacctgagcagaaatcagtttttgtcgaccggacctacgacagcacttacccctagcgccttctcgagacggaatcagaccgcttccttaatgccgtataggatggctaagatgctgctacacgcagcacgattcgtcatgtcgacagctctgggctttgctgcatgggtcatgaccgcacggcagctgaaggtcactcttcctgaaggacttggtgtacgggggagcgcctatgcctacgtcgtgggcatcgtggcaagtatgatcggttggggggtattgggggcgatggagggcatcctctctggagtccttgacggtgttctcatttgctacgctagcgagagaagattggaccgggctacttactgcatcgaggcagcaaagttattcgaggacaggaactacgatagggatctggtttga

SEQ ID NO: 7136 - protein, 746 aa, Muscodor strobelii
  misc_feature: SGI Peptide ID NO. 562135
  misc_feature (1)..(745): NCBI GI: 261354486 Blast Desc: conserved [Verticillium albo-atrum VaMs.102]
  misc_feature (1)..(723): NCBI GI: 145612535 Blast Desc: MGG_07192 [Magnaporthe grisea 70-15] gi|145019679|gb|EDK03907.1| MGG_07192 [Magnaporthe grisea 70-15]
  misc_feature (6)..(744): NCBI GI: 171689106 Blast Desc: protein product [Podospora anserina] gi|170944515|emb|CAP70626.1| protein product [Podospora anserina]
  misc_feature (1)..(740): NCBI GI: 164428085 Blast Desc: NCU01646 [Neurospora crassa OR74A] gi|16944667|emb|CAB99173.2| conserved [Neurospora crassa] gi|157072005|gb|EAA27032.2| conserved [Neurospora crassa OR74A]
  misc_feature (1)..(739): NCBI GI: 46109302 Blast Desc: FG01533.1 [Gibberella zeae PH-1]
  misc_feature (1)..(731): NCBI GI: 116204897 Blast Desc: CHGG_10332 [Chaetomium globosum CBS 148.51] gi|88176460|gb|EAQ83928.1| CHGG_10332 [Chaetomium globosum CBS 148.51]
  misc_feature (6)..(736): NCBI GI: 256730573 Blast Desc: [Nectria haematococca mpVI 77-13-4]
  misc_feature (62)..(744): NCBI GI: 154296771 Blast Desc: BC1G_12413 [Botryotinia fuckeliana B05.10] gi|150843252|gb|EDN18445.1| BC1G_12413 [Botryotinia fuckeliana B05.10]
  misc_feature (1)..(743): NCBI GI: 238842808 Blast Desc: conserved [Microsporum canis CBS 113480]
  misc_feature (62)..(738): NCBI GI: 156050965 Blast Desc: SS1G_08071 [Sclerotinia sclerotiorum 1980] gi|154692470|gb|EDN92208.1| SS1G_08071 [Sclerotinia sclerotiorum 1980]
MFSEYASRFLSQSQSRISNFAGQPDSNDSPHRQTSDAPTLRYSRQPPRSSYQARLGNPYQSSQSSALNEFREDDDEDDVREAADFRALQHSRRVLMSSRLEDSSASENDASRASLDQSGEQDSRLYEDTDRHMGIKSSWNGESSFKSRQDKRKAKEEQAISGTSGKQKNSRQNSDSDESAKMVDVGLESTVMDNSVPEDLLQELAPDSSPPAFQQFKSTRSSTKGIPGRKTSNLERDQRLMRQAIAEEDEEDDETENLVQSPENIPAPPAPRMYGEIFVHDQFFAWLFLIAFASLIATFVLVWLHTSVPTKRIGDTIYTTLHSSFYLLAVDTLVSIIVALVWMAALKSFIQPLVLLILFGVPIVLFSFSLYPLISSFQGREHGSSFQDVVMRYSAIVPGICSILWVWLLIKGRHEVHRAIDILDFSSRILGANPALVLLGFGSLAFVVGWTWVWLWMFTRIFLGGYFKKSISTFIIGTATWWLAVFFFLMYVWTLSVTSGVVRATTAGTVSNWYFHRNLQTLASSNDIVKGALGHSVTTVFGTICASTLLALAVRLPILILPRRIAGALEFIGWRLAPRPVSVLTNPLALTYASIHSLPLMESASHLSRNQFLSTGPTTALTPSAFSRRNQTASLMPYRMAKMLLHAARFVMSTALGFAAWVMTARQLKVTLPEGLGVRGSAYAYVVGIVASMIGWGVLGAMEGILSGVLDGVLICYASERRLDRATYCIEAAKLFEDRNYDRDLV

SEQ ID NO: 7137 - DNA, 3291 bp, Muscodor strobelii
  misc_feature: SGI EST ID NO. CUFF.17802.0
  misc_feature: Variant of the nucleotide sequence at SEQ ID NO 7135
cggccgttgtcgcttcagttgattgcatgtgagcaacagccttcgtctcatgtctgcttgtagagtactctcttatcttgcgtatcttgtgcaggtgccttgtgaatgaagccttgtgctgggatccggcggtatgactgactgattgccggtgtagctcaagcatcactcacatcacccagccgtcatcctatctcatcccaccaaggttcgactggtcgggcttgccttggtcagcttctttctacctgcctctcgccaaagcatccttgtgccaataacaacacaggctgcatttcttgaccacatcccattcaacatagcaaacacacaatcaaaggcaaatactactttccaaccagtccatttccataatcctgtagatttgatcgtgtattatcgtccctttcctgcaacagcaccaggcaccaacatctatctatctgtgtacacttctcattctcatcccgccacccgggttccacgccgctgggcatctcccaaccgtctgcgctcccactcacgcatcgccggttttgggcacacgcctgccgccctctttctgtacccaaccaccgactggagtctccctcctccagcatatcatatagttcaacatgttttccgaatatgcctcccgctttctctcccagtcacagtcccgcatatccaacttcgccggacagcccgacagcaatgactctccccaccgccagacctcagatgcgcccactctgagatactcgagacagccaccgcgctcttcatatcaggctcgcctgggaaacccttatcagtcctctcagtccaggttcggcagcttcaccacccgatataccactgctcccgatgccccgttgttcccatagcgccttgaacgagtttcgggaggatgacgatgaggacgatgtcagggaggccgctgatttccgcgctctgcagcactcacgccgtgttttgatgtccagccgcctcgaggatagttccgcttcggagaatgacgcaagccgagcctcgctcgaccaaagtggcgaacaggatagcaggttgtacgaggacacggatcgtcacatgggaatcaaaagtagctggaatggggaatctagttttaagagtagacaggacaaacgcaaggcgaaggaggagcaggccatctcaggaacatccggcaaacagaagaattcacggcagaattctgacagcgacgagagcgcaaagatggtggatgtgggcctagaatcgaccgtcatggacaactctgtaccggaagacctgctacaggaactggcacccgactcatcgccacctgcgtttcagcagttcaaatcgaccaggagcagtacgaagggcatacccggccgcaagacgtcgaatctggaacgcgaccagcgtctgatgcgacaagcgatcgctgaagaggacgaggaggatgatgagacggagaatctagtacagtcgcctgagaacatccctgcgcctccggcaccccgaatgtacggcgagatcttcgtgcacgaccagtttttcgcctggctgttcttgatcgcatttgcatctctcatcgctacctttgtcctggtctggctacatacttcggttccgacgaaaaggatcggtgacaccatttacacgacgctgcattcttctttctacttactagctgtcgatacgttggtttccatcatcgttgcgctagtatggatggcagctctcaagtcatttatccaacctttagtcctactcattttgttcggtgttcccatcgtcttattctcattctcattataccctctcatctccagtttccaaggccgtgagcatgggtcaagcttccaagacgtcgtcatgagatactcagctatagtacccgggatttgctccattctctgggtttggctgcttatcaagggtcgccacgaagtccatagggccatcgatattttagacttttccagtcgcatcctgggcgcaaatccagcacttgtactgttaggcttcggatccttggcttttgtggtggggtggacttgggtatggttgtggatgttcactcgcatctttttgggaggatacttcaaaaagtcaatatccacattcatcatcggcactgcgacgtggtggcttgccgtattcttctttctgatgtacgtctggaccctctccgttacgagcggagtggtccgggctaccactgctggtacggtgtccaactggtacttccaccgcaaccttcagacgcttgcctcgtcgaatgacattgtgaagggcgccttgggtcactctgtgactacagtgtttggcaccatttgcgcctccactctgctggcactggctgttcgactgcccattctaatactccctcgacgcatcgcaggcgcactggagtttattggatggcggctggcaccgcgcccagtgtcagtactaactaacccactggcactgacatacgcctccattcactcgctacctctgatggagtctgcatcgcacctgagcagaaatcagtttttgtcgaccggacctacgacagcacttacccctagcgccttctcgagacggaatcagaccgcttccttaatgccgtataggatggctaagatgctgctacacgcagcacgattcgtcatgtcgacagctctgggctttgctgcatgggtcatgaccgcacggcagctgaaggtcactcttcctgaaggacttggtgtacgggggagcgcctatgcctacgtcgtgggcatcgtggcaagtatgatcggttggggggtattgggggcgatggagggcatcctctctggagtccttgacggtgttctcatttgctacgctagcgagagaagattggaccgggctacttactgcatcgaggcagcaaagttattcgaggacaggaactacgatagggatctggtttgatggtttagcgatggcgtttcactgactgcatgaagcatttcaaggagcttggtctgtagctcaggcttgcattcccagactatcacttccacagcgatgggacgggatggagtttatgggtagttggacaaccaatgaagaatagaatgtttgacaaactgatccagttctagtcccaagctcaacataactgtattgttggcagtcagagtacctggatagcgtgataacgatagcgtgtccccttttcatgccgttcaagcttcaatggtcccccttagtggacgcatttgtacttgggatgaggaaaacacgcgcatgtttaaagttggaccgtgacaatcagatgtgaacctgtctcgcttataagtcaac

SEQ ID NO: 7138 - DNA, 2367 bp, Muscodor strobelii
  misc_feature: SGI cDNA ID NO. 562136
  misc_feature: Encodes the peptide sequence at SEQ ID NO 7139
atgccaggcctgcgcgacatcgtggatcgcctcgagccccttgacctggcaaccgagatctgggacgcggttaggaacagcgaccgagttgtcgcggtttctgatttcttgcactatactttttacacaaacaagggaagacattacgctactgcgccttctcctacttccgatcccaaggtcgagaaggctgaagaccaaggagacatggcttcttcttcttctgactctggatctgaagtcaaggccgaggctgaggccgagacagagatcaatactgccgctcctccacctggcatgaaggcttctttgtggggtgccatgcgactcccctggatgaaccagccgcagaccgacatgtctaagtctaccgatgaggcgaagcttgaggatgtcgacctcgacagctcgcgtgagagtgatgacagcgagcccgaatacgacttcccctatagtgggcccgaacgagcggagaagaagaagagaagcgaaaaggctttagcgaagaagaagtgcactgaagatgacagtgacacggaagaggaagactggattgtcgtgaagaccaaccctaagcctgtgatccctggatcaaagaagcctgagtccaaggcatctgatcccaaggagtctgaatccaaagaagttcaggcaaagaacattcgactaaaagagtccgacattaagaaaaacttcgcggatctcgtcaccggtctttgtaagcctgctggagctttcgagcaagcagatgtcgtcggcggttcatctaagaaggacactcccaatccgagaagttccaactactacgccgattccaaggtcgtagtcgatcttccccaggtcgactgcatttcatcaagcgacactgcccccacgaagtcaagttctcataattatacccagcccaaacccagagttcagcttccaaagaattcctatgcaaccaggccccttgtggtcaagtctcatcccgagatcaccgtcgagcatgtcgagcgcgcggagcccagctccaagtgttcaaatcaggcacctaaatcaccatggagacagatcgagaagttccctaagcctgagccttcttccaaagggaaggaagatccttcgcccaagaaggacccgaagcctcagacacagcttgagctcaaggaacagcgacagccgaagccgaaggtcacacaactcaacccattcatcagcaagcccctcctcccaccctatgatcccctcctggccggacccaatgccggaccctcacaagtggcatggagaagtaactgcaaaatcccatcgctttacactcctcgcaatcaccaagaagcagtcatagccagtggctcaacgcaagtcgaatttgacgctttcaagaaccatctacgttatggcacgaacccccataaaccgaaaaccatggatgagtacaccgccgagagaatcgcagagaaggagaaagccgcactcgcggccacaaaatccgcttacgagctacgagaggatgaagaagaaaaaagactcagacgatggcagagacttgaggaggcacaggcgaagttcgctcgtgacgttcacgagggcacagtcactatctcatcgggagatgatgcctccaaggacaaaggaaaacaaccagacaggccctacaattaccatttcgagcaggagctagctaaggcgaaagatcgcgccgaggcgcagagggctatgtctgccttatcagcagacaacatccccaaagacaaaggcaaacaaccagggagaccctgctggcccggcccgaagcagcagcgagttctagcccaaactgaggaagacgagctaattgcaagcgtgcgagaggagactcgagtagcacatgcgaatgctaaggagctacctattaaagaggtgcaagctaagagagctcgcgccgaggtagagggcattctcgcggccttcgatgcaggtgattatgacggcaaaggaaaacaagcagagcgaatctccaatctctaccctgtatacaacctctcagacgagcgggcctacgccgcatcccaacgcgaacaagctcgttctatcgcacgagaccgcgctcgagccgatgaactgaaagccccgatgcaacccatcgagcacatggcggctcgcgccgtagagaagcacgctaaggagcaggcgagggtcgatgcagtgaaggccaagattgcgcgcatgaaagccgagactgcgaaagaggtcgagcaaggcagggctgagagggagaaggatatgcaggaggcgaaggagaagcagtggcatgatgatggacggccggccccgaagagtgtcgagtacacttatcggtatttcactgagaagccttatgttcctgatgctgataggaagtag

SEQ ID NO: 7139 - protein, 788 aa, Muscodor strobelii
  misc_feature: SGI Peptide ID NO. 562136
MPGLRDIVDRLEPLDLATEIWDAVRNSDRVVAVSDFLHYTFYTNKGRHYATAPSPTSDPKVEKAEDQGDMASSSSDSGSEVKAEAEAETEINTAAPPPGMKASLWGAMRLPWMNQPQTDMSKSTDEAKLEDVDLDSSRESDDSEPEYDFPYSGPERAEKKKRSEKALAKKKCTEDDSDTEEEDWIVVKTNPKPVIPGSKKPESKASDPKESESKEVQAKNIRLKESDIKKNFADLVTGLCKPAGAFEQADVVGGSSKKDTPNPRSSNYYADSKVVVDLPQVDCISSSDTAPTKSSSHNYTQPKPRVQLPKNSYATRPLVVKSHPEITVEHVERAEPSSKCSNQAPKSPWRQIEKFPKPEPSSKGKEDPSPKKDPKPQTQLELKEQRQPKPKVTQLNPFISKPLLPPYDPLLAGPNAGPSQVAWRSNCKIPSLYTPRNHQEAVIASGSTQVEFDAFKNHLRYGTNPHKPKTMDEYTAERIAEKEKAALAATKSAYELREDEEEKRLRRWQRLEEAQAKFARDVHEGTVTISSGDDASKDKGKQPDRPYNYHFEQELAKAKDRAEAQRAMSALSADNIPKDKGKQPGRPCWPGPKQQRVLAQTEEDELIASVREETRVAHANAKELPIKEVQAKRARAEVEGILAAFDAGDYDGKGKQAERISNLYPVYNLSDERAYAASQREQARSIARDRARADELKAPMQPIEHMAARAVEKHAKEQARVDAVKAKIARMKAETAKEVEQGRAEREKDMQEAKEKQWHDDGRPAPKSVEYTYRYFTEKPYVPDADRK

SEQ ID NO: 7140 - DNA, 900 bp, Muscodor strobelii
  misc_feature: SGI cDNA ID NO. 562137
  misc_feature: Reduced expression when VOC is produced
  misc_feature: Encodes the peptide sequence at SEQ ID NO 7141
atggccgattttgaagctccctctggccctcccccgccgaaagtgccggagggctgggtcgcccgctggaacgaccagtacaaggaatggttctacgtcaacacttacaccaagaagtcgcaatgggagaagccgactgcacccgccgtcaaccctaacgacgactctcccggcggtcccccaccaggctactcagccggctcgggtcctgcaccttcagatactaagaccaacccctttgccaaggaccataccggcggatcacatgacgatgatcctgatgctcgtctcgcccgccagctgcaggccgaggaggacgcccgcgcacgggctggtggctctagaggcgccgccgactcgtacttgaacagcagtagctcgggcccctcgtcttcttccggatcctatcctgatcaactcccaccccgcgaacagtccggatctcgcggtcttctcggaaagatcttcggcggctctagcaagaataagtacggcggaggcggtggatttccgggccagagtcatcagcaaggccactacggcggcggtccgcctccacagcagtattatggcggtggtccacctcctggtcaatacggaggtggttatggccagcagccctacggcggacaatatggtggcccacctcctcagcaaggttattatggaggcggcggctacggcggaggctacggcggttaccagcagcagccccctagaaagtcgggcggccttggtgccggcggtggtgccgcactcggtctcggtgccggtcttatcggtggtgcattgattgcagatgctgttgatgatcatgaggactatgagcagcagcaggcctatgatcagggctacgatgacggtggtggtggtgatgactttggcggtggtgacttctaa

SEQ ID NO: 7141 - protein, 299 aa, Muscodor strobelii
  misc_feature: SGI Peptide ID NO. 562137
  misc_feature (15)..(45): Pfam Id: PF00397 Pfam Desc: WW domain
  misc_feature (1)..(156): NCBI GI: 116204899 Blast Desc: CHGG_10333 [Chaetomium globosum CBS 148.51] gi|88176461|gb|EAQ83929.1| CHGG_10333 [Chaetomium globosum CBS 148.51]
  misc_feature (1)..(143): NCBI GI: 171689108 Blast Desc: protein product [Podospora anserina] gi|170944516|emb|CAP70627.1| protein product [Podospora anserina]
  misc_feature (18)..(157): NCBI GI: 46109068 Blast Desc: FG01416.1 [Gibberella zeae PH-1]
  misc_feature (1)..(195): NCBI GI: 164428083 Blast Desc: NCU01645 [Neurospora crassa OR74A] gi|157072004|gb|EAA27031.2| [Neurospora crassa OR74A]
  misc_feature (18)..(157): NCBI GI: 156050057 Blast Desc: SS1G_07614 [Sclerotinia sclerotiorum 1980] gi|154692016|gb|EDN91754.1| SS1G_07614 [Sclerotinia sclerotiorum 1980]
  misc_feature (1)..(195): NCBI GI: 16944666 Blast Desc: related to rna-binding protein fus/tls [Neurospora crassa]
  misc_feature (15)..(182): NCBI GI: 39971755 Blast Desc: [Magnaporthe grisea 70-15] gi|145019680|gb|EDK03908.1| [Magnaporthe grisea 70-15]
  misc_feature (15)..(165): NCBI GI: 121717610 Blast Desc: WW domain protein, [Aspergillus clavatus NRRL 1] gi|119404299|gb|EAW14675.1| WW domain protein, [Aspergillus clavatus NRRL 1]
  misc_feature (1)..(157): NCBI GI: 154318004 Blast Desc: BC1G_02985 [Botryotinia fuckeliana B05.10] gi|150843643|gb|EDN18836.1| BC1G_02985 [Botryotinia fuckeliana B05.10]
  misc_feature (1)..(82): NCBI GI: 261354487 Blast Desc: [Verticillium albo-atrum VaMs.102]
  misc_feature: Useful for introducing or modulating the production of volatile compounds
MADFEAPSGPPPPKVPEGWVARWNDQYKEWFYVNTYTKKSQWEKPTAPAVNPNDDSPGGPPPGYSAGSGPAPSDTKTNPFAKDHTGGSHDDDPDARLARQLQAEEDARARAGGSRGAADSYLNSSSSGPSSSSGSYPDQLPPREQSGSRGLLGKIFGGSSKNKYGGGGGFPGQSHQQGHYGGGPPPQQYYGGGPPPGQYGGGYGQQPYGGQYGGPPPQQGYYGGGGYGGGYGGYQQQPPRKSGGLGAGGGAALGLGAGLIGGALIADAVDDHEDYEQQQAYDQGYDDGGGGDDFGGGDF

SEQ ID NO: 7142 - DNA, 1733 bp, Muscodor strobelii
  misc_feature: SGI EST ID NO. CUFF.17722.0
  misc_feature: Variant of the nucleotide sequence at SEQ ID NO 7140
tcttagtgcctaccttaggtagagacagatatttatttagaacttctccgatagaataagagacagtctctttgtgcaacagattgatcattgactcaacctcttaatcacctaatactatcataccagatcatttcttgtccctccattacgtctacatccactgcccagcaaatagcgccatccagtgaacccctcctccagactcaggaacggaccccaactaccccccaccacgaccgtcattccataggtcgctatatatatcatcagacctgcaggccgcgggaatcccatcgcccactgcactccaactcgggtagcacacctgcgagcaaacggtatatctcgctcaacctcgcctgttcgagtcaatccattcgagagccaagacctcacctcagcaatcccatcggcgcatcgtcatccatcacgcatggccgattttgaagctccctctggccctcccccgccgaaagtgccggagggctgggtcgcccgctggaacgaccagtacaaggaatggttctacgtcaacacttacaccaagaagtcgcaatgggagaagccgactgcacccgccgtcaaccctaacgacgactctcccggcggtcccccaccaggctactcagccggctcgggtcctgcaccttcagatactaagaccaacccctttgccaaggaccataccggcggatcacatgacgatgatcctgatgctcgtctcgcccgccagctgcaggccgaggaggacgcccgcgcacgggctggtggctctagaggcgccgccgactcgtacttgaacagcagtagctcgggcccctcgtcttcttccggatcctatcctgatcaactcccaccccgcgaacagtccggatctcgcggtcttctcggaaagatcttcggcggctctagcaagaataagtacggcggaggcggtggatttccgggccagagtcatcagcaaggccactacggcggcggtccgcctccacagcagtattatggcggtggtccacctcctggtcaatacggaggtggttatggccagcagccctacggcggacaatatggtggcccacctcctcagcaaggttattatggaggcggcggctacggcggaggctacggcggttaccagcagcagccccctagaaagtcgggcggccttggtgccggcggtggtgccgcactcggtctcggtgccggtcttatcggtggtgcattgattgcagatgctgttgatgatcatgaggactatgagcagcagcaggcctatgatcagggctacgatgacggtggtggtggtgatgactttggcggtggtgacttctaagcctagctcaccttgcgtgagtccaatttctgccgttctactgcccatttaattccagcacgaaaggggagttcttgtgtgtgcaatttacatcttttgagaggcatagagaagaggagaacagaatggcatggcatggcagtatggatgatggcatatcatgagaaagaaagactgagagacgtctgacttcagcagactgatgagaaacggaaagcaaaaggatgagatcggtggatttgacccctactactgcttaggtaaaattacatacatacactttattacttacgaaattcatgatggttacttcttcaaagctgatgttgtccctgtatcccctatggcagaatgctgtagatagagtgcaaatcgtgatgtgataattagaaatgca

SEQ ID NO: 7143 - DNA, 714 bp, Muscodor strobelii
  misc_feature: SGI cDNA ID NO. 562138
  misc_feature: Encodes the peptide sequence at SEQ ID NO 7144
atgttattctcaaacccgcttgccactgctctccagctgctctccctaattcccgccatttccgcaacgacgataacattgagcatcccaccgcaaaccaacctaccgaacccgaacaccctgccggcctcgacacacgccacacttaactctctgggtgtctcatactccgcaccgttgaccattcagaacacttttgtattccgcaacgtaactcctggctcctatttaggcgatatccacagcggcacctacggctttgcacccctgcgcgtagacttgttgcccgaaggcgaggtagtcaaaatatgggagacatttcgcggaaatgactgggagaacaaaggagaagaggtcaccatgattagtggtgcgtttccggtcaaggcgctgggcgtcaagatgccgtttgctgagcgtggatctttctctatcatgagcattcttaagaacccaatgatcctcatgggcctcgtcagtctggtgttgttcgtcgctatgcctaagatggttgagaatatggatcccgagactcgcgcggagttcgaagatgcggcacaaaagaatcctatgaatagcattatgtcgggtggcaacccaggagctggcagtaattttgacatggcgggtttcttggctgggcagagtagcagtaaggacgaggctcctgagtctggctctgggaatgggaacaaaaagggtggcaagaggtga

SEQ ID NO: 7144 - protein, 237 aa, Muscodor strobelii
  misc_feature: SGI Peptide ID NO. 562138
  misc_feature (1)..(188): Pfam Id: PF09430 Pfam Desc: Domain of function (DUF2012)
  misc_feature (19)..(221): NCBI GI: 256730628 Blast Desc: NECHADRAFT_65314 [Nectria haematococca mpVI 77-13-4]
  misc_feature (20)..(237): NCBI GI: 116204901 Blast Desc: CHGG_10334 [Chaetomium globosum CBS 148.51] gi|88176462|gb|EAQ83930.1| CHGG_10334 [Chaetomium globosum CBS 148.51]
  misc_feature (23)..(222): NCBI GI: 85079031 Blast Desc: NCU01655 [Neurospora crassa OR74A] gi|16944672|emb|CAB99182.2| conserved [Neurospora crassa] gi|28917333|gb|EAA27041.1| conserved [Neurospora crassa OR74A]
  misc_feature (22)..(233): NCBI GI: 46109066 Blast Desc: FG01415.1 [Gibberella zeae PH-1]
  misc_feature (23)..(212): NCBI GI: 39971757 Blast Desc: MGG_07194 [Magnaporthe grisea 70-15] gi|145019681|gb|EDK03909.1| MGG_07194 [Magnaporthe grisea 70-15]
  misc_feature (13)..(203): NCBI GI: 171689110 Blast Desc: protein product [Podospora anserina] gi|170944517|emb|CAP70628.1| protein product [Podospora anserina]
  misc_feature (1)..(216): NCBI GI: 119182561 Blast Desc: CIMG_06305 [Coccidioides immitis RS]
  misc_feature (7)..(237): NCBI GI: 67902586 Blast Desc: AN8280.2 [Aspergillus nidulans FGSC A4] gi|40739828|gb|EAA59018.1| AN8280.2 [Aspergillus nidulans FGSC A4]
  misc_feature (20)..(235): NCBI GI: 119498693 Blast Desc: NFIA_037810 [Neosartorya fischeri NRRL 181] gi|119414268|gb|EAW24207.1| conserved [Neosartorya fischeri NRRL 181]
  misc_feature (4)..(216): NCBI GI: 240109325 Blast Desc: CPC735_028300 [Coccidioides posadasii C735 delta SOWgp]
MLFSNPLATALQLLSLIPAISATTITLSIPPQTNLPNPNTLPASTHATLNSLGVSYSAPLTIQNTFVFRNVTPGSYLGDIHSGTYGFAPLRVDLLPEGEVVKIWETFRGNDWENKGEEVTMISGAFPVKALGVKMPFAERGSFSIMSILKNPMILMGLVSLVLFVAMPKMVENMDPETRAEFEDAAQKNPMNSIMSGGNPGAGSNFDMAGFLAGQSSSKDEAPESGSGNGNKKGGKR

SEQ ID NO: 7145 - DNA, 1090 bp, Muscodor strobelii
  misc_feature: SGI EST ID NO. CUFF.17696.0
  misc_feature: Variant of the nucleotide sequence at SEQ ID NO 7143
catcacgaccattacagcttcaactacagcacttaacagtccagctccccccgagacaaagtaacatcgcccgagatgttattctcaaacccgcttgccactgctctccagctgctctccctaattcccgccatttccgcaacgacgataacattgagcatcccaccgcaaaccaacctaccgaacccgaacaccctgccggcctcgacacacgccacacttaactctctgggtgtctcatactccgcaccgttgaccattcagaacacttttgtattccgcaacgtaactcctggctcctatttaggcgatatccacagcggcacctacggctttgcacccctgcgcgtagacttgttgcccgaaggcgaggtagtcaaaatatgggagacatttcgcggaaatgactgggagaacaaaggagaagaggtcaccatgattagtggtgcgtttccggtcaaggcgctgggcgtcaagatgccgtttgctgagcgtggatctttctctatcatgagcattcttaagaacccaatgatcctcatgggcctcgtcagtctggtgttgttcgtcgctatgcctaagatggttgagaatatggatcccgagactcgcgcggagttcgaagatgcggcacaaaagaatcctatgaatagcattatgtcgggtggcaacccaggagctggcagtaattttgacatggcgggtttcttggctgggcagagtagcagtaaggacgaggctcctgagtctggctctgggaatgggaacaaaaagggtggcaagaggtgaaactatgaaatactatacagtaagatggtgagggagtgtgtagtacgtctatgccatagctttgcgtggcgagcatgggcagtagcgaggagcatcagtgaaccgtatgacgtgccgcaatgagatggcatatcatacttgtcaatggcattcatcatctgctgttcggttattcttcgttgtgctccttttaaagctgccgagcaacatgcagagggtgggtaagaaaatgagctatctcttcattggcaccatgattgaactctacatagtaaattttgaatactttcttccatccgga

SEQ ID NO: 7146 - DNA, 1368 bp, Muscodor strobelii
  misc_feature: SGI cDNA ID NO. 562139
  misc_feature: Elevated expression when VOC is produced
  misc_feature: Encodes the peptide sequence at SEQ ID NO 7147
atggcggaagacttgagcaagaactttgagactctccagctccacgcgggccaggagatagaccctaccacaaatgccagagcagtaccaatctatgccaccactagtttcggtttcaatgattcagctcacggcgccaggctgtttggccttaaagagttcggcaacatctacagccgtatcatgaatcctacagtcgatgtcttcgagaagcgaatcgcagccctcgaaggtggtgtagcagcacttgctgcatcttcaggtcaagctgcacagttcatgactatttcagctctggcacatgagggagacaacattgtgtcgacctctaacttatacggtggaacttacaaccagttaaaggttatgttacctcgcttcggtatcaagactaagttcatcgacggcgacaagcccgaggacttcgctgctgctatcgatgaccgcaccaaggctgtctacattgagagtattggtaatccgcgatacaacgtccccgacttcgaggccattgccaaggttgctcatgagaagggtgtccctgttgtggtcgacaacacttttggcgcgggcggtttctttgtgcgccccattgatcacggtgctgatatcgttgtccactcggcgacaaagtggattggtggacacggcacaacaattggtggtgtcattgtcgacagtggcaagtttgactggggcgccaacgctgcgcgttttccccagatggtcgagccatcggatggttaccacggattgaagttctgggagacttttggccccataactttcatcatacgcgcgcgagttgagatcctacgtgatctcggtgcttgcctgaacccattcgctgctcaacagctgctcatcggtatcgagacactgagtctacgtgccgagcgccatgcgcagaacgccctcgctctcgcaaagtacctcgaatcttcaccatacgtcagctgggtatcctacccaggtcttgagagccactcaagccacgagatcgccaagagatatctcaagcgtggattcggtggcgtgctgagcttcggtgtaaagggaggtggcgcggctggaagccaaatcgttgatggctttaagatcatttcaaacctcgccaacgttggtgactccaagacactagctatccacccctggacgacgacgcacgagcagctgagtgatgaagaaaaagtgagctctggtgtgtctgaagatctcatccgtatctcagttggtaccgagcacatagacgatatcattgccgattttgagcagtccttcaagaaggctgccgctgcaaacccggatgcaggcgagaaggatgctgcccctgaggctaagaaggacgaggcgcccactgttgtttag

SEQ ID NO: 7147 - protein, 455 aa, Muscodor strobelii
  misc_feature: SGI Peptide ID NO. 562139
  misc_feature (53)..(336): Pfam Id: PF01212 Pfam Desc: Beta-eliminating lyase
  misc_feature (10)..(428): Pfam Id: PF01053 Pfam Desc: Cys/Met metabolism PLP-dependent enzyme
  misc_feature (41)..(428): Pfam Id: PF01041 Pfam Desc: DegT/DnrJ/EryC1/StrS aminotransferase family
  misc_feature (6)..(455): NCBI GI: 116204903 Blast Desc: CHGG_10335 [Chaetomium globosum CBS 148.51] gi|88176463|gb|EAQ83931.1| CHGG_10335 [Chaetomium globosum CBS 148.51]
  misc_feature (7)..(455): NCBI GI: 171689112 Blast Desc: protein product [Podospora anserina] gi|170944518|emb|CAP70629.1| protein product [Podospora anserina]
  misc_feature (1)..(452): NCBI GI: 46109070 Blast Desc: CYSD_EMENI O-ACETYLHOMOSERINE (THIOL)-LYASE (O-ACETYLHOMOSERINE SULFHYDRYLASE) (OAH SULFHYDRYLASE) (HOMOCYSTEINE SYNTHASE) [Gibberella zeae PH-1]
  misc_feature (1)..(437): NCBI GI: 119182555 Blast Desc: O-acetylhomoserine [Coccidioides immitis RS] gi|240109323|gb|EER27492.1| O-acetylhomoserine , [Coccidioides posadasii C735 delta SOWgp]
  misc_feature (4)..(455): NCBI GI: 39971759 Blast Desc: MGG_07195 [Magnaporthe grisea 70-15] gi|145019682|gb|EDK03910.1| MGG_07195 [Magnaporthe grisea 70-15]
  misc_feature (9)..(445): NCBI GI: 258571523 Blast Desc: O-acetylhomoserine [Uncinocarpus reesii 1704] gi|237904835|gb|EEP79236.1| O-acetylhomoserine [Uncinocarpus reesii 1704]
  misc_feature (5)..(455): NCBI GI: 16944670 Blast Desc: O-acetylhomoserine (thiol)-lyase [Neurospora crassa]
  misc_feature (1)..(443): NCBI GI: 189195280 Blast Desc: O-acetylhomoserine (thiol)-lyase [Pyrenophora tritici-repentis Pt-1C-BFP] gi|187979857|gb|EDU46483.1| O-acetylhomoserine (thiol)-lyase [Pyrenophora tritici-repentis
  misc_feature (1)..(432): NCBI GI: 145242826 Blast Desc: An09g06710 [Aspergillus niger] gi|134078543|emb|CAK40464.1| protein product [Aspergillus niger]
  misc_feature (1)..(436): NCBI GI: 255931661 Blast Desc: Pc12g05420 [Penicillium chrysogenum Wisconsin 54-1255] gi|211582006|emb|CAP80169.1| Pc12g05420 [Penicillium chrysogenum Wisconsin 54-1255]
  misc_feature (1)..(427): SWISSPROT Homolog: EC 2.5.1.49 O-acetylhomoserine aminocarboxypropyltransferase
  misc_feature: Useful for introducing or modulating the production of volatile compounds
MAEDLSKNFETLQLHAGQEIDPTTNARAVPIYATTSFGFNDSAHGARLFGLKEFGNIYSRIMNPTVDVFEKRIAALEGGVAALAASSGQAAQFMTISALAHEGDNIVSTSNLYGGTYNQLKVMLPRFGIKTKFIDGDKPEDFAAAIDDRTKAVYIESIGNPRYNVPDFEAIAKVAHEKGVPVVVDNTFGAGGFFVRPIDHGADIVVHSATKWIGGHGTTIGGVIVDSGKFDWGANAARFPQMVEPSDGYHGLKFWETFGPITFIIRARVEILRDLGACLNPFAAQQLLIGIETLSLRAERHAQNALALAKYLESSPYVSWVSYPGLESHSSHEIAKRYLKRGFGGVLSFGVKGGGAAGSQIVDGFKIISNLANVGDSKTLAIHPWTTTHEQLSDEEKVSSGVSEDLIRISVGTEHIDDIIADFEQSFKKAAAANPDAGEKDAAPEAKKDEAPTVV

SEQ ID NO: 7148 - DNA, 3684 bp, Muscodor strobelii
  misc_feature: SGI EST ID NO. CUFF.17699.0
  misc_feature: Variant of the nucleotide sequence at SEQ ID NO 7146
ccgcgatgaaattattggagggtgatcactcaggctaaggtcgacaattacccattggcacgttcgagccgcattgactatagaatgtcaccgctccccttggatcgaccgcctaatatgggatgttttcgtgacggcttgttgtctcataattcgacctttcactcctttacgtgcgcttgatgaattgcttactttcgttcatttttcataccagagtgcatcgattgaaataattactgcttctgactatcgatcgagttgctcatttatcgttgtttaatcaaaaaccttcactcgtttgccaaaatgattgccagcaagatttccccgagaatcgtgatgtttggcctgcgagccgcacagttcacgtttgctttccttatcttgattctatcagcatatgttgcgaactggtaccgcgtggacgtaatgacctcgcctcctccgcagatcgactggtatctattcgtcgcattattcacgatcctcagtatcggatacctagagggaatttcgagatttgctccacgattatatcatccctatgccgcatttgccatcgaagtcgctatgcccctcttttattttgccggatttatttcgctagcgatatacttgcactatgtgaaccgctgccgatcgagcgtgtgcggtgcggctcggacggatgttgcatttggcgttttcgaagtactactttggagcacgacatccgcgatgatgggtcaggacatcttcaagaagggagtccgcaatccgaacgcaaaaggcccggtcacagttacgaacgcgaaagttgctgagatggcataggacgccacgaatcgtcaatcttcaacgaacgcgcgttgtttcatcatcagagacactgcgcgggaaaaagagtatgactggccgggtaaagctaagagcagatagaagcagtctgaattggtatatcggaatggaacaagctccgggaatagacgaggcttacaaccgcaacaacatgacatatgattcagaagaatatgattttgcgactcccatggaaagagaaagtcaagttgtctagatgtcaggcgtctggtctcacttaagagaaattttcgtattagtgaggcgtttgggaattgtgcagcaagaggactgcaatgagtatttgacataatggctcagcaaggtctgataacgaagactgtataaagtctagcctagtttaatcttacgattcagagaattaagaatttcaataatttcaagttgatcatgggaacggagttcctactagcgcaattggcgcatctcgtgtatacaccttgatgggaataacggcgctcggtcacgtcgcccggcttgtcttgtacttcggtgatccttcttcttcccgtccgccgatccgatgcccgttctcatacttccgccatgccggttgccaatgatgcctttcaggttgtgatttttgagtctaagtcaaccccgcactgcagtcgcgctagggaccgcgtcgaattctgcccctcatgaaacaatgttgagcgcaatgatggacttgcaaatgcaatggacagtgttcatgtattgtagattcgcataagaatacaaatcaaggcaggacggaagtaacaagacgatacctagtgggggttgaacaattatatcgcgtaattttagaacttttcagtccaaaagttctacccctcatccagaacagtatactcacctagatgacaagattatttgaaattaagtatgatcatccctagcatgcagcaatgtcaatatctctttgccatatcgggcgaccagaaaggcacgtcaatcccagcctgtaggtaccaatcagatgtatcgcctcaaggtggaaggttggcgtcgatggcgtgctcgaccccgccaaagtagcacattgtaatagtcaacgtttcttatcccatcgacgaataaggattctcccccacgatgacgcgagcgcgcggctttgtgccgagagcattattgaatgtgaccagagacgaatattctatgcttggcaggtaggccattgaggaacacttgaaggagagtttctcgggtctaatatagacggggatgtccttggatcatacttactcttggtcccctgatcccacttctatctgactcgtccagattttgacagcatcgagcttcgcggatatacccattcttcatagatctttgatagaaatattttgagatcagtaatcacacaatggcggaagacttgagcaagaactttgagactctccagctccacgcgggccaggagatagaccctaccacaaatgccagagcagtaccaatctatgccaccactagtttcggtttcaatgattcagctcacggcgccaggctgtttggccttaaagagttcggcaacatctacagccgtatcatgaatcctacagtcgatgtcttcgagaagcgaatcgcagccctcgaaggtggtgtagcagcacttgctgcatcttcaggtcaagctgcacagttcatgactatttcagctctggcacatgagggagacaacattgtgtcgacctctaacttatacggtggaacttacaaccagttaaaggttatgttacctcgcttcggtatcaagactaagttcatcgacggcgacaagcccgaggacttcgctgctgctatcgatgaccgcaccaaggctgtctacattgagagtattggtaatccgcgatacaacgtccccgacttcgaggccattgccaaggttgctcatgagaagggtgtccctgttgtggtcgacaacacttttggcgcgggcggtttctttgtgcgccccattgatcacggtgctgatatcgttgtccactcggcgacaaagtggattggtggacacggcacaacaattggtggtgtcattgtcgacagtggcaagtttgactggggcgccaacgctgcgcgttttccccagatggtcgagccatcggatggttaccacggattgaagttctgggagacttttggccccataactttcatcatacgcgcgcgagttgagatcctacgtgatctcggtgcttgcctgaacccattcgctgctcaacagctgctcatcggtatcgagacactgagtctacgtgccgagcgccatgcgcagaacgccctcgctctcgcaaagtacctcgaatcttcaccatacgtcagctgggtatcctacccaggtcttgagagccactcaagccacgagatcgccaagagatatctcaagcgtggattcggtggcgtgctgagcttcggtgtaaagggaggtggcgcggctggaagccaaatcgttgatggctttaagatcatttcaaacctcgccaacgttggtgactccaagacactagctatccacccctggacgacgacgcacgagcagctgagtgatgaagaaaaagtgagctctggtgtgtctgaagatctcatccgtatctcagttggtaccgagcacatagacgatatcattgccgattttgagcagtccttcaagaaggctgccgctgcaaacccggatgcaggcgagaaggatgctgcccctgaggctaagaaggacgaggcgcccactgttgtttagaggacatagtgaagtcttgaatccagtgtagaacgtagagcatttgagaaacgaacgtgtagttgaatgaatatataccccttcaattcaatcgttgggcg

SEQ ID NO: 7149 - DNA, 507 bp, Muscodor strobelii
  misc_feature: SGI cDNA ID NO. 562140
  misc_feature: Encodes the peptide sequence at SEQ ID NO 7150
atgattgccagcaagatttccccgagaatcgtgatgtttggcctgcgagccgcacagttcacgtttgctttccttatcttgattctatcagcatatgttgcgaactggtaccgcgtggacgtaatgacctcgcctcctccgcagatcgactggtatctattcgtcgcattattcacgatcctcagtatcggatacctagagggaatttcgagatttgctccacgattatatcatccctatgccgcatttgccatcgaagtcgctatgcccctcttttattttgccggatttatttcgctagcgatatacttgcactatgtgaaccgctgccgatcgagcgtgtgcggtgcggctcggacggatgttgcatttggcgttttcgaagtactactttggagcacgacatccgcgatgatgggtcaggacatcttcaagaagggagtccgcaatccgaacgcaaaaggcccggtcacagttacgaacgcgaaagttgctgagatggcatag

SEQ ID NO: 7150 - protein, 168 aa, Muscodor strobelii
  misc_feature: SGI Peptide ID NO. 562140
  misc_feature (11)..(146): NCBI GI: 145612537 Blast Desc: MGG_07196 [Magnaporthe grisea 70-15] gi|145019683|gb|EDK03911.1| MGG_07196 [Magnaporthe grisea 70-15]
  misc_feature (15)..(154): NCBI GI: 156059442 Blast Desc: SS1G_03733 [Sclerotinia sclerotiorum 1980] gi|154701520|gb|EDO01259.1| SS1G_03733 [Sclerotinia sclerotiorum 1980]
  misc_feature (15)..(147): NCBI GI: 154310180 Blast Desc: BC1G_07010 [Botryotinia fuckeliana B05.10] gi|150851571|gb|EDN26764.1| BC1G_07010 [Botryotinia fuckeliana B05.10]
  misc_feature (11)..(147): NCBI GI: 164428094 Blast Desc: NCU01653 [Neurospora crassa OR74A] gi|16944671|emb|CAB99180.2| [Neurospora crassa] gi|157072009|gb|EAA27039.2| [Neurospora crassa OR74A]
  misc_feature (9)..(165): NCBI GI: 171689114 Blast Desc: protein product [Podospora anserina] gi|170944519|emb|CAP70630.1| protein product [Podospora anserina]
  misc_feature (9)..(152): NCBI GI: 256730626 Blast Desc: NECHADRAFT_102337 [Nectria haematococca mpVI 77-13-4]
  misc_feature (9)..(152): NCBI GI: 46109072 Blast Desc: FG01418.1 [Gibberella zeae PH-1]
  misc_feature (15)..(137): NCBI GI: 242808012 Blast Desc: conserved [Talaromyces stipitatus ATCC 10500] gi|218715700|gb|EED15122.1| conserved [Talaromyces stipitatus ATCC 10500]
  misc_feature (11)..(131): NCBI GI: 239613528 Blast Desc: conserved [Ajellomyces dermatitidis ER-3]
  misc_feature (11)..(131): NCBI GI: 226282117 Blast Desc: conserved [Paracoccidioides brasiliensis Pb01]
MIASKISPRIVMFGLRAAQFTFAFLILILSAYVANWYRVDVMTSPPPQIDWYLFVALFTILSIGYLEGISRFAPRLYHPYAAFAIEVAMPLFYFAGFISLAIYLHYVNRCRSSVCGAARTDVAFGVFEVLLWSTTSAMMGQDIFKKGVRNPNAKGPVTVTNAKVAEMA

SEQ ID NO: 7151 - DNA, 3684 bp, Muscodor strobelii; identical to SEQ ID NO: 7148
  misc_feature: SGI EST ID NO. CUFF.17699.0
  misc_feature: Variant of the nucleotide sequence at SEQ ID NO 7149

SEQ ID NO: 7152 - DNA, 2115 bp, Muscodor strobelii
  misc_feature: SGI cDNA ID NO. 562141
  misc_feature: Encodes the peptide sequence at SEQ ID NO 7153
atggacaccaaaaccgctgccctcatcaaggagatatcgacaccgccgccgcccggttcgccctacgccgtccccatccccggcagcgagcgcgagggccgctctgccgtctaccgccattggcgattccacgacaagccgctgctgaccacctacaacccggagtggcgcaccttctacgacgtcttccagaacaccctgcagcgcttccccaacgccaactgcctgggctcgcggccctggaacccggccaccaagaaatgggagcccaagtacgtctggaagacgtatgctgaggtcgccgaacgcgccaagaacttcggctccggtgtctacgagcttcaccgccgcatcggtgtgcctcccggaaaccatggcgtgggactctggagccagaaccgcgaggaatggcagattgcagaccttggtttcatgtaccaatccatcttctccgtttctctctacgagaccttgggcccagacacttcggaatacatcatcaagcacgcagacctgaactgtgttgtgacctccttacctcatgtcccgctgctactggcccttgctcctcggatacccgccctcaagctgatcatatgcatggaccccctggatgcaggtgaacaggagggctattcgaagaaagccatgctcaatgcgcttgctgagaagcaaggcctgcagatttggtccatgactgatgtcgaagagctgggcgcaaaggtggcccatgccccacgccctcctcgtcctgaagacatcatcaccatcaattatacctctggcaccaccggagatcccaagggcgtagtcctgtcacatgccaactgtgttgcagctgtttcgaatgcccgctctaccggccaatacacggccaaggacaccaacatctcgtacctacctattgctcacatctacggacgactcatcgaccaggtagctctcgctgagggtgcttccgttggttacttccatggtgacatgcttgagctggtggaagacttgaagatcctcaggcctacgggatttccatcagtcccacggcttttcaatcgtttcagtacgggcatccgagcccaaacggtcgaggctgaaggtattcgaggtgccctctcccggagggtcgttgaaactaagaaggcgaacatgaaacttccgctcggaaaggcaacaaacaagcaccttgtgtacgaccgtatctggaccccgaaggtgcgggctgccgtgggtttggacaggtgtcgatccatggttagcggcagtgcattgctggatcctgaagttcaactattcctacgagctgcatttggcaacaacttcggctcgggctacggcttgaccgagtcgtatgccgccgcaacctgtcaaaccgaaggcgacttctcgatcggcaacaatggcggtcctatgcccggtcttgaaatatgtctcgaatcgcagccggatcttgagtatcttgtgactgacaagccacgaccacgtggagagcttctgctgagaggccctattatcttccgcgaataccataagaacgaagaggagaccaagaaggctcttgatccagatggatggttccacactggtgacattgccgagattgatgagttgggccgtatgaagatcattgaccgcaagaagaacgtgctcaagctctctcagggcgagtatatctcacccgagcgcatcgagaatgtgtatatgggtagctctggcttgattgctatggcctttgtccatggtgaaggatctcaatcggctctagttggtatctttggtgtggaccccgtggccttcggaccattcgcaagtaagatcttgaagaagaccgttgctcctgaagacttgcccgccatcaaggctgccgccaaagacccgcgggttatccaggccttcttgaaacacctcgatactatcagcaagaagaacaagttcaatggctacgagcgcgtacgcaactgtgtcttggatgtcgagccattttcgattgaaaacgagttgctaacccctactctcaaattgaagcggccccaaaccgtgaggaaattcaaggctgaaatcgagcagatgtatgccgagatcaacgaggaagcctcgaagataaaaccaaaactttag

SEQ ID NO: 7153 - protein, 704 aa, Muscodor strobelii
  misc_feature: SGI Peptide ID NO. 562141
  misc_feature (96)..(578): Pfam Id: PF00501 Pfam Desc: AMP-binding enzyme
  misc_feature (411)..(578): Pfam Id: PF00501 Pfam Desc: AMP-binding enzyme
  misc_feature (96)..(353): Pfam Id: PF00501 Pfam Desc: AMP-binding enzyme
  misc_feature (5)..(704): NCBI GI: 171689116 Blast Desc: protein product [Podospora anserina] gi|170944520|emb|CAP70631.1| protein product [Podospora anserina]
  misc_feature (6)..(704): NCBI GI: 256730848 Blast Desc: [Nectria haematococca mpVI 77-13-4]
  misc_feature (5)..(704): NCBI GI: 116204907 Blast Desc: CHGG_10337 [Chaetomium globosum CBS 148.51] gi|88176465|gb|EAQ83933.1| CHGG_10337 [Chaetomium globosum CBS 148.51]
  misc_feature (5)..(698): NCBI GI: 261354491 Blast Desc: long-chain-fatty-acid-CoA ligase [Verticillium albo-atrum VaMs.102]
  misc_feature (5)..(704): NCBI GI: 9368951 Blast Desc: related to long-chain-fatty-acid--CoA ligase FAA2 [Neurospora crassa]
  misc_feature (10)..(704): NCBI GI: 46109074 Blast Desc: FG01419.1 [Gibberella zeae PH-1]
  misc_feature (5)..(704): NCBI GI: 85079027 Blast Desc: NCU01654 [Neurospora crassa OR74A] gi|28917332|gb|EAA27040.1| NCU01654 [Neurospora crassa OR74A]
  misc_feature (9)..(692): NCBI GI: 156059446 Blast Desc: SS1G_03735 [Sclerotinia sclerotiorum 1980] gi|154701522|gb|EDO01261.1| SS1G_03735 [Sclerotinia sclerotiorum 1980]
  misc_feature (7)..(696): NCBI GI: 39971763 Blast Desc: MGG_07197 [Magnaporthe grisea 70-15] gi|145019685|gb|EDK03913.1| MGG_07197 [Magnaporthe grisea 70-15]
  misc_feature (9)..(670): NCBI GI: 154310186 Blast Desc: BC1G_07013 [Botryotinia fuckeliana B05.10] gi|150851574|gb|EDN26767.1| BC1G_07013 [Botryotinia fuckeliana B05.10]
  misc_feature (48)..(691): SWISSPROT Homolog: EC 6.2.1.3 Long-chain-fatty-acid--CoA ligase
MDTKTAALIKEISTPPPPGSPYAVPIPGSEREGRSAVYRHWRFHDKPLLTTYNPEWRTFYDVFQNTLQRFPNANCLGSRPWNPATKKWEPKYVWKTYAEVAERAKNFGSGVYELHRRIGVPPGNHGVGLWSQNREEWQIADLGFMYQSIFSVSLYETLGPDTSEYIIKHADLNCVVTSLPHVPLLLALAPRIPALKLIICMDPLDAGEQEGYSKKAMLNALAEKQGLQIWSMTDVEELGAKVAHAPRPPRPEDIITINYTSGTTGDPKGVVLSHANCVAAVSNARSTGQYTAKDTNISYLPIAHIYGRLIDQVALAEGASVGYFHGDMLELVEDLKILRPTGFPSVPRLFNRFSTGIRAQTVEAEGIRGALSRRVVETKKANMKLPLGKATNKHLVYDRIWTPKVRAAVGLDRCRSMVSGSALLDPEVQLFLRAAFGNNFGSGYGLTESYAAATCQTEGDFSIGNNGGPMPGLEICLESQPDLEYLVTDKPRPRGELLLRGPIIFREYHKNEEETKKALDPDGWFHTGDIAEIDELGRMKIIDRKKNVLKLSQGEYISPERIENVYMGSSGLIAMAFVHGEGSQSALVGIFGVDPVAFGPFASKILKKTVAPEDLPAIKAAAKDPRVIQAFLKHLDTISKKNKFNGYERVRNCVLDVEPFSIENELLTPTLKLKRPQTVRKFKAEIEQMYAEINEEASKIKPKL

SEQ ID NO: 7154 - DNA, 2770 bp, Muscodor strobelii
  misc_feature: SGI EST ID NO. CUFF.17826.0
  misc_feature: Variant of the nucleotide sequence at SEQ ID NO 7152
atccaagattcaacggcgtcgcggagaccccagagtggatcgccgagccataagccaatgaagtcgtcgttccaagtcattcagctccatcaaaatgctaaatggtccgaggtcaagatccatctgggcactcaaatgggctagatagcacgaaagctaaagggtatgaccaagtcagatgcagcaaaagcctcggcctgcttgcggatcggccaagggttatcctgtgctaagtagatgcaaactgcggcagcatatcactgagcggtcatcagcattcatcctcgcttcattgaccagagctgtgtgtctcgtcgtttgtctgtcgtcgaaaagccctataattgactgatccattaattttcaacgagcaatcctcaaactgacaagatcctcaacgcgcagatctcgggtagcgctggaacatcttgtcacacgtcagccttagtcaacgcgcgccattggctctgcagctgccggcaacctctcgacaaccatggacaccaaaaccgctgccctcatcaaggagatatcgacaccgccgccgcccggttcgccctacgccgtccccatccccggcagcgagcgcgagggccgctctgccgtctaccgccattggcgattccacgacaagccgctgctgaccacctacaacccggagtggcgcaccttctacgacgtcttccagaacaccctgcagcgcttccccaacgccaactgcctgggctcgcggccctggaacccggccaccaagaaatgggagcccaagtacgtctggaagacgtatgctgaggtcgccgaacgcgccaagaacttcggctccggtgtctacgagcttcaccgccgcatcggtgtgcctcccggaaaccatggcgtgggactctggagccagaaccgcgaggaatggcagattgcagaccttggtttcatgtaccaatccatcttctccgtttctctctacgagaccttgggcccagacacttcggaatacatcatcaagcacgcagacctgaactgtgttgtgacctccttacctcatgtcccgctgctactggcccttgctcctcggatacccgccctcaagctgatcatatgcatggaccccctggatgcaggtgaacaggagggctattcgaagaaagccatgctcaatgcgcttgctgagaagcaaggcctgcagatttggtccatgactgatgtcgaagagctgggcgcaaaggtggcccatgccccacgccctcctcgtcctgaagacatcatcaccatcaattatacctctggcaccaccggagatcccaagggcgtagtcctgtcacatgccaactgtgttgcagctgtttcgaatgcccgctctaccggccaatacacggccaaggacaccaacatctcgtacctacctattgctcacatctacggacgactcatcgaccaggtagctctcgctgagggtgcttccgttggttacttccatggtgacatgcttgagctggtggaagacttgaagatcctcaggcctacgggatttccatcagtcccacggcttttcaatcgtttcagtacgggcatccgagcccaaacggtcgaggctgaaggtattcgaggtgccctctcccggagggtcgttgaaactaagaaggcgaacatgaaacttccgctcggaaaggcaacaaacaagcaccttgtgtacgaccgtatctggaccccgaaggtgcgggctgccgtgggtttggacaggtgtcgatccatggttagcggcagtgcattgctggatcctgaagttcaactattcctacgagctgcatttggcaacaacttcggctcgggctacggcttgaccgagtcgtatgccgccgcaacctgtcaaaccgaaggcgacttctcgatcggcaacaatggcggtcctatgcccggtcttgaaatatgtctcgaatcgcagccggatcttgagtatcttgtgactgacaagccacgaccacgtggagagcttctgctgagaggccctattatcttccgcgaataccataagaacgaagaggagaccaagaaggctcttgatccagatggatggttccacactggtgacattgccgagattgatgagttgggccgtatgaagatcattgaccgcaagaagaacgtgctcaagctctctcagggcgagtatatctcacccgagcgcatcgagaatgtgtatatgggtagctctggcttgattgctatggcctttgtccatggtgaaggatctcaatcggctctagttggtatctttggtgtggaccccgtggccttcggaccattcgcaagtaagatcttgaagaagaccgttgctcctgaagacttgcccgccatcaaggctgccgccaaagacccgcgggttatccaggccttcttgaaacacctcgatactatcagcaagaagaacaagttcaatggctacgagcgcgtacgcaactgtgtcttggatgtcgagccattttcgattgaaaacgagttgctaacccctactctcaaattgaagcggccccaaaccgtgaggaaattcaaggctgaaatcgagcagatgtatgccgagatcaacgaggaagcctcgaagataaaaccaaaactttagacgtagacgggtgggctcgagctatatcaaatgatatttgtaatgtatttgtgtataaagttaaaagaccgaagccacgcatagacaggcttcaactgcatgcagcatagcaatgaattgaccaatcattttcagttaggcttcaaaacaggccttcca

SEQ ID NO: 7155 - DNA, 3819 bp, Muscodor strobelii
  misc_feature: SGI cDNA ID NO. 562142
  misc_feature: Encodes the peptide sequence at SEQ ID NO 7156
atggcggcgccgccgccgtctatcctttccccagggaacaatttgattgatttgacgagtgacaccgacccagatgacaaggctgctcctggcggccgcaagtcggcaacgtcgcgccctgcgatcaagcatgctccctcaccacctccatcgaccctctatcctccctcgatcagcaacagacaacatggcagccatgagcataacggggaagccgtactaccctctcgcccaatgaagcgacgaaaaatcgagaccgatacgacgacatccccgcctatcaagaaggaagccagtcctaatgtgaccgcgaccctgacaaagtgcctgaaggaacaggtctttcctcacctcgaaagagccaccaaaagccttgcggaaggcgcgtacgacctggacaagctgggtgctaaggccacccggcttctggtcgacaatgagttcgtccgcaactttcacaagggaggcgggcggctggacgctgccttggaaagcatagtagcagcgcgttgccacaggatcgtcatcgagctgtccttgaagccagagtatcaactgcgtagacagacatcagctcgaaacaccttgccgaccaaccaagccaatggtgctgtgcaagcatccgcgactgtaccgcctagaccttccgtcataccttcgatcgagacagagcacgtggatggcgaacaaatcaaggacgaggatagttctgaagacgagaaaaaggcatctttcgatgattatgaaggcgatgacgacggggaggcggatgatgaagaagactacaaagacgaggaaggtgcggtcagcactgggagtgcgcaccctcaagacgcgcattgcattagaccgccaaaacatcctccaacgcgtcttgcccatcagctcccaaccacaagaccatccaaaaaattgaatataacatcgccgcaaaaactccgcgcaaaagtaaaggcaaagcagtggcaatcgaataaatctttccaatcctcgccatttgcttcgtcgactccagcagctgcatccacgactcttcctccccgcccttatctgcctgggcaagtacggcgacagatcgttaaaggtgttacacacagtgtccaatctcctgcattgagcggattaccccgtgctcaaaaattccatgtcgacttcagtgctgctgaaattgggtttctccagtctttggctagaaaactgtacggaagacccagtatcgatggtgctcggtcgacgttgcgagacctgcgcaacgtaatgaagaaggcacccgatatgaagtcgcgcctcattgaaattcaccaaacggagtacaatggcttcgaccctcctccctcgtcactgctgaggcggtcatcccccgacctgaagagttttttggatgatttatacaccaagaagctcaactcgactcctatgtcactttcgatcgagaaaagcgacccagtcagtcgaagcgaaatcacccgagccaaccgcattccatctctgcttctgtcacgagagattggtggcaatcgacttggagcaacacggacctatgtcaacttaaagaccgcagccaggagcaacttggaagactatctcgaacctaaggtggaatggaccaactgtgcaggcgacatcatgacaatcagctggatttctggttcagaattcatctgcggtgccacaacccattcagactctcataatcagcagtacaacaaacctggaaaccttttgctgggctcagcaagctcgcagagcttgcaggcctacccggaccatcggatcgtgcgtccgcttgtcgcaacaggggacaatgctctagagtcgatggttgcgagtcaagatccgtggcttttcacatccgtggtgtcctccgattatgatccgatccgcgacctagcctatacatccagcttcgacaagaccgtaaaggtttggagaccggctgggacttccatgtcagctattggtacatgggagcacggtgggcgtgtcaatttcgtccttgcatcgaagaatcccgacgtaggggtcgtggccactgccgctgatgtgccaaccgaagctgtgagagtctacacaattgaagagtctgatgtacctaatagtccgtatgcatcatattcctgtacgagagttcaagatgaagattatgtcccctcggataaatgggcctattatccagctgctattcgatggggcctcgccgacgatgtacgacacttacttcttatcggatattcacccagaagcccaagcggggaggaccacgaaatcccggaagataaaacggataccggagaactatgcttatgggacaccaacaccaactcaatggtcaaagtcaacagtgcgaagacacaaaacgtcttcgaggtcgcatggcacccttcccgtgcgtgtttcgctgccgctacttcagcctcccaagtcttggagaagacggatcgatccgccagaacgcaaatacgcatttttgagaggaatatagaccttgaagaatggtatttcagtgccataaagacactggattgtgcggctgttgacattaatgagctgtcgattatgcctaattctttcatgttttcttatgtggccgcgggctgtactgatggaaaagtgtacgtgtgggatacagctgcaagcgacctgccaatgtgtatattagagcacggtgaacctgtcgaggagcttttaggcgagcgagagacagaagatgtcggtgtcaaattcaccgcttgggcaactaccgctgatcgactttacaccggctcgtcggatggggtgctgaaagtgtggaatgtacgccatgacaaaggcgaactcgttaaagagctgctcgaagtcgcagcacctattacatgtggtgcattttctccggattattccaagctggtaattggagacggtagtggccgggtctatctgctagcgttagaagaccccgaagtcgaggaaaagccgacaagctcagcggctggcttctttaacgtccaactaaacggaaagcggcgttcaattcgacggccgcgcccctttactccccatccggagctaccgcctcctgacgccgatcaaaaacctcgatttccagatcttatgaaaggccaagcaagagctcgtgaatttctaggcgctcgcgagatagagattcatcctaatcccgttataggcgccgtccaggggccgttttattcataccgaggccctcatcgccttgaagcacacgtgattcaagataaaaccatgccattattaccgatattcgaagaacagcaacagataaatcaagaccgctgtccaccatctcctattctacgccaagcacgttatgaacgctcattattacgctggccatcccatgatttaggcagccccgactatcttagctttaaagcgctgggggctttgatgacggaaagggccgagctagacgatcgcttgatcgaattcgactatgagaccagtataccggatagcgacgaggaaaacgacgacgagagtagtgaggagaagaacaccgaagaggaggaaagcaacgacgatagtgacgaggaagacatcgataatagcaacggagaagacaataacgagggaagcaatgaagccagcagtagggaaaacgatgacgagcaggacttgaacggtagttttagatggagtccaagtctagagaaaacagggacagatccgcagcctcacgatgtgagagatgaggatggagatatcgaatgggcatcgagtccgcagactacgcaactagggcaggagcaaataggtcccggacagacccagtggaagtggcctcggttaccgccatttttttaa

SEQ ID NO: 7156 - protein, 1272 aa, Muscodor strobelii
  misc_feature: SGI Peptide ID NO. 562142
  misc_feature (302)..(1091): NCBI GI: 16944673 Blast Desc: conserved [Neurospora crassa]
  misc_feature (302)..(1091): NCBI GI: 164428096 Blast Desc: NCU01656 [Neurospora crassa OR74A] gi|157072010|gb|EAA27042.2| [Neurospora crassa OR74A]
  misc_feature (348)..(1091): NCBI GI: 256730847 Blast Desc: NECHADRAFT_74336 [Nectria haematococca mpVI 77-13-4]
  misc_feature (381)..(1091): NCBI GI: 171689092 Blast Desc: protein product [Podospora anserina] gi|170944508|emb|CAP70619.1| protein product [Podospora anserina]
  misc_feature (300)..(1107): NCBI GI: 261354495 Blast Desc: WD repeat-containing protein [Verticillium albo-atrum VaMs.102]
  misc_feature (348)..(1094): NCBI GI: 46109076 Blast Desc: FG01420.1 [Gibberella zeae PH-1]
  misc_feature (348)..(1103): NCBI GI: 156063066 Blast Desc: SS1G_01649 [Sclerotinia sclerotiorum 1980] gi|154696985|gb|EDN96723.1| SS1G_01649 [Sclerotinia sclerotiorum 1980]
  misc_feature (533)..(1151): NCBI GI: 154293005 Blast Desc: BC1G_14771 [Botryotinia fuckeliana B05.10] gi|150845675|gb|EDN20868.1| BC1G_14771 [Botryotinia fuckeliana B05.10]
  misc_feature (460)..(1027): NCBI GI: 116204909 Blast Desc: CHGG_10338 [Chaetomium globosum CBS 148.51] gi|88176466|gb|EAQ83934.1| CHGG_10338 [Chaetomium globosum CBS 148.51]
  misc_feature (348)..(1114): NCBI GI: 145612541 Blast Desc: MGG_07198 [Magnaporthe grisea 70-15] gi|145019686|gb|EDK03914.1| MGG_07198 [Magnaporthe grisea 70-15]
MAAPPPSILSPGNNLIDLTSDTDPDDKAAPGGRKSATSRPAIKHAPSPPPSTLYPPSISNRQHGSHEHNGEAVLPSRPMKRRKIETDTTTSPPIKKEASPNVTATLTKCLKEQVFPHLERATKSLAEGAYDLDKLGAKATRLLVDNEFVRNFHKGGGRLDAALESIVAARCHRIVIELSLKPEYQLRRQTSARNTLPTNQANGAVQASATVPPRPSVIPSIETEHVDGEQIKDEDSSEDEKKASFDDYEGDDDGEADDEEDYKDEEGAVSTGSAHPQDAHCIRPPKHPPTRLAHQLPTTRPSKKLNITSPQKLRAKVKAKQWQSNKSFQSSPFASSTPAAASTTLPPRPYLPGQVRRQIVKGVTHSVQSPALSGLPRAQKFHVDFSAAEIGFLQSLARKLYGRPSIDGARSTLRDLRNVMKKAPDMKSRLIEIHQTEYNGFDPPPSSLLRRSSPDLKSFLDDLYTKKLNSTPMSLSIEKSDPVSRSEITRANRIPSLLLSREIGGNRLGATRTYVNLKTAARSNLEDYLEPKVEWTNCAGDIMTISWISGSEFICGATTHSDSHNQQYNKPGNLLLGSASSQSLQAYPDHRIVRPLVATGDNALESMVASQDPWLFTSVVSSDYDPIRDLAYTSSFDKTVKVWRPAGTSMSAIGTWEHGGRVNFVLASKNPDVGVVATAADVPTEAVRVYTIEESDVPNSPYASYSCTRVQDEDYVPSDKWAYYPAAIRWGLADDVRHLLLIGYSPRSPSGEDHEIPEDKTDTGELCLWDTNTNSMVKVNSAKTQNVFEVAWHPSRACFAAATSASQVLEKTDRSARTQIRIFERNIDLEEWYFSAIKTLDCAAVDINELSIMPNSFMFSYVAAGCTDGKVYVWDTAASDLPMCILEHGEPVEELLGERETEDVGVKFTAWATTADRLYTGSSDGVLKVWNVRHDKGELVKELLEVAAPITCGAFSPDYSKLVIGDGSGRVYLLALEDPEVEEKPTSSAAGFFNVQLNGKRRSIRRPRPFTPHPELPPPDADQKPRFPDLMKGQARAREFLGAREIEIHPNPVIGAVQGPFYSYRGPHRLEAHVIQDKTMPLLPIFEEQQQINQDRCPPSPILRQARYERSLLRWPSHDLGSPDYLSFKALGALMTERAELDDRLIEFDYETSIPDSDEENDDESSEEKNTEEEESNDDSDEEDIDNSNGEDNNEGSNEASSRENDDEQDLNGSFRWSPSLEKTGTDPQPHDVRDEDGDIEWASSPQTTQLGQEQIGPGQTQWKWPRLPPFF

SEQ ID NO: 7157 - DNA, 3919 bp, Muscodor strobelii
  misc_feature: SGI EST ID NO. CUFF.17725.0
  misc_feature: Variant of the nucleotide sequence at SEQ ID NO 7155
cgacaccttatacacgccgccttgtcacgatgtcaagatggcggcgccgccgccgtctatcctttccccagggaacaatttgattgatttgacgagtgacaccgacccagatgacaaggctgctcctggcggccgcaagtcggcaacgtcgcgccctgcgatcaagcatgctccctcaccacctccatcgaccctctatcctccctcgatcagcaacagacaacatggcagccatgagcataacggggaagccgtactaccctctcgcccaatgaagcgacgaaaaatcgagaccgatacgacgacatccccgcctatcaagaaggaagccagtcctaatgtgaccgcgaccctgacaaagtgcctgaaggaacaggtctttcctcacctcgaaagagccaccaaaagccttgcggaaggcgcgtacgacctggacaagctgggtgctaaggccacccggcttctggtcgacaatgagttcgtccgcaactttcacaagggaggcgggcggctggacgctgccttggaaagcatagtagcagcgcgttgccacaggatcgtcatcgagctgtccttgaagccagagtatcaactgcgtagacagacatcagctcgaaacaccttgccgaccaaccaagccaatggtgctgtgcaagcatccgcgactgtaccgcctagaccttccgtcataccttcgatcgagacagagcacgtggatggcgaacaaatcaaggacgaggatagttctgaagacgagaaaaaggcatctttcgatgattatgaaggcgatgacgacggggaggcggatgatgaagaagactacaaagacgaggaaggtgcggtcagcactgggagtgcgcaccctcaagacgcgcattgcattagaccgccaaaacatcctccaacgcgtcttgcccatcagctcccaaccacaagaccatccaaaaaattgaatataacatcgccgcaaaaactccgcgcaaaagtaaaggcaaagcagtggcaatcgaataaatctttccaatcctcgccatttgcttcgtcgactccagcagctgcatccacgactcttcctccccgcccttatctgcctgggcaagtacggcgacagatcgttaaaggtgttacacacagtgtccaatctcctgcattgagcggattaccccgtgctcaaaaattccatgtcgacttcagtgctgctgaaattgggtttctccagtctttggctagaaaactgtacggaagacccagtatcgatggtgctcggtcgacgttgcgagacctgcgcaacgtaatgaagaaggcacccgatatgaagtcgcgcctcattgaaattcaccaaacggagtacaatggcttcgaccctcctccctcgtcactgctgaggcggtcatcccccgacctgaagagttttttggatgatttatacaccaagaagctcaactcgactcctatgtcactttcgatcgagaaaagcgacccagtcagtcgaagcgaaatcacccgagccaaccgcattccatctctgcttctgtcacgagagattggtggcaatcgacttggagcaacacggacctatgtcaacttaaagaccgcagccaggagcaacttggaagactatctcgaacctaaggtggaatggaccaactgtgcaggcgacatcatgacaatcagctggatttctggttcagaattcatctgcggtgccacaacccattcagactctcataatcagcagtacaacaaacctggaaaccttttgctgggctcagcaagctcgcagagcttgcaggcctacccggaccatcggatcgtgcgtccgcttgtcgcaacaggggacaatgctctagagtcgatggttgcgagtcaagatccgtggcttttcacatccgtggtgtcctccgattatgatccgatccgcgacctagcctatacatccagcttcgacaagaccgtaaaggtttggagaccggctgggacttccatgtcagctattggtacatgggagcacggtgggcgtgtcaatttcgtccttgcatcgaagaatcccgacgtaggggtcgtggccactgccgctgatgtgccaaccgaagctgtgagagtctacacaattgaagagtctgatgtacctaatagtccgtatgcatcatattcctgtacgagagttcaagatgaagattatgtcccctcggataaatgggcctattatccagctgctattcgatggggcctcgccgacgatgtacgacacttacttcttatcggatattcacccagaagcccaagcggggaggaccacgaaatcccggaagataaaacggataccggagaactatgcttatgggacaccaacaccaactcaatggtcaaagtcaacagtgcgaagacacaaaacgtcttcgaggtcgcatggcacccttcccgtgcgtgtttcgctgccgctacttcagcctcccaagtcttggagaagacggatcgatccgccagaacgcaaatacgcatttttgagaggaatatagaccttgaagaatggtatttcagtgccataaagacactggattgtgcggctgttgacattaatgagctgtcgattatgcctaattctttcatgttttcttatgtggccgcgggctgtactgatggaaaagtgtacgtgtgggatacagctgcaagcgacctgccaatgtgtatattagagcacggtgaacctgtcgaggagcttttaggcgagcgagagacagaagatgtcggtgtcaaattcaccgcttgggcaactaccgctgatcgactttacaccggctcgtcggatggggtgctgaaagtgtggaatgtacgccatgacaaaggcgaactcgttaaagagctgctcgaagtcgcagcacctattacatgtggtgcattttctccggattattccaagctggtaattggagacggtagtggccgggtctatctgctagcgttagaagaccccgaagtcgaggaaaagccgacaagctcagcggctggcttctttaacgtccaactaaacggaaagcggcgttcaattcgacggccgcgcccctttactccccatccggagctaccgcctcctgacgccgatcaaaaacctcgatttccagatcttatgaaaggccaagcaagagctcgtgaatttctaggcgctcgcgagatagagattcatcctaatcccgttataggcgccgtccaggggccgttttattcataccgaggccctcatcgccttgaagcacacgtgattcaagataaaaccatgccattattaccgatattcgaagaacagcaacagataaatcaagaccgctgtccaccatctcctattctacgccaagcacgttatgaacgctcattattacgctggccatcccatgatttaggcagccccgactatcttagctttaaagcgctgggggctttgatgacggaaagggccgagctagacgatcgcttgatcgaattcgactatgagaccagtataccggatagcgacgaggaaaacgacgacgagagtagtgaggagaagaacaccgaagaggaggaaagcaacgacgatagtgacgaggaagacatcgataatagcaacggagaagacaataacgagggaagcaatgaagccagcagtagggaaaacgatgacgagcaggacttgaacggtagttttagatggagtccaagtctagagaaaacagggacagatccgcagcctcacgatgtgagagatgaggatggagatatcgaatgggcatcgagtccgcagactacgcaactagggcaggagcaaataggtcccggacagacccagtggaagtggcctcggttaccgccatttttttaattcaagctagaattttatcatgctttaacgttgctattgctagaaataaagattattactttt

SEQ ID NO: 7158 - DNA, 2094 bp, Muscodor strobelii
  misc_feature: SGI cDNA ID NO. 562143
  misc_feature: Encodes the peptide sequence at SEQ ID NO 7159
atgacgtctgcagtaacagaactagaggctggcttgaatgccatgcagaacctgaagccccctggagtatctggatctcgtattagctcattgacggccctgtgcattagcaatgtccagtccgagtctgtacttattcagaagatctacactcacttcaagaaggctccagccactcacaaattgggagtactctatgtcgtagattccgtaactcgcaagtgggttgaccaggccaagcaacacaaccaacccatcaatagctctgcacaagacggcactttcgccgccggcgtccatagagtgacggaactgctaccagttttgatgaatgacataatccagaatgccccaggagaacaaaaggagaaaataaagaagctcgttgacatctgggagaaaggccagacattcccactggccatgattgagtccttcaaacagaagctgaatgcaccagtccctaaagttgagtcgaccactccggctggtagccctccccctggtcctggattgccgggtttggcagacgcaaaaccatccgctgccgaggcatcaaatgcaatcatggaagcactcgccaacatcgctcgacagaacgtcagcgcagcacccgccagcaactctgttcctcctgcagccaacccttatagtagaccacacgcacagcagcctgtgcagctaccgatcacacagagtcaaagcccagctgtagcttctacccccttctcagccccacaaccgccgagtatgcccttccaataccctccacagccccagctccaagctcaggccccggttcagagtcaagccttcatgcctccggtcacagcgagcaaccaacctccggcctatcctggatacacacccggtccacagccacaggctcctgcaccggctcccgctgctggcttagaccctaatgtccagcaacaagtgatgctgatcaagttgctggcggaccaaggtgtcccggttgacaagattcctatgattattgctggaattcagaatcagaacaatgctgctcccccagcctcagccccacaatacccccctcagcctcagatccagcctggccaacagccgtatggtaattcatggggccaagatggatttcggcaggaagagtcgcgtgaacgtaacttcaaccaggtgagatcaccacctagatatcgtgacagatctcgatcacgatcacccccgcgtcaatgggaccagcgagacgctgctcgcggccgtgactttggcagctatggccacaattcgcccggaggtgggcgcatggaagatcgtgatcaccgtggtagaggaagcgagtatcgccagcgtagtccaccaggacgtcgcggccggagtccgacacctccccagaatttcacacagcctggaggtccgaaatgggtcgatttcgacaggactgtgcccgccggtcatatcaaggtgctgagccgaaccctctttgttggaggtgtcacatgttccgaggctgaacttcggtcaatcttcaatcgccacggcgaagtacagacttgcattgttaacacggacaaacgtcacgctttcgtgaaaatggttacacgtagagatgctgtcgctgccaaggatgccatgcagaatgggtcatatagaacccgctggggagttggtttcggtcctcgtgactgcagcgactatcagactggcattagtatcattcctatctcgaagttgactgaagctgatcgaaaatggatgttgactgccgactacggtggcagtggtggtcaaccgatcgagacaggcatggttgttgaagagcctgatatcgagattggcgcaggtgtctcatccaaggcgatcagccgacgcatgcagacggacaaaggtggaagacatggtccgaaatcaagtcgtggaggtgacgaggatgacttcggcggcggtcgctggcagaacaagagaaacttccaacaggataatcaccacaacgaggtaacccctggccagctcgaagtcgaacagcttcccttcggcatcacgaccggacccaacggcatgcctatctttcctcccggcttcgttttccccggtcccgatcagtacagcaactag

SEQ ID NO: 7159 - protein, 697 aa, Muscodor strobelii
  misc_feature: SGI Peptide ID NO. 562143
  misc_feature (487)..(549): Pfam Id: PF00076 Pfam Desc: RNA recognition motif. (a.k.a. RRM, RBD, or RNP domain)
  misc_feature (487)..(540): Pfam Id: PF00076 Pfam Desc: RNA recognition motif. (a.k.a. RRM, RBD, or RNP domain)
  misc_feature (1)..(692): NCBI GI: 46109084 Blast Desc: FG01424.1 [Gibberella zeae PH-1]
  misc_feature (1)..(689): NCBI GI: 156063020 Blast Desc: SS1G_01626 [Sclerotinia sclerotiorum 1980] gi|154696962|gb|EDN96700.1| SS1G_01626 [Sclerotinia sclerotiorum 1980]
  misc_feature (3)..(689): NCBI GI: 16944439 Blast Desc: related to NRD1 protein [Neurospora crassa]
  misc_feature (5)..(691): NCBI GI: 116204911 Blast Desc: CHGG_10339 [Chaetomium globosum CBS 148.51] gi|88176467|gb|EAQ83935.1| CHGG_10339 [Chaetomium globosum CBS 148.51]
  misc_feature (1)..(691): NCBI GI: 67902578 Blast Desc: AN8276.2 [Aspergillus nidulans FGSC A4] gi|40739824|gb|EAA59014.1| AN8276.2 [Aspergillus nidulans FGSC A4] gi|259481067|tpe|CBF74261.1| TPA: RNA binding protein Nrd1,
  misc_feature (1)..(691): NCBI GI: 169776617 Blast Desc: [Aspergillus oryzae RIB40] gi|83771510|dbj|BAE61642.1| protein product [Aspergillus oryzae]
  misc_feature (1)..(691): NCBI GI: 212537877 Blast Desc: RNA binding protein Nrd1, [Penicillium marneffei ATCC 18224] gi|210068836|gb|EEA22927.1| RNA binding protein Nrd1, [Penicillium marneffei ATCC 18224]
  misc_feature (1)..(656): NCBI GI: 225554611 Blast Desc: conserved [Ajellomyces capsulatus G186AR]
  misc_feature (34)..(689): NCBI GI: 164428124 Blast Desc: NCU01695 [Neurospora crassa OR74A] gi|157072021|gb|EAA27665.2| conserved [Neurospora crassa OR74A]
  misc_feature (1)..(656): NCBI GI: 240276958 Blast Desc: RNA binding protein Nrd1 [Ajellomyces capsulatus H143]
MTSAVTELEAGLNAMQNLKPPGVSGSRISSLTALCISNVQSESVLIQKIYTHFKKAPATHKLGVLYVVDSVTRKWVDQAKQHNQPINSSAQDGTFAAGVHRVTELLPVLMNDIIQNAPGEQKEKIKKLVDIWEKGQTFPLAMIESFKQKLNAPVPKVESTTPAGSPPPGPGLPGLADAKPSAAEASNAIMEALANIARQNVSAAPASNSVPPAANPYSRPHAQQPVQLPITQSQSPAVASTPFSAPQPPSMPFQYPPQPQLQAQAPVQSQAFMPPVTASNQPPAYPGYTPGPQPQAPAPAPAAGLDPNVQQQVMLIKLLADQGVPVDKIPMIIAGIQNQNNAAPPASAPQYPPQPQIQPGQQPYGNSWGQDGFRQEESRERNFNQVRSPPRYRDRSRSRSPPRQWDQRDAARGRDFGSYGHNSPGGGRMEDRDHRGRGSEYRQRSPPGRRGRSPTPPQNFTQPGGPKWVDFDRTVPAGHIKVLSRTLFVGGVTCSEAELRSIFNRHGEVQTCIVNTDKRHAFVKMVTRRDAVAAKDAMQNGSYRTRWGVGFGPRDCSDYQTGISIIPISKLTEADRKWMLTADYGGSGGQPIETGMVVEEPDIEIGAGVSSKAISRRMQTDKGGRHGPKSSRGGDEDDFGGGRWQNKRNFQQDNHHNEVTPGQLEVEQLPFGITTGPNGMPIFPPGFVFPGPDQYSN

SEQ ID NO: 7160 - DNA, 3731 bp, Muscodor strobelii
  misc_feature: SGI EST ID NO. CUFF.17775.0
  misc_feature: Variant of the nucleotide sequence at SEQ ID NO 7158
cacctctctttcctcccccatcttgatcctgcctttcccatctgcgtcgccgtcaccacttgcacgcaccacgacaataaccaccaactgcggcaccttcaaaacatcttcatccatcatcgccataccatcaccgttgtaagcatcatcgtccgtgggtcccgcgcgccactttgattctcgtcagcatcaccagggacgatttcgcgaccgacccacacagctcgccacttggtcgcatcactccggttaagattgaagggactctcgtcgcacaaccaccagcaccagcaccgcctttaccatcattagtatatcaccgtgggcaagtcccgctctgactctgcctgcggaccaagtaaaacaatcagacactattattcaagcgtgtctcctgccgctgttacctttctgacgtaccgtctgtttcttgcgccatctctgctgcgcctgtagctcgaggacgtttgtgcaacagcattgcgacgacttcactctggtagagtagacttgacttcgcaggccgtaacagctctactacctgttctcgtacaattccaattgcagtagtcgcctgcttgctagagacctcatctcatctgccgcggtgacaattgacgcgccgtcgcgcgcttgatttgcaggtcttgcgatcccgtacttgtcttgctgcatgctttgcgtcgccttgcgtcttcatcagtagtcaagagaagagagatagcacgcacacaaggccaccatgacgtctgcagtaacagaactagaggctggcttgaatgccatgcagaacctgaagccccctggagtatctggatctcgtattagctcattgacggccctgtgcattagcaatgtccagtccgagtctgtacttattcagaagatctacactcacttcaagaaggctccagccactcacaaattgggagtactctatgtcgtagattccgtaactcgcaagtgggttgaccaggccaagcaacacaaccaacccatcaatagctctgcacaagacggcactttcgccgccggcgtccatagagtgacggaactgctaccagttttgatgaatgacataatccagaatgccccaggagaacaaaaggtacgctcaatctaatcaacatacatgctcatgttctgtatgccgtaattacaccatcgctgttggttggcccatcaaatcaagacgctactggctcttgtatcgaccacgaaatgccatcctttctcggtaaacagcttggactggtcgccgttactgattatgaacatgtacacttacttacctgacctatgtgaataggagaaaataaagaagctcgttgacatctgggagaaaggccagacattcccactggccatgattgagtccttcaaacagaagctgaatgcaccagtccctaaagttgagtcgaccactccggctggtagccctccccctggtcctggattgccgggtttggcagacgcaaaaccatccgctgccgaggcatcaaatgcaatcatggaagcactcgccaacatcgctcgacagaacgtcagcgcagcacccgccagcaactctgttcctcctgcagccaacccttatagtagaccacacgcacagcagcctgtgcagctaccgatcacacagagtcaaagcccagctgtagcttctacccccttctcagccccacaaccgccgagtatgcccttccaataccctccacagccccagctccaagctcaggccccggttcagagtcaagccttcatgcctccggtcacagcgagcaaccaacctccggcctatcctggatacacacccggtccacagccacaggctcctgcaccggctcccgctgctggcttagaccctaatgtccagcaacaagtgatgctgatcaagttgctggcggaccaaggtgtcccggttgacaagattcctatgattattgctggaattcagaatcagaacaatgctgctcccccagcctcagccccacaatacccccctcagcctcagatccagcctggccaacagccgtatggtaattcatggggccaagatggatttcggcaggaagagtcgcgtgaacgtaacttcaaccaggtgagatcaccacctagatatcgtgacagatctcgatcacgatcacccccgcgtcaatgggaccagcgagacgctgctcgcggccgtgactttggcagctatggccacaattcgcccggaggtgggcgcatggaagatcgtgatcaccgtggtagaggaagcgagtatcgccagcgtagtccaccaggacgtcgcggccggagtccgacacctccccagaatttcacacagcctggaggtccgaaatgggtcgatttcgacaggactgtgcccgccggtcatatcaaggtgctgagccgaaccctctttgttggaggtgtcacatgttccgaggctgaacttcggtcaatcttcaatcgccacggcgaagtacagacttgcattgttaacacggacaaacgtcacgctttcgtgaaaatggttacacgtagagatgctgtcgctgccaaggatgccatgcagaatgggtcatatagaacccgctggggagttggtttcggtcctcgtgactgcagcgactatcagactggcattagtatcattcctatctcgaagttgactgaagctgatcgaaaatggatgttgactgccgactacggtggcagtggtggtcaaccgatcgagacaggcatggttgttgaagagcctgatatcgagattggcgcaggtgtctcatccaaggcgatcagccgacgcatgcagacggacaaaggtggaagacatggtccgaaatcaagtcgtggaggtgacgaggatgacttcggcggcggtcgctggcagaacaagagaaacttccaacaggataatcaccacaacgaggtaacccctggccagctcgaagtcgaacagcttcccttcggcatcacgaccggacccaacggcatgcctatctttcctcccggcttcgttttccccggtcccgatcagtacagcaactaggacagaaagacgatgactatctcttagtctacggtttacagagacacaagttttccgccggattctctcggatatggttttctacataatgtgcttcctcgatctttttttcatactgcatggcctttggcgatcggctcttttctcacttgcatggatcggcgttcaagggggattcgccccaatcttctagtctactgatggtgattaggctcagaggggatatttgtctgtttaaataccatggttgcacgtggttcacgctgtctgtactaggatctcccgtatggaggcaaaaaaggggccgaggagatgaatgagtggtagcatggatagttgtcggtcttggcccatcttgaccgggctcttccatgccatgtaccttatgaccaggactccgttggcagttggcagtaacagtacgctccaaccgacctggatattagtgcttaataagaaattgatgaacaacatgttgttgactgaatagatgtggaattatgagcttgacgtgatggataggtcaagaatggcttgatagtattttactcttaacattcttgtgccatataaggatagtgagcactgagatcttaaaagtacacaggatagcactggacaaggcttgagttggctgtcgactttgttctaccgaatgatccacagagatctacggtcggatactcctttcacg

SEQ ID NO: 7161 - DNA, 1419 bp, Muscodor strobelii
  misc_feature: SGI cDNA ID NO. 562144
  misc_feature: Reduced expression when VOC is produced
  misc_feature: Encodes the peptide sequence at SEQ ID NO 7162
atggcttcttcactccgcctgagctcttccgccctgcgctcttccttgagagcccccggtctcgcgacccggactactgctttcaacgccgcgcgatgctactccgctaagactcagaccctcaaggagcgcttcgctgagcttcttcccgaaaagattgatgagatcaagaccctgagaaaagagcacggctccaaggtcatcgacaaggtcactctcgaccaggtctacggtggtgctcgtggcatcaagtccctcgtctgggagggctctgtcctcgactctgaggagggtatccgcttccgtggcaagaccattcccgagtgccaggagcttctccccaaggcccctggtggcaaggagcctcttcccgaaggtctcttctggcttctcctgaccggtgaggtccctaccgagcagcaggttcgcgacctgtccgctgagtgggctgcccgttccgatgtccccaagttcgtcgaggagctcatcgaccgctgccctaccgacctccaccccatggcccagttctcgctcgccgtcaccgctctcgagcacacctcttcgttcgccaaggcctacgccaagggtgtcaacaagaaggactactggggatacaccttcgaggactccatggacctgatcgctaagctgcctaccattgctgcccgcatctaccagaatgtcttcaagggtggcaaggtcgccgagatccagaaggacaaggactactctttcaacttcgccaaccagctcggcttcggcgagaacaaggatttcatcgagttgatgcgtctgtacctgaccatccacactgaccacgagggtggcaacgtcagcgcccacaccactcaccttgtcggcagtgcattgagctctcccttcctgtccctggccgctggtcttaacggtcttgctggtcctctccatggtcttgccaaccaggaggtgctgaactggctcactgagatgaagaagtccattggcgacgatctcagcgacaagaacatcaccgactatctctggtctaccttgaactctggtcgcgttgtccctggctacggccacgctgttctgcgcaagactgacccccgttacatggcccagcgcactttcgcccaggagaagatgcccaacgaccccatgttccagctagtcagccaggtctacaagattgctcccggtgtcctgaccgagcacggcaagaccaagaacccctaccccaacgtcgacgcccactctggtgtcctccttcagtactacggtctcaccgaggccaactactacaccgtcctcttcggtgtgtcccgcgccattggtgttctgccccagctcatcatcgatcgcgccgtcggtgcccccatcgagcgccccaagtccttctcgactgccaagtggatcgagattgccaacaagctgtaa

SEQ ID NO: 7162 - protein, 472 aa, Muscodor strobelii
  misc_feature: SGI Peptide ID NO. 562144
  misc_feature (79)..(457): Pfam Id: PF00285 Pfam Desc: Citrate synthase
  misc_feature (1)..(471): NCBI GI: 39971773 Blast Desc: citrate synthase, mitochondrial precursor [Magnaporthe grisea 70-15] gi|145019692|gb|EDK03920.1| citrate synthase, mitochondrial precursor [Magnaporthe grisea 70-15]
  misc_feature (1)..(472): NCBI GI: 46109080 Blast Desc: CISY_NEUCR Citrate synthase, mitochondrial precursor [Gibberella zeae PH-1]
  misc_feature (1)..(472): NCBI GI: 256730624 Blast Desc: [Nectria haematococca mpVI 77-13-4]
  misc_feature (1)..(472): NCBI GI: 261354498 Blast Desc: citrate synthase [Verticillium albo-atrum VaMs.102]
  misc_feature (1)..(472): NCBI GI: 171689082 Blast Desc: protein product [Podospora anserina] gi|10800928|emb|CAC12961.1| mitochondrial citrate synthase [Podospora anserina] gi|170944503|emb|CAP70614.1| protein product
  misc_feature (1)..(472): NCBI GI: 85082342 Blast Desc: citrate synthase, mitochondrial precursor [Neurospora crassa OR74A] gi|30316357|sp|P34085.2|CISY_NEUCR RecName: Full=Citrate synthase, mitochondrial; Flags: Precursor citrate -
  misc_feature (1)..(472): NCBI GI: 168775 Blast Desc: mitochondrial citrate synthase [Neurospora crassa]
  misc_feature (1)..(472): NCBI GI: 116204913 Blast Desc: citrate synthase, mitochondrial precursor [Chaetomium globosum CBS 148.51] gi|88176468|gb|EAQ83936.1| citrate synthase, mitochondrial precursor [Chaetomium globosum CBS 148.51]
  misc_feature (1)..(468): NCBI GI: 212537875 Blast Desc: citrate synthase (Cit1), [Penicillium marneffei ATCC 18224] gi|210068835|gb|EEA22926.1| citrate synthase (Cit1), [Penicillium marneffei ATCC 18224]
  misc_feature (3)..(468): NCBI GI: 156063018 Blast Desc: citrate synthase, mitochondrial precursor [Sclerotinia sclerotiorum 1980] gi|154696961|gb|EDN96699.1| citrate synthase, mitochondrial precursor [Sclerotinia sclerotiorum 1980]
  misc_feature (21)..(472): SWISSPROT Homolog: EC 2.3.3.1 Citrate (Si)-synthase
  misc_feature: Useful for introducing or modulating the production of volatile compounds
MASSLRLSSSALRSSLRAPGLATRTTAFNAARCYSAKTQTLKERFAELLPEKIDEIKTLRKEHGSKVIDKVTLDQVYGGARGIKSLVWEGSVLDSEEGIRFRGKTIPECQELLPKAPGGKEPLPEGLFWLLLTGEVPTEQQVRDLSAEWAARSDVPKFVEELIDRCPTDLHPMAQFSLAVTALEHTSSFAKAYAKGVNKKDYWGYTFEDSMDLIAKLPTIAARIYQNVFKGGKVAEIQKDKDYSFNFANQLGFGENKDFIELMRLYLTIHTDHEGGNVSAHTTHLVGSALSSPFLSLAAGLNGLAGPLHGLANQEVLNWLTEMKKSIGDDLSDKNITDYLWSTLNSGRVVPGYGHAVLRKTDPRYMAQRTFAQEKMPNDPMFQLVSQVYKIAPGVLTEHGKTKNPYPNVDAHSGVLLQYYGLTEANYYTVLFGVSRAIGVLPQLIIDRAVGAPIERPKSFSTAKWIEIANKL

SEQ ID NO: 7163 - DNA, 1961 bp, Muscodor strobelii
  misc_feature: SGI EST ID NO. CUFF.17744.0
  misc_feature: Variant of the nucleotide sequence at SEQ ID NO 7161
tgttggtgttctgcgcagctctgccattggttggggaggctgaggaaatccccatccgtccatggccctggctcatattattttactaacccgtcatatgagctatttccaacttcttttttcctcttccctctcttcatgcccactgtcagccttcgtggcctataatttacaccatctctcctcttttctcccaggcctcttcgtcggcacatcacatcatggcttcttcactccgcctgagctcttccgccctgcgctcttccttgagagcccccggtctcgcgacccggactactgctttcaacgccgcgcgatgctactccgctaagactcagaccctcaaggagcgcttcgctgagcttcttcccgaaaagattgatgagatcaagaccctgagaaaagagcacggctccaaggtcatcgacaaggtcactctcgaccaggtctacggtggtgctcgtggcatcaagtccctcgtctgggagggctctgtcctcgactctgaggagggtatccgcttccgtggcaagaccattcccgagtgccaggagcttctccccaaggcccctggtggcaaggagcctcttcccgaaggtctcttctggcttctcctgaccggtgaggtccctaccgagcagcaggttcgcgacctgtccgctgagtgggctgcccgttccgatgtccccaagttcgtcgaggagctcatcgaccgctgccctaccgacctccaccccatggcccagttctcgctcgccgtcaccgctctcgagcacacctcttcgttcgccaaggcctacgccaagggtgtcaacaagaaggactactggggatacaccttcgaggactccatggacctgatcgctaagctgcctaccattgctgcccgcatctaccagaatgtcttcaagggtggcaaggtcgccgagatccagaaggacaaggactactctttcaacttcgccaaccagctcggcttcggcgagaacaaggatttcatcgagttgatgcgtctgtacctgaccatccacactgaccacgagggtggcaacgtcagcgcccacaccactcaccttgtcggcagtgcattgagctctcccttcctgtccctggccgctggtcttaacggtcttgctggtcctctccatggtcttgccaaccaggaggtgctgaactggctcactgagatgaagaagtccattggcgacgatctcagcgacaagaacatcaccgactatctctggtctaccttgaactctggtcgcgttgtccctggctacggccacgctgttctgcgcaagactgacccccgttacatggcccagcgcactttcgcccaggagaagatgcccaacgaccccatgttccagctagtcagccaggtctacaagattgctcccggtgtcctgaccgagcacggcaagaccaagaacccctaccccaacgtcgacgcccactctggtgtcctccttcagtactacggtctcaccgaggccaactactacaccgtcctcttcggtgtgtcccgcgccattggtgttctgccccagctcatcatcgatcgcgccgtcggtgcccccatcgagcgccccaagtccttctcgactgccaagtggatcgagattgccaacaagctgtaaaaaagaagtcgataatgttgattgtattttctgtaaggcttgggggaacaggttacgcattatagactggttacttgaaagggtggcgctgtatcaactggggggcgttgtattagaaagatgaccccgaagataccaaaaactgctctttgtacattaaatctaatgattgtgcttttacgagccactgtgttacattcaatgtcttgaccaccattcaacctacgtgaggtgttttgcatacaactactttcaatcaactgcgacgaagttgaaatgcgatagacggatacgcgcagggctgtagcgcgtaggatcgcc

SEQ ID NO: 7164 - DNA, 957 bp, Muscodor strobelii
  misc_feature: SGI cDNA ID NO. 562145
  misc_feature: Encodes the peptide sequence at SEQ ID NO 7165
atgtccgcagccagcaccgccggtatgacgcctcctctgacggagaagaagctcgagaagaagcccgtcaagttctccaacttgctgctgggcgccggtctcaacctcttcgaggtcaccacactcggccagcccctcgaggtcgtcaagaccaccatggccgccaaccgaggcgacaccttcggcacggccctcggtcgcatctggggtcgcggcggtccgcttggattctaccagggcctgatcccctgggcctggatcgaagcctcgaccaaaggcgccgtgctgctcttcgtcgcttccgaggctgaatactatgcccgcgtcgccggagcctccgattttggtagtggtattatcggaggtgtcaccggtggtgtcgctcaggcttacgccaccatgggcttctgcacttgcatgaagacggtcgagatcacccagcacaagctggctgccgctggtgtcaagcctcagagcacctttaccactttcatggatatctaccgaaaggagggtatccgcggtatcaacaagggcgttaacgccgttgctatccgccagatgaccaactggggctcccgatttggtttgtcgcgtcttgctgagcagggtattcgccgcgtcaccaacaaggagcatggcgagaagctcagcgccgctgagaagatcttgtcctctgccatcggtggtggtctctctgcctggaaccagcccattgaggtcatccgtgtcgagatgcagagcaagaaggaggatcccaaccgacccaagaagatgacggtcggcaacactttcaagtacatttacgagaccaacggcgtcaagggtctctaccgcggcgttaccccgcgtattggtttgggcgtttggcagacggtctgcatggtggccatgggcgatatggccaaggcttacgttgaaaagctcactggtgacagtgtcaccgctaaacattag

SEQ ID NO: 7165 - protein, 318 aa, Muscodor strobelii
  misc_feature: SGI Peptide ID NO. 562145
  misc_feature (218)..(310): Pfam Id: PF00153 Pfam Desc: Mitochondrial carrier protein
  misc_feature (114)..(212): Pfam Id: PF00153 Pfam Desc: Mitochondrial carrier protein
  misc_feature (218)..(285): Pfam Id: PF00153 Pfam Desc: Mitochondrial carrier protein
  misc_feature (1)..(318): NCBI GI: 39971771 Blast Desc: MGG_07201 [Magnaporthe grisea 70-15] gi|145019691|gb|EDK03919.1| MGG_07201 [Magnaporthe grisea 70-15]
  misc_feature (3)..(318): NCBI GI: 256730625 Blast Desc: [Nectria haematococca mpVI 77-13-4]
  misc_feature (18)..(318): NCBI GI: 119498707 Blast Desc: mitochondrial DNA replication protein (Yhm2), [Neosartorya fischeri NRRL 181] gi|119414275|gb|EAW24214.1| mitochondrial DNA replication protein (Yhm2), [Neosartorya NRRL
  misc_feature (11)..(318): NCBI GI: 226282102 Blast Desc: mitochondrial DNA replication protein YHM2 [Paracoccidioides brasiliensis Pb01]
  misc_feature (9)..(318): NCBI GI: 212537873 Blast Desc: mitochondrial DNA replication protein (Yhm2), [Penicillium marneffei ATCC 18224] gi|210068834|gb|EEA22925.1| mitochondrial DNA replication protein (Yhm2), [Penicillium ATCC
  misc_feature (11)..(318): NCBI GI: 226287955 Blast Desc: mitochondrial DNA replication protein YHM2 [Paracoccidioides brasiliensis Pb18]
  misc_feature (9)..(318): NCBI GI: 242808032 Blast Desc: mitochondrial DNA replication protein (Yhm2), [Talaromyces stipitatus ATCC 10500] gi|218715704|gb|EED15126.1| mitochondrial DNA replication protein (Yhm2), [Talaromyces ATCC
  misc_feature (1)..(318): NCBI GI: 193735626 Blast Desc: mitochondrial FOW-1 like protein [Fusarium oxysporum f. cubense]
  misc_feature (1)..(318): NCBI GI: 19072114 Blast Desc: mitochondrial carrier protein [Fusarium oxysporum]
  misc_feature (11)..(318): NCBI GI: 225678952 Blast Desc: DNA binding protein [Paracoccidioides brasiliensis Pb03]
MSAASTAGMTPPLTEKKLEKKPVKFSNLLLGAGLNLFEVTTLGQPLEVVKTTMAANRGDTFGTALGRIWGRGGPLGFYQGLIPWAWIEASTKGAVLLFVASEAEYYARVAGASDFGSGIIGGVTGGVAQAYATMGFCTCMKTVEITQHKLAAAGVKPQSTFTTFMDIYRKEGIRGINKGVNAVAIRQMTNWGSRFGLSRLAEQGIRRVTNKEHGEKLSAAEKILSSAIGGGLSAWNQPIEVIRVEMQSKKEDPNRPKKMTVGNTFKYIYETNGVKGLYRGVTPRIGLGVWQTVCMVAMGDMAKAYVEKLTGDSVTAKH

SEQ ID NO: 7166 - DNA, 1519 bp, Muscodor strobelii
  misc_feature: SGI EST ID NO. CUFF.17771.0
  misc_feature: Variant of the nucleotide sequence at SEQ ID NO 7164
ggcctaggcactgcccggtaactgtgctgatggttccctcgacatttattccgtcagcctcataatacgatacatgcaagattcctctcttgtgttctcctttccaagtcaatcccaactgtctcacacatccatccggatctctcccctcaccccttagcgacgaagcacccgactgccttggtcaggccccctccccagtaacgacaacgagccatgtccgcagccagcaccgccggtatgacgcctcctctgacggagaagaagctcgagaagaagcccgtcaagttctccaacttgctgctgggcgccggtctcaacctcttcgaggtcaccacactcggccagcccctcgaggtcgtcaagaccaccatggccgccaaccgaggcgacaccttcggcacggccctcggtcgcatctggggtcgcggcggtccgcttggattctaccagggcctgatcccctgggcctggatcgaagcctcgaccaaaggcgccgtgctgctcttcgtcgcttccgaggctgaatactatgcccgcgtcgccggagcctccgattttggtagtggtattatcggaggtgtcaccggtggtgtcgctcaggcttacgccaccatgggcttctgcacttgcatgaagacggtcgagatcacccagcacaagctggctgccgctggtgtcaagcctcagagcacctttaccactttcatggatatctaccgaaaggagggtatccgcggtatcaacaagggcgttaacgccgttgctatccgccagatgaccaactggggctcccgatttggtttgtcgcgtcttgctgagcagggtattcgccgcgtcaccaacaaggagcatggcgagaagctcagcgccgctgagaagatcttgtcctctgccatcggtggtggtctctctgcctggaaccagcccattgaggtcatccgtgtcgagatgcagagcaagaaggaggatcccaaccgacccaagaagatgacggtcggcaacactttcaagtacatttacgagaccaacggcgtcaagggtctctaccgcggcgttaccccgcgtattggtttgggcgtttggcagacggtctgcatggtggccatgggcgatatggccaaggcttacgttgaaaagctcactggtgacagtgtcaccgctaaacattagacggacggcgttttagacggattttgctcgtgcttcatgggaatatcaatgaccgattggcaagaagatacaggaatggacgagctatgtcgttcgatcaatcatagattttcttgttgatggtggatattgttgttatcatcttgccaaagccggagcttattctggagtttgctattcatgctctacctattgttctatgcgtatatagctttttgtgctctaaatatcaatatggctttcagcgcatagctttgcactattcgagacatcagactgttcatgtttgcaagttgcgagtctacctattaccagtccaatccaattatgcgttgcatatctcgat

SEQ ID NO: 7167 - DNA, 555 bp, Muscodor strobelii
  misc_feature: SGI cDNA ID NO. 562146
  misc_feature: Encodes the peptide sequence at SEQ ID NO 7168
ggtacatttcgaccggtgcgactactggccgttgccaaccgttacggtctcaacggcgaagaggtacttgacaatgtcgcctacgcccgtgcgtacaactcggatcatcaacttcaactactcacgcaggctgcacaaatgatgtgtgagacccgcttctcgttactcatcgtggacagcgccacatcgctttacagaaccgacttcttgggtcgaggagagttgtcttccagacagactcatcttgccaaattcatgcgcagtctacaacgtctggccgatgaatttggaatcgcagtggtcatcaccaatcaagttgttgctcaagtcgatggcggtcccagtgctatgtttaatccggatccgaagaagcccatcggaggcaacatcatcgctcacgccagcacgacgagaatcagtctgaagaaagggcgagccgagacccgtatcgccaagatttatgatagcccttgtctccccgagagtgactgtcttttcgccatcaaagaagacggcattggcgatcctgccccgaaggacatggagaaggagtag

SEQ ID NO: 7168 - protein, 184 aa, Muscodor strobelii
  misc_feature: SGI Peptide ID NO. 562146
  misc_feature (1)..(177): Pfam Id: PF08423 Pfam Desc: Rad51
  misc_feature (1)..(183): NCBI GI: 171680227 Blast Desc: protein product [Podospora anserina] gi|170939740|emb|CAP64966.1| protein product [Podospora anserina]
  misc_feature (1)..(183): NCBI GI: 85116816 Blast Desc: DNA repair protein RAD51 [Neurospora crassa OR74A] gi|2182133|dbj|BAA20366.1| MEI3 [Neurospora crassa] gi|28926929|gb|EAA35890.1| DNA repair protein RAD51 [Neurospora
  misc_feature (1)..(184): NCBI GI: 156053229 Blast Desc: DNA repair protein rhp51 [Sclerotinia sclerotiorum 1980] gi|154704560|gb|EDO04299.1| DNA repair protein rhp51 [Sclerotinia sclerotiorum 1980]
  misc_feature (1)..(184): NCBI GI: 154314604 Blast Desc: BC1G_04011 [Botryotinia fuckeliana B05.10] gi|150848633|gb|EDN23826.1| BC1G_04011 [Botryotinia fuckeliana B05.10]
  misc_feature (1)..(184): NCBI GI: 261355883 Blast Desc: DNA repair protein RAD51 [Verticillium albo-atrum VaMs.102]
  misc_feature (1)..(184): NCBI GI: 116206996 Blast Desc: CHGG_02791 [Chaetomium globosum CBS 148.51] gi|88183388|gb|EAQ90856.1| CHGG_02791 [Chaetomium globosum CBS 148.51]
  misc_feature (1)..(183): NCBI GI: 145614388 Blast Desc: MGG_11350 [Magnaporthe grisea 70-15] gi|145021318|gb|EDK05447.1| MGG_11350 [Magnaporthe grisea 70-15]
  misc_feature (1)..(184): NCBI GI: 46108550 Blast Desc: FG01157.1 [Gibberella zeae PH-1]
  misc_feature (1)..(184): NCBI GI: 119495909 Blast Desc: DNA repair protein RAD51, [Neosartorya fischeri NRRL 181] gi|119412892|gb|EAW22833.1| DNA repair protein RAD51, [Neosartorya fischeri NRRL 181]
  misc_feature (1)..(184): NCBI GI: 121701915 Blast Desc: DNA repair protein RAD51, [Aspergillus clavatus NRRL 1] gi|119397365|gb|EAW07796.1| DNA repair protein RAD51, [Aspergillus clavatus NRRL 1]
GTFRPVRLLAVANRYGLNGEEVLDNVAYARAYNSDHQLQLLTQAAQMMCETRFSLLIVDSATSLYRTDFLGRGELSSRQTHLAKFMRSLQRLADEFGIAVVITNQVVAQVDGGPSAMFNPDPKKPIGGNIIAHASTTRISLKKGRAETRIAKIYDSPCLPESDCLFAIKEDGIGDPAPKDMEKE

SEQ ID NO: 7169 - DNA, 1071 bp, Muscodor strobelii
  misc_feature: SGI cDNA ID NO. 562147
  misc_feature: Encodes the peptide sequence at SEQ ID NO 7170
atgggaggcatacaattcttcacgaattgggagttatgggaaaagttgacatttgtccttgctgcaggcatcgtttttgtatttttcctcggctggttcaaactgtggttgatgcagagacatcttaagaaacacaccatactcgacgaagagaaacggatccgacaaatggaaatgcgcaagagcggtcttccagttggacggcggatagatatcccctttggggtgcgcgccatccaaagtggtgttgaagtagaaggaatctggatatcacgtcccgctacaccagctgcgagtcgtcctgcgagcaaagcatcatcgacaacgttggaccttggaagcgacagcgacacgagggataaggacaaaggaaaatcagttccgagactatcaactactgtcacagaagttgagccaacaccgaagccgagcccgcgaccaagtccacgaccaagtcccacgagtacagcctttgaccgaagcattcgcattgaaatgccaggaagcacagggtcgactcccctgggaacgccaacatacctatcaccgccctcaccacatccgtctcatcgatccacaagccagaactccagacaccatgcatctcgactcgaagaattaagaggcagacctcaagtccaccagacatatatacccacatcggcaccgtctagcataagctccatcgggtcacgcagtagacacgcattagaccgcagctccgtatcgtctgaggaagacgtcaactacgcacaaccccgaggacctcgtggtgggtacgcagcaagactctcgtccagattccggacatccttcgatgatctcgaccatccagcgttcgctacacctgccgataacaacgacggccagcgcaacacaagagtacgagttgaaccaagaagaccacacctcaccgatttccctcgcacggaatcagatccaaacgtcggagcggcgacacggacattgctcgcgtcaacaagaccaacgcctgtccgtacatataccgacatatccgagactacatcttcgggaggctctcgcctgtttggagaggcacatgccctgtag

SEQ ID NO: 7170 - protein, 356 aa, Muscodor strobelii
  misc_feature: SGI Peptide ID NO. 562147
  misc_feature (6)..(206): NCBI GI: 116206994 Blast Desc: CHGG_02790 [Chaetomium globosum CBS 148.51] gi|88183387|gb|EAQ90855.1| CHGG_02790 [Chaetomium globosum CBS 148.51]
  misc_feature (1)..(111): NCBI GI: 39945704 Blast Desc: MGG_04835 [Magnaporthe grisea 70-15] gi|145021316|gb|EDK05445.1| MGG_04835 [Magnaporthe grisea 70-15]
  misc_feature (6)..(95): NCBI GI: 171680229 Blast Desc: protein product [Podospora anserina] gi|170939741|emb|CAP64967.1| protein product [Podospora anserina]
  misc_feature (6)..(126): NCBI GI: 85116812 Blast Desc: NCU02740 [Neurospora crassa OR74A] gi|28926928|gb|EAA35889.1| [Neurospora crassa OR74A]
  misc_feature (6)..(251): NCBI GI: 261357568 Blast Desc: conserved [Verticillium albo-atrum VaMs.102]
  misc_feature (6)..(141): NCBI GI: 46107146 Blast Desc: FG00456.1 [Gibberella zeae PH-1]
  misc_feature (3)..(110): NCBI GI: 154314602 Blast Desc: BC1G_04010 [Botryotinia fuckeliana B05.10] gi|150848632|gb|EDN23825.1| BC1G_04010 [Botryotinia fuckeliana B05.10]
  misc_feature (3)..(107): NCBI GI: 156053227 Blast Desc: SS1G_06781 [Sclerotinia sclerotiorum 1980] gi|154704559|gb|EDO04298.1| SS1G_06781 [Sclerotinia sclerotiorum 1980]
  misc_feature (3)..(99): NCBI GI: 169607817 Blast Desc: SNOG_06971 [Phaeosphaeria nodorum SN15] gi|160701500|gb|EAT85622.2| SNOG_06971 [Phaeosphaeria nodorum SN15]
  misc_feature (3)..(165): NCBI GI: 189189396 Blast Desc: PTRG_00704 [Pyrenophora tritici-repentis Pt-1C-BFP] gi|187972643|gb|EDU40142.1| PTRG_00704 [Pyrenophora tritici-repentis Pt-1C-BFP]
MGGIQFFTNWELWEKLTFVLAAGIVFVFFLGWFKLWLMQRHLKKHTILDEEKRIRQMEMRKSGLPVGRRIDIPFGVRAIQSGVEVEGIWISRPATPAASRPASKASSTTLDLGSDSDTRDKDKGKSVPRLSTTVTEVEPTPKPSPRPSPRPSPTSTAFDRSIRIEMPGSTGSTPLGTPTYLSPPSPHPSHRSTSQNSRHHASRLEELRGRPQVHQTYIPTSAPSSISSIGSRSRHALDRSSVSSEEDVNYAQPRGPRGGYAARLSSRFRTSFDDLDHPAFATPADNNDGQRNTRVRVEPRRPHLTDFPRTESDPNVGAATRTLLASTRPTPVRTYTDISETTSSGGSRLFGEAHAL

SEQ ID NO: 7171 - DNA, 2133 bp, Muscodor strobelii
  misc_feature: SGI cDNA ID NO. 562148
  misc_feature: Reduced expression when VOC is produced
  misc_feature: Encodes the peptide sequence at SEQ ID NO 7172
atggcgcccaaaggtgaatacggcaacaagcgcaaatttgccaatggtaccaaggacaaggataccaagagcaagaaaccgaagttcgagaaacgcccacctcccaaggaagaagacgacagtataagcgatagcagcgatattgacgatgtctctgatgaagatgaaggcggtgccgctttgagcgagagtaaatcctcgaagcacaatgatgtacccgtacggcccaagcccaatggtggtgagaatggaaaagtgttcgagaaaggtcaaacatcgcgagagtcccatcagaagcagaagcaacttgcccaagagcgaaaagcaagcaaacctctcgcggacgaattgcagagagccaagaaactctgggagagactgcgccgcaaatcccacgttcccaaggaagagagaaataagctcgtcaatgagcttttcgagatcacgactggccgaatgaaggacttcgtgctcaagcacgatgccgtccgtgttgtccaaaccgccatcaaatacgccactgtcgagagaaagaagatgatcgcaaaagagctcaggggcacatacagtctattggctgaaagcagatacgccaaattcctcatcggcaagcttattgtcgagggcgataaggagatccgagatctcattgtgcctgagttctacggcaaagtccggaaattaatcaaccacccagaggctgcctggattattgacgacatctaccgaggtgtagcctcgaaggaacaaaaggcaatcttgctcagagagtggtatggccccgagttctccatcttccgccagagtggagaggcacagggtaccgcaacagccgaactatcagagattttagaaaaagagccaagcaaacgcgccccaatcatgagatacttgcttgatatgacaaatcagctcattcagaagaagatgaccggcttcaccatgctacatgacgctatgttacagtactacaccaatgtgaagccaggatctgaggaagccaaagaatacatggagatgatcaaggaagatgagaatggcgacttactcaagaatatgggcttcaccaaatcaggctctcgcctcgtctgcctacttctcgcctacggaacggccaaggatcgaaaacagattctcaagacatacaaggacacattctcgctcatgtcaacagatccattcggtcacaccatcatactcacggcttacgatactgttgacgatactgtgttgacatccaaatccatcattcaggaacttatcggcaagacggaagagaacgaggcatctaatattctcacgctggccaacgatcccaacgcgcggttgacgatacgatatctgctcgaaggcgccagtaaggccttatttgatgccagccacgtagacgacctcaagcttctagaggaaatctgggaacttagaaaaaccaccagtaagaaagatcctgacactcgtcgaaaagagttagtcacggctctttccccatccctcctggctgccatagcttcagtcccgcacgacttgaccgctacgtcttttggctgtcaactggtcactgaagccatcctttcttgtgttggagacaagtctgcagcattagaagctgtggcgtctacagctggtggtgatcccgacgcggtagtagaagtagaggacgagggggcagtggatcctgctttcccggcatcgcctcacatttcaaaggtaccccatggcggacgtatgttgaagactctcatatccggcggccgttttgacaagtcgacccgcaaaatcattccctgtgatccgccactcaattttcccgatatcctttatcccgtgatcaaggaacacataatgtcgtgggcaaccggccccagttctttcgtggtggtcaacctgcttgaggccgatgatttctctcatggagccgagttacagaagatactgaagaataataagaagcaacttgagaaggcggcagttgatgaaaccccggaacagaaggcggctcgggaaacggctgagggagctgatgctaatggagacgatgagaagcaaagcaagaagagtaaaaagaccggaagcaagaaacagcagcccgttggtaatatgggatcgaaactgttgcttgaaaagctgagctag

SEQ ID NO: 7172 - protein, 710 aa, Muscodor strobelii
  misc_feature: SGI Peptide ID NO. 562148
  misc_feature (1)..(709): NCBI GI: 116206892 Blast Desc: CHGG_02739 [Chaetomium globosum CBS 148.51] gi|88183336|gb|EAQ90804.1| CHGG_02739 [Chaetomium globosum CBS 148.51]
  misc_feature (1)..(709): NCBI GI: 256734405 Blast Desc: [Nectria haematococca mpVI 77-13-4]
  misc_feature (8)..(709): NCBI GI: 46108492 Blast Desc: FG01128.1 [Gibberella zeae PH-1]
  misc_feature (37)..(709): NCBI GI: 145603021 Blast Desc: MGG_13803 [Magnaporthe grisea 70-15] gi|145011350|gb|EDJ96006.1| MGG_13803 [Magnaporthe grisea 70-15]
  misc_feature (69)..(709): NCBI GI: 85111205 Blast Desc: NCU09380 [Neurospora crassa OR74A] gi|28925565|gb|EAA34590.1| conserved [Neurospora crassa OR74A]
  misc_feature (1)..(709): NCBI GI: 171680347 Blast Desc: protein product [Podospora anserina] gi|170939800|emb|CAP65026.1| protein product [Podospora anserina]
  misc_feature (57)..(706): NCBI GI: 156053217 Blast Desc: SS1G_06776 [Sclerotinia sclerotiorum 1980] gi|154704554|gb|EDO04293.1| SS1G_06776 [Sclerotinia sclerotiorum 1980]
  misc_feature (86)..(706): NCBI GI: 154314594 Blast Desc: BC1G_04006 [Botryotinia fuckeliana B05.10] gi|150848628|gb|EDN23821.1| BC1G_04006 [Botryotinia fuckeliana B05.10]
  misc_feature (54)..(709): NCBI GI: 261356595 Blast Desc: PUF6 [Verticillium albo-atrum VaMs.102]
  misc_feature (52)..(709): NCBI GI: 146322570 Blast Desc: conserved [Aspergillus fumigatus Af293] gi|129557733|gb|EAL90372.2| conserved [Aspergillus fumigatus Af293] gi|159131165|gb|EDP56278.1| conserved [Aspergillus A1163]
  misc_feature: Useful for introducing or modulating the production of volatile compounds
MAPKGEYGNKRKFANGTKDKDTKSKKPKFEKRPPPKEEDDSISDSSDIDDVSDEDEGGAALSESKSSKHNDVPVRPKPNGGENGKVFEKGQTSRESHQKQKQLAQERKASKPLADELQRAKKLWERLRRKSHVPKEERNKLVNELFEITTGRMKDFVLKHDAVRVVQTAIKYATVERKKMIAKELRGTYSLLAESRYAKFLIGKLIVEGDKEIRDLIVPEFYGKVRKLINHPEAAWIIDDIYRGVASKEQKAILLREWYGPEFSIFRQSGEAQGTATAELSEILEKEPSKRAPIMRYLLDMTNQLIQKKMTGFTMLHDAMLQYYTNVKPGSEEAKEYMEMIKEDENGDLLKNMGFTKSGSRLVCLLLAYGTAKDRKQILKTYKDTFSLMSTDPFGHTIILTAYDTVDDTVLTSKSIIQELIGKTEENEASNILTLANDPNARLTIRYLLEGASKALFDASHVDDLKLLEEIWELRKTTSKKDPDTRRKELVTALSPSLLAAIASVPHDLTATSFGCQLVTEAILSCVGDKSAALEAVASTAGGDPDAVVEVEDEGAVDPAFPASPHISKVPHGGRMLKTLISGGRFDKSTRKIIPCDPPLNFPDILYPVIKEHIMSWATGPSSFVVVNLLEADDFSHGAELQKILKNNKKQLEKAAVDETPEQKAARETAEGADANGDDEKQSKKSKKTGSKKQQPVGNMGSKLLLEKLS

SEQ ID NO: 7173 - DNA, 2313 bp, Muscodor strobelii
  misc_feature: SGI EST ID NO. CUFF.17769.0
  misc_feature: Variant of the nucleotide sequence at SEQ ID NO 7171
gagtttccaagtgctcaatttactgcaaattcacactatctagatccattcggctttggatatagcctgcgacggttgaagatggcgcccaaaggtgaatacggcaacaagcgcaaatttgccaatggtaccaaggacaaggataccaagagcaagaaaccgaagttcgagaaacgcccacctcccaaggaagaagacgacagtataagcgatagcagcgatattgacgatgtctctgatgaagatgaaggcggtgccgctttgagcgagagtaaatcctcgaagcacaatgatgtacccgtacggcccaagcccaatggtggtgagaatggaaaagtgttcgagaaaggtcaaacatcgcgagagtcccatcagaagcagaagcaacttgcccaagagcgaaaagcaagcaaacctctcgcggacgaattgcagagagccaagaaactctgggagagactgcgccgcaaatcccacgttcccaaggaagagagaaataagctcgtcaatgagcttttcgagatcacgactggccgaatgaaggacttcgtgctcaagcacgatgccgtccgtgttgtccaaaccgccatcaaatacgccactgtcgagagaaagaagatgatcgcaaaagagctcaggggcacatacagtctattggctgaaagcagatacgccaaattcctcatcggcaagcttattgtcgagggcgataaggagatccgagatctcattgtgcctgagttctacggcaaagtccggaaattaatcaaccacccagaggctgcctggattattgacgacatctaccgaggtgtagcctcgaaggaacaaaaggcaatcttgctcagagagtggtatggccccgagttctccatcttccgccagagtggagaggcacagggtaccgcaacagccgaactatcagagattttagaaaaagagccaagcaaacgcgccccaatcatgagatacttgcttgatatgacaaatcagctcattcagaagaagatgaccggcttcaccatgctacatgacgctatgttacagtactacaccaatgtgaagccaggatctgaggaagccaaagaatacatggagatgatcaaggaagatgagaatggcgacttactcaagaatatgggcttcaccaaatcaggctctcgcctcgtctgcctacttctcgcctacggaacggccaaggatcgaaaacagattctcaagacatacaaggacacattctcgctcatgtcaacagatccattcggtcacaccatcatactcacggcttacgatactgttgacgatactgtgttgacatccaaatccatcattcaggaacttatcggcaagacggaagagaacgaggcatctaatattctcacgctggccaacgatcccaacgcgcggttgacgatacgatatctgctcgaaggcgccagtaaggccttatttgatgccagccacgtagacgacctcaagcttctagaggaaatctgggaacttagaaaaaccaccagtaagaaagatcctgacactcgtcgaaaagagttagtcacggctctttccccatccctcctggctgccatagcttcagtcccgcacgacttgaccgctacgtcttttggctgtcaactggtcactgaagccatcctttcttgtgttggagacaagtctgcagcattagaagctgtggcgtctacagctggtggtgatcccgacgcggtagtagaagtagaggacgagggggcagtggatcctgctttcccggcatcgcctcacatttcaaaggtaccccatggcggacgtatgttgaagactctcatatccggcggccgttttgacaagtcgacccgcaaaatcattccctgtgatccgccactcaattttcccgatatcctttatcccgtgatcaaggaacacataatgtcgtgggcaaccggccccagttctttcgtggtggtcaacctgcttgaggccgatgatttctctcatggagccgagttacagaagatactgaagaataataagaagcaacttgagaaggcggcagttgatgaaaccccggaacagaaggcggctcgggaaacggctgagggagctgatgctaatggagacgatgagaagcaaagcaagaagagtaaaaagaccggaagcaagaaacagcagcccgttggtaatatgggatcgaaactgttgcttgaaaagctgagctagttaatattatacccagccggcaggcgttatagaagatctgatttacattgatgaacataactaatgctaaaatgaaagtgaaacaatctctcaactccg

SEQ ID NO: 7174 - DNA, 732 bp, Muscodor strobelii
  misc_feature: SGI cDNA ID NO. 562149
  misc_feature: Encodes the peptide sequence at SEQ ID NO 7175
atgggcaaagaagagcaggtcgaggaacgcgaagttctcgactctatatttcccgaagaaatcaccgatatctctgataccgaatatcgcatcgcgatcaaactaaatcccccagatgacgacgatggtgaagacgcaatcgaaccaccgaccctagtgctacatgtgcgatatccggaatcatatcccgacgaagcgcctatcttagacatatccgcccctcaaaatgcaccgcctcatccacgattctcagtctcagccgacaaggaggcgttactccagggtctggatgagactattcaagagaacctaggcatggccatgatatttactatcgtcacaaccctgaccgaggctgctgagcagctgatggctgagcgcaaggatgccgttgagcgcgaaagggaagaggcacttcttgctgctgagcgcgaggaaaataagaaattccacggcacacccgtcacaccagaaactttcttggaatttcatttcgtatgtcatactgaccaatcacagaaatggcgggatgacttcatgcgcgagatggcagagttgaaagtacaggaagaagtggagcgccttgctgaactcaagaaggccaagatcaaagaaccgactcgactcacggggaaacaactgttcttgcagggtctcgttggtaaggtcgaggaggaagaggatgatacggcgccaagtgagcaaatggagaagctcaaggttgaagcataa

SEQ ID NO: 7175 - protein, 243 aa, Muscodor strobelii
  misc_feature: SGI Peptide ID NO. 562149
  misc_feature (1)..(120): Pfam Id: PF05773 Pfam Desc: RWD domain
  misc_feature (1)..(241): NCBI GI: 171680349 Blast Desc: protein product [Podospora anserina] gi|170939801|emb|CAP65027.1| protein product [Podospora anserina]
  misc_feature (1)..(243): NCBI GI: 46108494 Blast Desc: FG01129.1 [Gibberella zeae PH-1]
  misc_feature (16)..(243): NCBI GI: 261356596 Blast Desc: conserved [Verticillium albo-atrum VaMs.102]
  misc_feature (1)..(241): NCBI GI: 116206894 Blast Desc: CHGG_02740 [Chaetomium globosum CBS 148.51] gi|88183337|gb|EAQ90805.1| CHGG_02740 [Chaetomium globosum CBS 148.51]
  misc_feature (1)..(243): NCBI GI: 39945168 Blast Desc: MGG_04566 [Magnaporthe grisea 70-15] gi|145011351|gb|EDJ96007.1| MGG_04566 [Magnaporthe grisea 70-15]
  misc_feature (1)..(241): NCBI GI: 85111207 Blast Desc: NCU09381 [Neurospora crassa OR74A] gi|28925566|gb|EAA34591.1| NCU09381 [Neurospora crassa OR74A]
  misc_feature (1)..(241): NCBI GI: 154287286 Blast Desc: conserved [Ajellomyces capsulatus NAm1] gi|150408079|gb|EDN03620.1| conserved [Ajellomyces capsulatus NAm1]
  misc_feature (1)..(243): NCBI GI: 121708224 Blast Desc: RWD domain protein (Gir2), [Aspergillus clavatus NRRL 1] gi|119400213|gb|EAW10639.1| RWD domain protein (Gir2), [Aspergillus clavatus NRRL 1]
  misc_feature (1)..(241): NCBI GI: 240276354 Blast Desc: RWD domain-containing protein [Ajellomyces capsulatus H143]
  misc_feature (1)..(241): NCBI GI: 225559774 Blast Desc: conserved [Ajellomyces capsulatus G186AR]
MGKEEQVEEREVLDSIFPEEITDISDTEYRIAIKLNPPDDDDGEDAIEPPTLVLHVRYPESYPDEAPILDISAPQNAPPHPRFSVSADKEALLQGLDETIQENLGMAMIFTIVTTLTEAAEQLMAERKDAVEREREEALLAAEREENKKFHGTPVTPETFLEFHFVCHTDQSQKWRDDFMREMAELKVQEEVERLAELKKAKIKEPTRLTGKQLFLQGLVGKVEEEEDDTAPSEQMEKLKVEA

SEQ ID NO: 7176 - DNA, 2450 bp, Muscodor strobelii
  misc_feature: SGI EST ID NO. CUFF.17805.0
  misc_feature: Variant of the nucleotide sequence at SEQ ID NO 7174
gagatcttgacctggagctacccatctaggctgtcttgtactttattgatgcgctgtggcttccagatcacagcgtctacaaaatgggcaaagaagagcaggtcgaggaacgcgaagttctcgactctatatttcccgaagaaatcaccgatatctctgataccgaatatcgcatcgcgatcaaactaaatcccccagatgacgacgatggtgaagacgcaatcgaaccaccgaccctagtgctacatgtgcgatatccggaatcatatcccgacgaagcgcctatcttagacatatccgcccctcaaaatgcaccgcctcatccacgattctcagtctcagccgacaaggaggcgttactccagggtctggatgagactattcaagagaacctaggcatggccatgatatttactatcgtcacaaccctgaccgaggctgctgagcagctgatggctgagcgcaaggatgccgttgagcgcgaaagggaagaggcacttcttgctgctgagcgcgaggaaaataagaaattccacggcacacccgtcacaccagaaactttcttgggttcgtactcatgtctctatggtttagtgaccttaattccgcgagctaacaattcatagtaagatctgatattcctctattctcgtctccctatttcggaacatcgcccatgagacggtctggataagaatttcatttcgtatgtcatactgaccaatcacagaaatggcgggatgacttcatgcgcgagatggcagagttgaaagtacaggaagaagtggagcgccttgctgaactcaagaaggccaagatcaaagaaccgactcgactcacggggaaacaactgttcttgcagggtctcgttggtaaggtcgaggaggaagaggatgatacggcgccaagtgagcaaatggagaagctcaaggttgaagcataagaccgtctattcatagatctggttgaagctgttttatacccaggaccattgcgaatagcatttacatggagtttaggcgcctgtgtaaagtattgtagagagattcatctttggtatcagaaactcctgaatttctgccggtgcttctccccttgtagattggaatgtcttaccctaccccttttgaaactccgaacgccgcttgcatgccgtgaaatccagtactctctctaacctatagcattatggtattgttggtccactattccttcatctcttcatcggtttcgtcgtcttcccagccttcgtcatcgtcatcatctgcttctcccggcgtcgcttcaccaagctctttcgcgatggcagcgagtagctcctttgcatgctctccaagtcgttcgtcttcatagtcttgtagtttgtaaaggtgtaaacactggttaagccatactcggctagagatccatgatgccttgcggtcttcttcggctttttgctctttttgcttttcgcccatgatgtagagtccccagccgccaaggtaccatacctccacactttgatcgtcttcaccgacgagtcgctcgagcacctcgatagcttcctgctcttgctcgacctccataagtagcctggcgagaccgactcggctggggaaatcaggtactgaagggtcttcgggcgggagatctttccacaactcaagactccggctcaaggccgcctttgcgtcatcgaatcttgactgcgaaatgcggacattggccaacgtctgccatgtttcggcgaaatcaggcgcgaccatcgtggcctccgtggtaagggcctcacaccgcttctcagcatcctcttcccatgataaatcggtcatgtacacttcagccacagagcagagcgtcatggcaagtttcttccttagctcctctagcatcatgtcttgttcgtcggtgcgtcgattcttcgtctctagcgtctgaatctgcttcttgagagccgcagcgcccttttcgaaccaccctacgctgtccttcccgccctcctcactgagctgcgcgaggcacaagaatttctccggaccaccgccgatactctcatctttcgatccgtcttcatcgattgcggtagcgcgaagcaggtacatgcgcgcggtctcgaagtcgccgagctccagacatatctggccgaggaggtttatggcagagagcgcatcgtcactgcgagcagcagattcttccagtgctttctctgcgagtttagaggcatcctgaatgtttcctgcttggagctggagttcagcggctttgacgaggacctgcggagatacaggttggctagcggtgctgccaccggctgcggccgccgcagctcgcgagatcgcggctttggctcgtttctttgagcctttatcggggcgccgcggtgccatgacagaataccgtagaataatttgacttcaagtgaactgcgtgaaactgggaaatagttgcgacgatatacgctggttgag

SEQ ID NO: 7177 - DNA, 1164 bp, Muscodor strobelii
  misc_feature: SGI cDNA ID NO. 562150
  misc_feature: Reduced expression when VOC is produced
  misc_feature: Encodes the peptide sequence at SEQ ID NO 7178
atggcaccgcggcgccccgataaaggctcaaagaaacgagccaaagccgcgatctcgcgagctgcggcggccgcagccggtggcagcaccgctagccaacctgtatctccgcaggtcctcgtcaaagccgctgaactccagctccaagcaggaaacattcaggatgcctctaaactcgcagagaaagcactggaagaatctgctgctcgcagtgacgatgcgctctctgccataaacctcctcggccagatatgtctggagctcggcgacttcgagaccgcgcgcatgtacctgcttcgcgctaccgcaatcgatgaagacggatcgaaagatgagagtatcggcggtggtccggagaaattcttgtgcctcgcgcagctcagtgaggagggcgggaaggacagcgtagggtggttcgaaaagggcgctgcggctctcaagaagcagattcagacgctagagacgaagaatcgacgcaccgacgaacaagacatgatgctagaggagctaaggaagaaacttgccatgacgctctgctctgtggctgaagtgtacatgaccgatttatcatgggaagaggatgctgagaagcggtgtgaggcccttaccacggaggccacgatggtcgcgcctgatttcgccgaaacatggcagacgttggccaatgtccgcatttcgcagtcaagattcgatgacgcaaaggcggccttgagccggagtcttgagttgtggaaagatctcccgcccgaagacccttcagtacctgatttccccagccgagtcggtctcgccaggctacttatggaggtcgagcaagagcaggaagctatcgaggtgctcgagcgactcgtcggtgaagacgatcaaagtgtggaggtatggtaccttggcggctggggactctacatcatgggcgaaaagcaaaaagagcaaaaagccgaagaagaccgcaaggcatcatggatctctagccgagtatggcttaaccagtgtttacacctttacaaactacaagactatgaagacgaacgacttggagagcatgcaaaggagctactcgctgccatcgcgaaagagcttggtgaagcgacgccgggagaagcagatgatgacgatgacgaaggctgggaagacgacgaaaccgatgaagagatgaaggaatag

SEQ ID NO: 7178 - protein, 387 aa, Muscodor strobelii
  misc_feature: SGI Peptide ID NO. 562150
  misc_feature (1)..(376): NCBI GI: 154314598 Blast Desc: BC1G_04008 [Botryotinia fuckeliana B05.10] gi|150848630|gb|EDN23823.1| BC1G_04008 [Botryotinia fuckeliana B05.10]
  misc_feature (52)..(387): NCBI GI: 156053221 Blast Desc: SS1G_06778 [Sclerotinia sclerotiorum 1980] gi|154704556|gb|EDO04295.1| SS1G_06778 [Sclerotinia sclerotiorum 1980]
  misc_feature (32)..(386): NCBI GI: 46108496 Blast Desc: FG01130.1 [Gibberella zeae PH-1]
  misc_feature (1)..(384): NCBI GI: 256734404 Blast Desc: [Nectria haematococca mpVI 77-13-4]
  misc_feature (40)..(361): NCBI GI: 242768862 Blast Desc: TPR domain protein [Talaromyces stipitatus ATCC 10500] gi|218724849|gb|EED24266.1| TPR domain protein [Talaromyces stipitatus ATCC 10500]
  misc_feature (37)..(382): NCBI GI: 238843794 Blast Desc: TPR domain-containing protein [Microsporum canis CBS 113480]
  misc_feature (1)..(362): NCBI GI: 121708227 Blast Desc: TPR domain protein [Aspergillus clavatus NRRL 1] gi|119400214|gb|EAW10640.1| TPR domain protein [Aspergillus clavatus NRRL 1]
  misc_feature (25)..(385): NCBI GI: 115391055 Blast Desc: conserved [Aspergillus terreus NIH2624] gi|114193956|gb|EAU35656.1| conserved [Aspergillus terreus NIH2624]
  misc_feature (1)..(377): NCBI GI: 239613472 Blast Desc: TPR domain-containing protein [Ajellomyces dermatitidis ER-3]
  misc_feature (1)..(377): NCBI GI: 261194609 Blast Desc: TPR domain-containing protein [Ajellomyces dermatitidis SLH14081] gi|239588247|gb|EEQ70890.1| TPR domain-containing protein [Ajellomyces dermatitidis SLH14081]
  misc_feature: Useful for introducing or modulating the production of volatile compounds
MAPRRPDKGSKKRAKAAISRAAAAAAGGSTASQPVSPQVLVKAAELQLQAGNIQDASKLAEKALEESAARSDDALSAINLLGQICLELGDFETARMYLLRATAIDEDGSKDESIGGGPEKFLCLAQLSEEGGKDSVGWFEKGAAALKKQIQTLETKNRRTDEQDMMLEELRKKLAMTLCSVAEVYMTDLSWEEDAEKRCEALTTEATMVAPDFAETWQTLANVRISQSRFDDAKAALSRSLELWKDLPPEDPSVPDFPSRVGLARLLMEVEQEQEAIEVLERLVGEDDQSVEVWYLGGWGLYIMGEKQKEQKAEEDRKASWISSRVWLNQCLHLYKLQDYEDERLGEHAKELLAAIAKELGEATPGEADDDDDEGWEDDETDEEMKE

SEQ ID NO: 7179 - DNA, 2309 bp, Muscodor strobelii
  misc_feature: SGI EST ID NO. CUFF.17805.1
  misc_feature: Variant of the nucleotide sequence at SEQ ID NO 7177
caaccagcgtatatcgtcgcaactatttcccagtttcacgcagttcacttgaagtcaaattattctacggtattctgtcatggcaccgcggcgccccgataaaggctcaaagaaacgagccaaagccgcgatctcgcgagctgcggcggccgcagccggtggcagcaccgctagccaacctgtatctccgcaggtcctcgtcaaagccgctgaactccagctccaagcaggaaacattcaggatgcctctaaactcgcagagaaagcactggaagaatctgctgctcgcagtgacgatgcgctctctgccataaacctcctcggccagatatgtctggagctcggcgacttcgagaccgcgcgcatgtacctgcttcgcgctaccgcaatcgatgaagacggatcgaaagatgagagtatcggcggtggtccggagaaattcttgtgcctcgcgcagctcagtgaggagggcgggaaggacagcgtagggtggttcgaaaagggcgctgcggctctcaagaagcagattcagacgctagagacgaagaatcgacgcaccgacgaacaagacatgatgctagaggagctaaggaagaaacttgccatgacgctctgctctgtggctgaagtgtacatgaccgatttatcatgggaagaggatgctgagaagcggtgtgaggcccttaccacggaggccacgatggtcgcgcctgatttcgccgaaacatggcagacgttggccaatgtccgcatttcgcagtcaagattcgatgacgcaaaggcggccttgagccggagtcttgagttgtggaaagatctcccgcccgaagacccttcagtacctgatttccccagccgagtcggtctcgccaggctacttatggaggtcgagcaagagcaggaagctatcgaggtgctcgagcgactcgtcggtgaagacgatcaaagtgtggaggtatggtaccttggcggctggggactctacatcatgggcgaaaagcaaaaagagcaaaaagccgaagaagaccgcaaggcatcatggatctctagccgagtatggcttaaccagtgtttacacctttacaaactacaagactatgaagacgaacgacttggagagcatgcaaaggagctactcgctgccatcgcgaaagagcttggtgaagcgacgccgggagaagcagatgatgacgatgacgaaggctgggaagacgacgaaaccgatgaagagatgaaggaatagtggaccaacaataccataatgctataggttagagagagtactggatttcacggcatgcaagcggcgttcggagtttcaaaaggggtagggtaagacattccaatctacaaggggagaagcaccggcagaaattcaggagtttctgataccaaagatgaatctctctacaatactttacacaggcgcctaaactccatgtaaatgctattcgcaatggtcctgggtataaaacagcttcaaccagatctatgaatagacggtcttatgcttcaaccttgagcttctccatttgctcacttggcgccgtatcatcctcttcctcctcgaccttaccaacgagaccctgcaagaacagttgtttccccgtgagtcgagtcggttctttgatcttggccttcttgagttcagcaaggcgctccacttcttcctgtactttcaactctgccatctcgcgcatgaagtcatcccgccatttctgtgattggtcagtatgacatacgaaatgaaattcttatccagaccgtctcatgggcgatgttccgaaatagggagacgagaatagaggaatatcagatcttactatgaattgttagctcgcggaattaaggtcactaaaccatagagacatgagtacgaacccaagaaagtttctggtgtgacgggtgtgccgtggaatttcttattttcctcgcgctcagcagcaagaagtgcctcttccctttcgcgctcaacggcatccttgcgctcagccatcagctgctcagcagcctcggtcagggttgtgacgatagtaaatatcatggccatgcctaggttctcttgaatagtctcatccagaccctggagtaacgcctccttgtcggctgagactgagaatcgtggatgaggcggtgcattttgaggggcggatatgtctaagataggcgcttcgtcgggatatgattccggatatcgcacatgtagcactagggtcggtggttcgattgcgtcttcaccatcgtcgtcatctgggggatttagtttgatcgcgatgcgatattcggtatcagagatatctgtcgagaaa

SEQ ID NO: 7180 - DNA, 735 bp, Muscodor strobelii
  misc_feature: SGI cDNA ID NO. 562151
  misc_feature: Reduced expression when VOC is produced
  misc_feature: Encodes the peptide sequence at SEQ ID NO 7181
atgccgatccgcaacccctttgccaagcgcccaccattcttgcacattggcgctgatgctgtcaatgatgagaatgctgcacccggctacctagcacccaaggacggcggctttgagagagttgacaccattggatcgcgagcctcgtcctcgtggagcatccgaagcaagaaccaggacaatggcgactacaagatgagtgtcgtaaatgatagcggtatctatcttccgccctcgccaacagacgagaaaggtctctggcccagacggccggccaactcgcggacctcaatggacacacgcagcagcattggcgacattgagcatttctctatctctcgcgaatcattcgactcgtaccgacgttcctttgacgtttgcgccaagtcccctgtcattgtgcacgatgccccgcgacagagcttagactctgccagaatgcctcgaatcccgagaacatccgttagaaaccactccttcgaacaagagcttccaactgccgaggaagctttcgaggatgttgggctcaatgatgagcaaaagcaaacccaacagcaccccaagaagaagagtctgttcagccgatttgccgaacctcaggaatcgaaagaatccaacaacacactttcgcgattcatacccggccgcaaaagggcacaaagcaaccagggcgcagaacttggtccgatggaacgtccccaatcagttgtgctggtggcagccgaggaagcatga

SEQ ID NO: 7181 - protein, 244 aa, Muscodor strobelii
  misc_feature: SGI Peptide ID NO. 562151
  misc_feature (1)..(242): NCBI GI: 46107144 Blast Desc: FG00455.1 [Gibberella zeae PH-1]
  misc_feature (1)..(233): NCBI GI: 171684771 Blast Desc: protein product [Podospora anserina] gi|170942346|emb|CAP67998.1| protein product [Podospora anserina]
  misc_feature (1)..(243): NCBI GI: 261357542 Blast Desc: conserved [Verticillium albo-atrum VaMs.102]
  misc_feature (1)..(237): NCBI GI: 156053223 Blast Desc: SS1G_06779 [Sclerotinia sclerotiorum 1980] gi|154704557|gb|EDO04296.1| SS1G_06779 [Sclerotinia sclerotiorum 1980]
  misc_feature (1)..(237): NCBI GI: 154314600 Blast Desc: BC1G_04009 [Botryotinia fuckeliana B05.10] gi|150848631|gb|EDN23824.1| BC1G_04009 [Botryotinia fuckeliana B05.10]
  misc_feature (1)..(243): NCBI GI: 85110989 Blast Desc: NCU00521 [Neurospora crassa OR74A] gi|28925443|gb|EAA34487.1| conserved [Neurospora crassa OR74A]
  misc_feature (1)..(200): NCBI GI: 39945572 Blast Desc: MGG_04768 [Magnaporthe grisea 70-15] gi|145021356|gb|EDK05485.1| MGG_04768 [Magnaporthe grisea 70-15]
  misc_feature (46)..(236): NCBI GI: 238498504 Blast Desc: conserved [Aspergillus flavus NRRL3357] gi|220693761|gb|EED50106.1| conserved [Aspergillus flavus NRRL3357]
  misc_feature (1)..(239): NCBI GI: 189189398 Blast Desc: [Pyrenophora tritici-repentis Pt-1C-BFP] gi|187972644|gb|EDU40143.1| [Pyrenophora tritici-repentis Pt-1C-BFP]
  misc_feature (31)..(244): NCBI GI: 146322568 Blast Desc: conserved [Aspergillus fumigatus Af293] gi|129557732|gb|EAL90371.2| conserved [Aspergillus fumigatus Af293]
  misc_feature: Useful for introducing or modulating the production of volatile compounds
MPIRNPFAKRPPFLHIGADAVNDENAAPGYLAPKDGGFERVDTIGSRASSSWSIRSKNQDNGDYKMSVVNDSGIYLPPSPTDEKGLWPRRPANSRTSMDTRSSIGDIEHFSISRESFDSYRRSFDVCAKSPVIVHDAPRQSLDSARMPRIPRTSVRNHSFEQELPTAEEAFEDVGLNDEQKQTQQHPKKKSLFSRFAEPQESKESNNTLSRFIPGRKRAQSNQGAELGPMERPQSVVLVAAEEA

SEQ ID NO: 7182 - DNA, 1652 bp, Muscodor strobelii
  misc_feature: SGI EST ID NO. CUFF.17997.0
  misc_feature: Variant of the nucleotide sequence at SEQ ID NO 7180
gaacaggcatgatgatttgtcgaagatataacaatggcgttgatatgaggtcttcgagttgaagaatcaatgaccgtgaacagtacctgtagtgttactagattaggaagtgtcaggtacaggtaccgggtacgcagttgtatgctggctctgcctctaagcacaacgtcatcaataccctgtgcacatcatcccaccggttgtaggtaccgtacgccgtaaagtggcttgggaaagagcgccgtggatatagaccctggatttgcccactttgcccatccgcgccgtcttccggacttacatctcatgactttttacatgctatcgcaagtaaacctctgcacgcatttttcacccgtccattttttgagtagaattgacactattctagctattagaattgttctatctcaactatctcaatagctttcaacccaattcctcgagcctaaactacctatcacaattgaactattctaccagctatccctatctttcttccgaacatgccgatccgcaacccctttgccaagcgcccaccattcttgcacattggcgctgatgctgtcaatgatgagaatgctgcacccggctacctagcacccaaggacggcggctttgagagagttgacaccattggatcgcgagcctcgtcctcgtggagcatccgaagcaagaaccaggacaatggcgactacaagatgagtggtatgttgcaacgttgacaatgcgcatatcggggggctaatttatgaatggcatagtcgtaaatgatagcggtatctatcttccgccctcgccaacagacgagaaaggtctctggcccagacggccggccaactcgcggacctcaatggacacacgcagcagcattggcgacattgagcatttctctatctctcgcgaatcattcgactcgtaccgacgttcctttgacgtttgcgccaagtcccctgtcattgtgcacgatgccccgcgacagagcttagactctgccagaatgcctcgaatcccgagaacatccgttagaaaccactccttcgaacaagagcttccaactgccgaggaagctttcgaggatgttgggctcaatgatgagcaaaagcaaacccaacagcaccccaagaagaagagtctgttcagccgatttgccgaacctcaggaatcgaaagaatccaacaacacactttcgcgattcatacccggccgcaaaagggcacaaagcaaccagggcgcagaacttggtccgatggaacgtccccaatcagttgtgctggtggcagccgaggaagcatgatgacatatacctgggacaaaaacgattatgatttggactacgtgactttacggcgtacggagttgcataggacagggcaacatagcttcgacgatcgcttgccccgtcactggagtcgtgatgatttgacgtagacgctcgtttaaacgggatgaagaagggccgaaatttctggctagcaagaccacggcgacgcaaaaactggttgccaaaatactaatgataatgcgtagagttggatacgggtatgcgatattatagagtcataccagttcgagaaaatggcattacagcttgaaatactgcgtaacgctgttgaaataaataagatcataaacatgaaacccgtcttccc

SEQ ID NO: 7183 - DNA, 852 bp, Muscodor strobelii
  misc_feature: SGI cDNA ID NO. 562152
  misc_feature: Reduced expression when VOC is produced
  misc_feature: Encodes the peptide sequence at SEQ ID NO 7184
atgatttttggcgacgatcacattcttacgctatcatgcccggacaagcctggtatcgtacatgccgtcacaggcttgctggcggcccatgggcttaatgttctcgatcttcagcagttctcagatcgaaactccgagaaattcttcatgagagtacattttggacatgccgagtccacagaattcctcaaggagcctatccagaaactgtcagcagaactgcagatggattatgatttgaggcaagctcaaaagaagccgagggtactaatcatggtatcgaaaatcgggcactgtctcaacgatcttctgtttagaacgaagacgaaccagttgggaattgaagtcccgctcatcgtctccaaccacgcagaattcaacagtctcgcagacagttacgggatcgagttccaccacttgcccgtgaccaaggacacaaagcaggagcaggaacagcaaatcctaaatcttatcgagaaatatgaaattgagctcgtggtgcttgcgcggtacatgcaagtattgagcccgaaactatgtgaagccatgagcggaaagatcatcaacattcatcatagcttcctgccatcgttcaagggtgcaaaaccatatcaccaagcatatgaccgaggtgtgaaaatcatcggcgctacagctcatttcgtgacagcagatctggacgaaggccccataatcgagcaaagagtcgtccgagtcgatcacgctatgggtccaaaggaattggtagacgagggtagcaacgtcgagtcgcaggtgcttgctgcagcagtgaagtggtggtctgagaagagagtgttcttgaatggccataagacagtcgtatttaattga

SEQ ID NO: 7184 - protein, 283 aa, Muscodor strobelii
  misc_feature: SGI Peptide ID NO. 562152
  misc_feature (7)..(72): Pfam Id: PF01842 Pfam Desc: ACT domain
  misc_feature (87)..(264): Pfam Id: PF00551 Pfam Desc: Formyl transferase
  misc_feature (4)..(283): NCBI GI: 169617319 Blast Desc: SNOG_11837 [Phaeosphaeria nodorum SN15] gi|111059761|gb|EAT80881.1| SNOG_11837 [Phaeosphaeria nodorum SN15]
  misc_feature (4)..(283): NCBI GI: 189188610 Blast Desc: formyltetrahydrofolate deformylase hydrolase [Pyrenophora tritici-repentis Pt-1C-BFP] gi|187972250|gb|EDU39749.1| formyltetrahydrofolate deformylase
  misc_feature (3)..(283): NCBI GI: 261353973 Blast Desc: Formyl transferase [Verticillium albo-atrum VaMs.102]
  misc_feature (3)..(283): NCBI GI: 46130832 Blast Desc: FG08971.1 [Gibberella zeae PH-1]
  misc_feature (4)..(282): NCBI GI: 170940393 Blast Desc: protein product [Podospora anserina]
  misc_feature (5)..(283): NCBI GI: 85090213 Blast Desc: formyltetrahydrofolate deformylase [Neurospora crassa OR74A] gi|28919659|gb|EAA29074.1| formyltetrahydrofolate deformylase [Neurospora crassa OR74A]
  misc_feature (6)..(282): NCBI GI: 116194169 Blast Desc: conserved [Chaetomium globosum CBS 148.51] gi|88182715|gb|EAQ90183.1| conserved [Chaetomium globosum CBS 148.51]
  misc_feature (1)..(283): NCBI GI: 145611995 Blast Desc: MGG_08008 [Magnaporthe grisea 70-15] gi|145019242|gb|EDK03470.1| MGG_08008 [Magnaporthe grisea 70-15]
  misc_feature (1)..(283): NCBI GI: 156054848 Blast Desc: formyltetrahydrofolate deformylase [Sclerotinia sclerotiorum 1980] gi|154704052|gb|EDO03791.1| formyltetrahydrofolate deformylase [Sclerotinia sclerotiorum
  misc_feature (8)..(283): NCBI GI: 67516427 Blast Desc: AN0495.2 [Aspergillus nidulans FGSC A4] gi|40747438|gb|EAA66594.1| AN0495.2 [Aspergillus nidulans FGSC A4] gi|259489252|tpe|CBF89369.1| TPA: formyltetrahydrofolate FGSC
  misc_feature (7)..(283): SWISSPROT Homolog: EC 3.5.1.10 Formyltetrahydrofolate deformylase
  misc_feature: Useful for introducing or modulating the production of volatile compounds
MIFGDDHILTLSCPDKPGIVHAVTGLLAAHGLNVLDLQQFSDRNSEKFFMRVHFGHAESTEFLKEPIQKLSAELQMDYDLRQAQKKPRVLIMVSKIGHCLNDLLFRTKTNQLGIEVPLIVSNHAEFNSLADSYGIEFHHLPVTKDTKQEQEQQILNLIEKYEIELVVLARYMQVLSPKLCEAMSGKIINIHHSFLPSFKGAKPYHQAYDRGVKIIGATAHFVTADLDEGPIIEQRVVRVDHAMGPKELVDEGSNVESQVLAAAVKWWSEKRVFLNGHKTVVFN

SEQ ID NO: 7185 - DNA, 1707 bp, Muscodor strobelii
  misc_feature: SGI EST ID NO. CUFF.17785.0
  misc_feature: Variant of the nucleotide sequence at SEQ ID NO 7183
ataacattcaatgaaggcgtttactatctataactactttgaaagaaacactcttggtcatgtggcacggattcatgcttgattcaattttgctgtctgatctacttttgtatggagaggtgttacatcagtgatctctcacactgcgaactcaaccctgtcagccaagcacgtgtaagcaatgcttctccctcgacaattcaccattttgtttctgaccaatattatattgtgcaagataattgcattttgttatttcccgcgcaaattcttgagtatatctcattgacggaatgagagacaccgaagaaattatgcataacaccgatattagcatatattggccttgtcgcaaatttgaactccgagttgcggccgagacctgtcgccagtgactcgatggctaggtcatttttggcgttgttgatgaaatggatattgttagtcatagccataatcgaaagcacagagattttcaacttcttcgatcgtatcgttgaaatcaaaaggttataaaatgatttttggcgacgatcacattcttacgctatcatgcccggacaagcctggtatcgtacatgccgtcacaggcttgctggcggcccatgggcttaatgttctcgatcttcagcagttctcagatcgaaactccgagaaattcttcatgagagtacattttggacatgccgagtccacagaattcctcaaggagcctatccagaaactgtcagcagaactgcagatggattatgatttgaggcaagctcaaaagaagccgagggtactaatcatggtatcgaaaatcgggcactgtctcaacgatcttctgtttagaacgaagacgaaccagttgggaattgaagtcccgctcatcgtctccaaccacgcagaattcaacagtctcgcagacagttacgggatcgagttccaccacttgcccgtgaccaaggacacaaagcaggagcaggaacagcaaatcctaaatcttatcgagaaatatgaaattgagctcgtggtgcttgcgcggtacatgcaagtattgagcccgaaactatgtgaagccatgagcggaaagatcatcaacattcatcatagcttcctgccatcgttcaagggtgcaaaaccatatcaccaagcatatgaccgaggtgtgaaaatcatcggcgctacagctcatttcgtgacagcagatctggacgaaggccccataatcgagcaaagagtcgtccgagtcgatcacgctatgggtccaaaggaattggtagacgagggtagcaacgtcgagtcgcaggtgcttgctgcagcagtgaagtggtggtctgagaagagagtgttcttgaatggccataagacagtcgtatttaattgatagcagcatggtctgatgggcaaccatcgttgtctttcctacatgcacttgaaccaaaacacaatcaatcaattttctcgatttcatgattgccatcctccatcgatttctccttgctgttacacatccgacgtggagcgaggaataatttcgagattgaaagggcctaactcggcttcacgcatgcaacatgcagacttcgactacatgctcttgatattcgttaatgttgtggcattagctctgtgcaacaagcaagtatcgtctgtgtgagcatatacttgtaggatgaggaaaaggaatagagaaaaatatgttttctcaacatgtcaggtcag

SEQ ID NO: 7186 - DNA, 729 bp, Muscodor strobelii
  misc_feature: SGI cDNA ID NO. 562153
  misc_feature: Encodes the peptide sequence at SEQ ID NO 7187
atgttattagcaaataaccatcgccggaccccattacccatcccttctccttcggaccatactggtcctcactatcctctcccccctattcaccctaacaccaccttggctactgtaacaaccagtgccactccctcctcgacactcgcaccagccattggaaccaccaccgcatcgaccaccacctcgaccaccacatcgaccaccgcagccctacccggagcgtcgaacagcgccgaagcccagcagcatgccgcgaagattgccgtgggtgctggcacgggcgcaggagtggtggttgcggctgccatcctcttcttgctttggctcttgccaaagcgcaagaccaaacgccgcaacaccatcttcgatggcgagtggctggacggaacagcgtcggctgtgaagtccgaatcgagtgttgatggcccggccgagctaccagctacgccccttgctatcaccttccgtggtccggtcgaattgccggccacacccctctccatcacctttccccgtgccgccaggatctctctcaaggcacctctcttcctcaacaagcctctcccacacctcccattcctcccctattacaagcgcgactcttcccaggcccagctgggagagcttcgggccacactggcctcgacggacatggagaagagcctgggcctctatgcgaatggatggtcgaatagtgtccattacgagtttccgtccgaggaatga

SEQ ID NO: 7187 - protein, 242 aa, Muscodor strobelii
  misc_feature: SGI Peptide ID NO. 562153
MLLANNHRRTPLPIPSPSDHTGPHYPLPPIHPNTTLATVTTSATPSSTLAPAIGTTTASTTTSTTTSTTAALPGASNSAEAQQHAAKIAVGAGTGAGVVVAAAILFLLWLLPKRKTKRRNTIFDGEWLDGTASAVKSESSVDGPAELPATPLAITFRGPVELPATPLSITFPRAARISLKAPLFLNKPLPHLPFLPYYKRDSSQAQLGELRATLASTDMEKSLGLYANGWSNSVHYEFPSEE

SEQ ID NO: 7188 - DNA, 444 bp, Muscodor strobelii
  misc_feature: SGI cDNA ID NO. 562154
  misc_feature: Encodes the peptide sequence at SEQ ID NO 7189
atgtcgcaacagacccagcagttccaccaaacctcccgcgccaaggcccaagccactggtaacgaggaggcttcaaccaccatcagcctcggcgagttccagaatgttgataccctcaccctctccgaagctgctctcgtcatcggtgccatcgttgagaagcgccagcacaacaacaagctgaaccacaccgagatgctgtcaaaaaccattgactacctcgatgccttctcgcggttcaagaacaagcaatccgtcgaggctattgagcgtctactcagctctcgcaaggagttccacaacttcgagcgcgcccagcttggctcgctctgctgcgaaactgccgaggaggccaagactctgatcccttccttgacggacaagatctcggacgaggacctgcagtatatcctcgacgagatgtacaacatgatgcctaaatga

SEQ ID NO: 7189 - protein, 147 aa, Muscodor strobelii
  misc_feature: SGI Peptide ID NO. 562154
  misc_feature (34)..(145): Pfam Id: PF03874 Pfam Desc: RNA polymerase Rpb4
  misc_feature (3)..(144): NCBI GI: 261356593 Blast Desc: conserved [Verticillium albo-atrum VaMs.102]
  misc_feature (6)..(145): NCBI GI: 85111201 Blast Desc: NCU09378 [Neurospora crassa OR74A] gi|28925563|gb|EAA34588.1| conserved [Neurospora crassa OR74A]
  misc_feature (10)..(144): NCBI GI: 256735120 Blast Desc: [Nectria haematococca mpVI 77-13-4]
  misc_feature (11)..(145): NCBI GI: 156050981 Blast Desc: SS1G_08079 [Sclerotinia sclerotiorum 1980] gi|154692478|gb|EDN92216.1| SS1G_08079 [Sclerotinia sclerotiorum 1980]
  misc_feature (11)..(145): NCBI GI: 154296757 Blast Desc: BC1G_12406 [Botryotinia fuckeliana B05.10] gi|150843245|gb|EDN18438.1| BC1G_12406 [Botryotinia fuckeliana B05.10]
  misc_feature (2)..(144): NCBI GI: 46108486 Blast Desc: FG01125.1 [Gibberella zeae PH-1]
  misc_feature (6)..(145): NCBI GI: 116206890 Blast Desc: CHGG_02738 [Chaetomium globosum CBS 148.51] gi|88183335|gb|EAQ90803.1| CHGG_02738 [Chaetomium globosum CBS 148.51]
  misc_feature (6)..(130): NCBI GI: 171680343 Blast Desc: protein product [Podospora anserina] gi|170939798|emb|CAP65024.1| protein product [Podospora anserina]
  misc_feature (23)..(144): NCBI GI: 240110576 Blast Desc: RNA polymerase Rpb4 family protein [Coccidioides posadasii C735 delta SOWgp]
  misc_feature (1)..(144): NCBI GI: 238845035 Blast Desc: polymerase II polypeptide D [Microsporum canis CBS 113480]
  misc_feature (21)..(141): SWISSPROT Homolog: EC 2.7.7.6 DNA-directed RNA polymerase
MSQQTQQFHQTSRAKAQATGNEEASTTISLGEFQNVDTLTLSEAALVIGAIVEKRQHNNKLNHTEMLSKTIDYLDAFSRFKNKQSVEAIERLLSSRKEFHNFERAQLGSLCCETAEEAKTLIPSLTDKISDEDLQYILDEMYNMMPK

SEQ ID NO: 7190 - DNA, 2501 bp, Muscodor strobelii
  misc_feature: SGI EST ID NO. CUFF.17821.1
  misc_feature: Variant of the nucleotide sequence at SEQ ID NO 7188
ttcttttccgttgtaacaaaggcccaacccgagacgtcaacgaggctgcgacgaggccaccaattgcatccactgcacaacatcgctatatatcaatctacatcggcacccgcgctcacactcgtattctgtgatttgcgctctgctctgccagcgtgcgcgctcgtcctcgtgtcacgcgctcatcctctcagcctgcactcgccggtttccgctcgttattgtacacactccctcagcctctggcgcgcgcacacagagaagcatcatcgccgcaaaaatatctgaactcgctgcaatgaggcccgttgcaaacatgtcgcaacagacccagcagttccaccaaacctcccgcgccaaggcccaagccactggtaacgaggaggcttcaaccaccatcagcctcggcgagttccagaatgttgataccctcaccctctccgaagctgctctcgtcatcggtgccatcgttgagaagcgccagcacaacaacaagctgaaccacaccgagatgctgtcaaaaaccattgactacctcgatgccttctcgcggttcaagaacaagcaatccgtcgaggctattgagcgtctactcagctctcgcaaggagttccacaacttcgagcgcgcccagcttggctcgctctgctgcgaaactgccgaggaggccaagactctgatcccttccttgacggacaagatctcggacgaggacctgcagtatatcctcgacgagatgtacaacatgatgcctaaatgagcgagaaagaaccctcaactactcatatgcctacgtgctaattatcgtctctgatggcgtctctggaagtcgtaagtggcatcagcgaagtccacttgaatctgcgcgactgcctatatccagtgaaccagtctggaatccagactagagacaacaaattaacactcgagtacccgtcatttcaagcgttttctttttacaggaaatttccccattcaatctgcttatttgcataaagactgctgcgtacaaaaagggcatcggacggcgttcgtggaatggctgatgaatcaaggggcagggtgagaaggaacaagtgtgatttcttcagccctctgcaagatcgattggcctgttttcgtgtcttcatgttcgtttggtccttttcattttgtttaaataccccacaagacaggaaaactcaaggaatcaggtagagagaatcagatgagagatttttgatccatctggtcaagtgtgagacagcctcaacaattcataatgatgaagattatgtcgctacgttttcgggatgcaatatgtgaagagaaaagaaaagaaaaactcaattgcctgcctatgcttgaactactgactgggtatagggggtatctcctgcgaactcccgaaaactcccgaaaacaaaaacaacgcaggaaaacatgatagagaggagagtgctgggtatctctgaaaacaggcccaaaaccgaaaatgcgtgatcctccatccctccgttcttcgttctggctaccgtcaactacccctaatcgatggcaattgccatttcctcatgactcttcagacggaaactcattcctcggacggaaactcgtaatggacactattcgaccatccattcgcatagaggcccaggctcttctccatgtccgtcgaggccagtgtggcccgaagctctcccagctgggcctgggaagagtcgcgcttgtaataggggaggaatgggaggtgtgggagaggcttgttgaggaagagaggtgccttgagagagatcctggcggcacggggaaaggtgatggagaggggtgtggccggcaattcgaccggaccacggaaggtgatagcaaggggcgtagctggtagctcggccgggccatcaacactcgattcggacttcacagccgacgctgttccgtccagccactcgccatcgaagatggtgttgcggcgtttggtcttgcgctttggcaagagccaaagcaagaagaggatggcagccgcaaccaccactcctgcgcccgtgccagcacccacggcaatcttcgcggcatgctgctgggcttcggcgctgttcgacgctccgggtagggctgcggtggtcgatgtggtggtcgaggtggtggtcgatgcggtggtggttccaatggctggtgcgagtgtcgaggagggagtggcactggttgttacagtagccaaggtggtgttagggtgaataggggggagaggatagtgaggaccagtatggtccgaaggagaagggatgggtaatggggtccggcgatggtctgcatcttggcgaggactgtgagtaagatggtaggtgaaaggttattccgaagcttatgcgatgattacccgaaggtctctgatgttggtcctcaatatatatagtcgtttatatataataggaaacggtggtcgatgatgagtgtgagggtatgagagtatgaggtgtgagagtatgtatgtgagagtatgtatgtgagagtatgtgtgtgag

SEQ ID NO: 7191 - DNA, 501 bp, Muscodor strobelii
  misc_feature: SGI cDNA ID NO. 562155
  misc_feature: Encodes the peptide sequence at SEQ ID NO 7192
atggcatgtgcggtacccttcagtgacttaggccttgccagggcaatattagctctcatagtcatcaacaaggcaggcggcctcatctacaacaagtcgtttgctgagggcctcaaccagctcaatacaaatgactatctcgtcctggctggtacctttcacggagtccatgccataacaacccgcctaaatcccatcaagaatccagcccaagccgcagccagcgggatacccaaccgtcccgagccagcaggcggcctcgaagtcctggaatcagagaacttccgcctgcagtgcttcaacactatgacgggcacaaaatttctactcttcacagataccctgcaagccaatgtcgatgtagctatgcacaaggtctacgatttgtacgcggactacgtcaccaagaacccattctaccagttggagatgcccatacgctgcgagacgtttgatcggaagcttggctcgtatatcaaagagatgaataacgctcggtga

SEQ ID NO: 7192 - protein, 166 aa, Muscodor strobelii
  misc_feature: SGI Peptide ID NO. 562155
  misc_feature (16)..(162): Pfam Id: PF04099 Pfam Desc: Sybindin-like family
  misc_feature (15)..(164): NCBI GI: 256734408 Blast Desc: NECHADRAFT_102360 [Nectria haematococca mpVI 77-13-4]
  misc_feature (8)..(164): NCBI GI: 171684791 Blast Desc: protein product [Podospora anserina] gi|170942356|emb|CAP68008.1| protein product [Podospora anserina]
  misc_feature (15)..(164): NCBI GI: 9367303 Blast Desc: conserved [Neurospora crassa]
  misc_feature (12)..(164): NCBI GI: 116192395 Blast Desc: conserved [Chaetomium globosum CBS 148.51] gi|88181828|gb|EAQ89296.1| conserved [Chaetomium globosum CBS 148.51]
  misc_feature (12)..(160): NCBI GI: 238844981 Blast Desc: Trappc4 protein [Microsporum canis CBS 113480]
  misc_feature (15)..(160): NCBI GI: 71002320 Blast Desc: Sybindin-like family protein [Aspergillus fumigatus Af293] gi|66853479|gb|EAL93803.1| Sybindin-like family protein [Aspergillus fumigatus Af293] gi|159129898|gb|EDP55012.1| family
  misc_feature (15)..(160): NCBI GI: 119481887 Blast Desc: sybindin-like family protein [Neosartorya fischeri NRRL 181] gi|119409126|gb|EAW19075.1| sybindin-like family protein [Neosartorya fischeri NRRL 181]
  misc_feature (15)..(160): NCBI GI: 119195975 Blast Desc: CIMG_02362 [Coccidioides immitis RS] gi|240110581|gb|EER28739.1| Sybindin-like family protein [Coccidioides posadasii C735 delta SOWgp]
  misc_feature (14)..(160): NCBI GI: 255930781 Blast Desc: Pc12g00430 [Penicillium chrysogenum Wisconsin 54-1255] gi|211581566|emb|CAP79670.1| Pc12g00430 [Penicillium chrysogenum Wisconsin 54-1255]
  misc_feature (13)..(163): NCBI GI: 156050979 Blast Desc: SS1G_08078 [Sclerotinia sclerotiorum 1980] gi|154692477|gb|EDN92215.1| SS1G_08078 [Sclerotinia sclerotiorum 1980]
MACAVPFSDLGLARAILALIVINKAGGLIYNKSFAEGLNQLNTNDYLVLAGTFHGVHAITTRLNPIKNPAQAAASGIPNRPEPAGGLEVLESENFRLQCFNTMTGTKFLLFTDTLQANVDVAMHKVYDLYADYVTKNPFYQLEMPIRCETFDRKLGSYIKEMNNAR

SEQ ID NO: 7193 - DNA, 2162 bp, Muscodor strobelii
  misc_feature: SGI EST ID NO. CUFF.18015.0
  misc_feature: Variant of the nucleotide sequence at SEQ ID NO 7191
ccaaagtctcatcaaccacccgcagttaatacaatcgttcataaactcactcattcgctaagtctctgagagaacagccaatgagaggatacgcgcttagcatatcaaggctatgaaacttgcataacgcgtcttgatctacatcgacatcggccgaacgaagcaatcactcataattaatgcttcatatatgttcaatccttagcctcatgataaatccaacatggcaatattagctctcatagtcatcaacaaggcaggcggcctcatctacaacaagtcgtttgctgagggcctcaaccagctcaatacaaatgactatctcgtcctggctggtacctttcacggagtccatgccataacaacccgcctaaatcccatcaagaatccagcccaagccgcagccagcgggatacccaaccgtcccgagccagcaggcggcctcgaagtcctggaatcagagaacttccgcctgcagtgcttcaacactatgacgggcacaaaatttctactcttcacagataccctgcaagccaatgtcgatgtagctatgcacaaggtctacgatttgtacgcggactacgtcaccaagaacccattctaccagttggagatgcccatacgctgcgagacgtttgatcggaagcttggctcgtatatcaaagagatgaataacgctcggtgatctggatccactcctcgagagaggatacgatgagcatggcatggcatggcgtccggagttggtagttacgttaagttacgcagttagagtaattagataagcagagtttcttttacggatcaaacatatttcaagcattgggatctattggaagtcttgattctctttcgtttctttggcaaagatgaccatggtctaaactcgccatcgataattctcagatctagtagtgtacagtccgcatgctccagtccgtactcctgagccatgaactttctctagttcccatttatcatgattcatccatcttatcatcgtctttcttactaccacttgcctctcccttgtcgtccagtaacggctggttctcaccctcctccttgatgtcctcgaggttcgagtcctttgcgctatccttggcagctttggcctgccgggcattctcctcctccatactcatgcgcagggcaagggccaactcgggatcggcactaggatcaaagtcgaagccaccaaagtcaccaccgccttcggccataccgccgccagaacctccagcagcaccttcgcctaataggatcggtgtggatagcagctggtcactgagaagcttgccgcttgggggaataacgacgagatgggagttatcactacccttgactacgtcgttgaaggcctcgagcttctgctggacgtcgtcgtcatcgaggtcgccaaagaggatgaagtcgatatcgatgttgcctttcttcatcttcttggccagagccacaagtctatctttgtcgtcggatacgggggagcatacgaagactatgatgcgctggcgttgtgatttgttctgtctgtgtttcaatgcgagctatcatggaatgttagcgatggtggtaggatgaagagagggtcggggctacggaactcacactggcgatctggataccagtagcgaggttggaagagcccgagatcttcttcttggtgcgatgtatgccctctaggagcttcccccgttccgtggtcagtgttgagaggacctctggacccttgccacccatgctcatcaggccgacggacgactccggatttccttgtgtgacgctgtcgaataggatgttaaccgcatcagcctgtgcatcaaaacgagagggtgcgtaatctccgttgcgactgctctcggaattgtccaccactagcatcacggcctggagcggcatcttgacgagggacgatggatggacggatcgagtcggacggttaggagggggcttggagagggagaggatggctcgtggcaggaatgtagacctcaagactggtaccggagtctgtagagtggcgcttgacaagtatggcagtaaggagaggcgatgaatgaagcatgaggctactatggttcgatgtggtgaggtggtgggagcgtgcaaataggtacctcagcaagtcggctaggtgctgtgcaaacgtcagggcggtgcag

SEQ ID NO: 7194 - DNA, 861 bp, Muscodor strobelii
  misc_feature: SGI cDNA ID NO. 562156
  misc_feature: Reduced expression when VOC is produced
  misc_feature: Encodes the peptide sequence at SEQ ID NO 7195
atgccgctccaggccgtgatgctagtggtggacaattccgagagcagtcgcaacggagattacgcaccctctcgttttgatgcacaggctgatgcggttaacatcctattcgacagcgtcacacaaggaaatccggagtcgtccgtcggcctgatgagcatgggtggcaagggtccagaggtcctctcaacactgaccacggaacgggggaagctcctagagggcatacatcgcaccaagaagaagatctcgggctcttccaacctcgctactggtatccagatcgccagtctcgcattgaaacacagacagaacaaatcacaacgccagcgcatcatagtcttcgtatgctcccccgtatccgacgacaaagatagacttgtggctctggccaagaagatgaagaaaggcaacatcgatatcgacttcatcctctttggcgacctcgatgacgacgacgtccagcagaagctcgaggccttcaacgacgtagtcaagggtagtgataactcccatctcgtcgttattcccccaagcggcaagcttctcagtgaccagctgctatccacaccgatcctattaggcgaaggtgctgctggaggttctggcggcggtatggccgaaggcggtggtgactttggtggcttcgactttgatcctagtgccgatcccgagttggcccttgccctgcgcatgagtatggaggaggagaatgcccggcaggccaaagctgccaaggatagcgcaaaggactcgaacctcgaggacatcaaggaggagggtgagaaccagccgttactggacgacaagggagaggcaagtggtagtaagaaagacgatgataagatggatgaatcatga

SEQ ID NO: 7195 - protein, 286 aa, Muscodor strobelii
  misc_feature: SGI Peptide ID NO. 562156
  misc_feature (220)..(237): Pfam Id: PF02809 Pfam Desc: Ubiquitin interaction motif
  misc_feature (5)..(147): Pfam Id: PF00092 Pfam Desc: von Willebrand factor type A domain
  misc_feature (1)..(286): NCBI GI: 116192397 Blast Desc: CHGG_05916 [Chaetomium globosum CBS 148.51] gi|88181829|gb|EAQ89297.1| CHGG_05916 [Chaetomium globosum CBS 148.51]
  misc_feature (1)..(276): NCBI GI: 256735121 Blast Desc: NECHADRAFT_98745 [Nectria haematococca mpVI 77-13-4]
  misc_feature (1)..(276): NCBI GI: 154296761 Blast Desc: 26S proteasome regulatory subunit S5A, multiubiquitin chain binding protein [Botryotinia fuckeliana B05.10] gi|150843247|gb|EDN18440.1| 26S proteasome regulatory subunit
  misc_feature (1)..(286): NCBI GI: 171684789 Blast Desc: protein product [Podospora anserina] gi|170942355|emb|CAP68007.1| protein product [Podospora anserina]
  misc_feature (1)..(264): NCBI GI: 46108482 Blast Desc: FG01123.1 [Gibberella zeae PH-1]
  misc_feature (1)..(276): NCBI GI: 156050977 Blast Desc: SS1G_08077 [Sclerotinia sclerotiorum 1980] gi|154692476|gb|EDN92214.1| SS1G_08077 [Sclerotinia sclerotiorum 1980]
  misc_feature (1)..(286): NCBI GI: 39945048 Blast Desc: MGG_04506 [Magnaporthe grisea 70-15] gi|145011387|gb|EDJ96043.1| MGG_04506 [Magnaporthe grisea 70-15]
  misc_feature (1)..(282): NCBI GI: 85118041 Blast Desc: NCU02982 [Neurospora crassa OR74A] gi|9367304|emb|CAB97320.1| multiubiquitin chain binding protein (MBP1) [Neurospora crassa] gi|28927176|gb|EAA36132.1| NCU02982
  misc_feature (1)..(250): NCBI GI: 261356592 Blast Desc: 26S proteasome non-ATPase regulatory subunit 4 [Verticillium albo-atrum VaMs.102]
  misc_feature (1)..(268): NCBI GI: 225556412 Blast Desc: 26S proteasome regulatory subunit [Ajellomyces capsulatus G186AR] gi|240273520|gb|EER37040.1| 26S proteasome regulatory subunit [Ajellomyces capsulatus H143]
  misc_feature: Useful for introducing or modulating the production of volatile compounds
MPLQAVMLVVDNSESSRNGDYAPSRFDAQADAVNILFDSVTQGNPESSVGLMSMGGKGPEVLSTLTTERGKLLEGIHRTKKKISGSSNLATGIQIASLALKHRQNKSQRQRIIVFVCSPVSDDKDRLVALAKKMKKGNIDIDFILFGDLDDDDVQQKLEAFNDVVKGSDNSHLVVIPPSGKLLSDQLLSTPILLGEGAAGGSGGGMAEGGGDFGGFDFDPSADPELALALRMSMEEENARQAKAAKDSAKDSNLEDIKEEGENQPLLDDKGEASGSKKDDDKMDES

SEQ ID NO: 7196 - DNA, 1865 bp, Muscodor strobelii
  misc_feature: SGI EST ID NO. CUFF.18016.1
  misc_feature: Variant of the nucleotide sequence at SEQ ID NO 7194
ctccccacccctgccagtgagccgttctgccccatggatgccggacctctcaaggctgcaccgccctgacgtttgcacagcacctagccgacttgctgaggtacctatttgcacgctcccaccacctcaccacatcgaaccatagtagcctcatgcttcattcatcgcctctccttactgccatacttgtcaagcgccactctacagactccggtaccagtcttgaggtctacattcctgccacgagccatcctctccctctccaagccccctcctaaccgtccgactcgatccgtccatccatcgtccctcgtcaagatgccgctccaggccgtgatgctagtggtggacaattccgagagcagtcgcaacggagattacgcaccctctcgttttgatgcacaggctgatgcggttaacatcctattcgacagcgtcacacaaggaaatccggagtcgtccgtcggcctgatgagcatgggtggcaagggtccagaggtcctctcaacactgaccacggaacgggggaagctcctagagggcatacatcgcaccaagaagaagatctcgggctcttccaacctcgctactggtatccagatcgccagtctcgcattgaaacacagacagaacaaatcacaacgccagcgcatcatagtcttcgtatgctcccccgtatccgacgacaaagatagacttgtggctctggccaagaagatgaagaaaggcaacatcgatatcgacttcatcctctttggcgacctcgatgacgacgacgtccagcagaagctcgaggccttcaacgacgtagtcaagggtagtgataactcccatctcgtcgttattcccccaagcggcaagcttctcagtgaccagctgctatccacaccgatcctattaggcgaaggtgctgctggaggttctggcggcggtatggccgaaggcggtggtgactttggtggcttcgactttgatcctagtgccgatcccgagttggcccttgccctgcgcatgagtatggaggaggagaatgcccggcaggccaaagctgccaaggatagcgcaaaggactcgaacctcgaggacatcaaggaggagggtgagaaccagccgttactggacgacaagggagaggcaagtggtagtaagaaagacgatgataagatggatgaatcatgataaatgggaactagagaaagttcatggctcaggagtacggactggagcatgcggactgtacactactagatctgagaattatcgatggcgagtttagaccatggtcatctttgccaaagaaacgaaagagaatcaagacttccaatagatcccaatgcttgaaatatgtttgatccgtaaaagaaactctgcttatctaattactctaactgcgtaacttaacgtaactaccaactccggacgccatgccatgccatgctcatcgtatcctctctcgaggagtggatccagatcaccgagcgttattcatctctttgatatacgagccaagcttccgatcaaacgtctcgcagcgtatgggcatctccaactggtagaatgggttcttggtgacgtagtccgcgtacaaatcgtagaccttgtgcatagctacatcgacattggcttgcagggtatctgtgaagagtagaaattttgtgcccgtcatagtgttgaagcactgcaggcggaagttctctgattccaggacttcgaggccgcctgctggctcgggacggttgggtatcccgctggctgcggcttgggctggattcttgatgggatttaggcgggttgttatggcatggactctggaaaatgagatgagcatgttgtgagagagtttgggtatgagtgacgctcacccg

SEQ ID NO: 7197 - DNA, 1080 bp, Muscodor strobelii
  misc_feature: SGI cDNA ID NO. 562157
  misc_feature: Reduced expression when VOC is produced
  misc_feature: Encodes the peptide sequence at SEQ ID NO 7198
atggatcccggctcatcgaagaaacgatcagccagtcgctctcccgagcggagcccgaccaagagcttcaccaagaagctcaaaaccggcatcacagccatccagaaacaagccttagtcgacaacctgcagcttgagatcactgaacgtgctcgccgtctcagagcccagtataacatccaagctcagcagttgcgatcacgcctcgagatgcgcgtcttccgcgtcccctacaaactccgcaaaatgaccatgggcgaactgttcgagaagtcactgcagcctcagctgcctcccgtcccgcccaagtcctcgtacgtacctgccgccagacctccacctgtcccggccaaggactcgcccaagcctgtcccaaagcccattgctcggaagccagtgcccgtgcgcagctcggttgctgaacccaagccctcgacgtatggcgcgccaccagcgcttccgtccgcgtccgcgctaacactccccagcgacgacatctctggtgcaaacaaggagaactatgctgcccccgttagtaagggggagccgcgaaaccgcgttgtgccggcgctctctaaggccccagcctctgctgctcaagtcctgtcaccgacgtcgtctaacacacgcgtcatgccccgggaacgcccagcttcacccatgaaatccatgatcagccggcccatgtcacctgtcaagactaccgccgccacatcagctacaactgcatccgccgccaagggctcttcaaacattctttcaacattcgttggcaaagccagagccacacgaactgcagcgagcaccagaaaagctaccacatcctcaaacaccagctcgaatagtggtgccgtacccgctgccaccacagcgactggccgcgtccgcaaagccgctgcaccccctccatccacatcaactacacgcggacgacgcagagtcagcgctaatagcgagacaagcgagaagagcacaggcacagtgatcagaaaggcggcagctgcgccgaagaaaacggcaactaagaaggccacggcggcgcctaccacaacgggtagaactttacggaagcgcggttag

SEQ ID NO: 7198 - protein, 359 aa, Muscodor strobelii
  misc_feature: SGI Peptide ID NO. 562157
  misc_feature (14)..(355): NCBI GI: 39945046 Blast Desc: MGG_04505 [Magnaporthe grisea 70-15] gi|145011388|gb|EDJ96044.1| MGG_04505 [Magnaporthe grisea 70-15]
  misc_feature (25)..(262): NCBI GI: 85118045 Blast Desc: NCU02983 [Neurospora crassa OR74A] gi|16945396|emb|CAB97321.2| [Neurospora crassa] gi|28927177|gb|EAA36133.1| [Neurospora crassa OR74A]
  misc_feature (12)..(358): NCBI GI: 46108480 Blast Desc: FG01122.1 [Gibberella zeae PH-1]
  misc_feature (18)..(331): NCBI GI: 116192399 Blast Desc: CHGG_05917 [Chaetomium globosum CBS 148.51] gi|88181830|gb|EAQ89298.1| CHGG_05917 [Chaetomium globosum CBS 148.51]
  misc_feature (16)..(331): NCBI GI: 171684787 Blast Desc: protein product [Podospora anserina] gi|170942354|emb|CAP68006.1| protein product [Podospora anserina]
  misc_feature (31)..(222): NCBI GI: 154296763 Blast Desc: BC1G_12409 [Botryotinia fuckeliana B05.10] gi|150843248|gb|EDN18441.1| BC1G_12409 [Botryotinia fuckeliana B05.10]
  misc_feature (25)..(233): NCBI GI: 212539099 Blast Desc: conserved [Penicillium marneffei ATCC 18224] gi|210069447|gb|EEA23538.1| conserved [Penicillium marneffei ATCC 18224]
  misc_feature (25)..(233): NCBI GI: 242819604 Blast Desc: conserved [Talaromyces stipitatus ATCC 10500] gi|218713817|gb|EED13241.1| conserved [Talaromyces stipitatus ATCC 10500]
  misc_feature (25)..(251): NCBI GI: 71002316 Blast Desc: conserved [Aspergillus fumigatus Af293] gi|66853477|gb|EAL93801.1| conserved [Aspergillus fumigatus Af293] gi|159129896|gb|EDP55010.1| conserved [Aspergillus A1163]
  misc_feature (17)..(244): NCBI GI: 145250655 Blast Desc: An15g03030 [Aspergillus niger] gi|134082363|emb|CAK42378.1| protein product [Aspergillus niger]
  misc_feature: Useful for introducing or modulating the production of volatile compounds
MDPGSSKKRSASRSPERSPTKSFTKKLKTGITAIQKQALVDNLQLEITERARRLRAQYNIQAQQLRSRLEMRVFRVPYKLRKMTMGELFEKSLQPQLPPVPPKSSYVPAARPPPVPAKDSPKPVPKPIARKPVPVRSSVAEPKPSTYGAPPALPSASALTLPSDDISGANKENYAAPVSKGEPRNRVVPALSKAPASAAQVLSPTSSNTRVMPRERPASPMKSMISRPMSPVKTTAATSATTASAAKGSSNILSTFVGKARATRTAASTRKATTSSNTSSNSGAVPAATTATGRVRKAAAPPPSTSTTRGRRRVSANSETSEKSTGTVIRKAAAAPKKTATKKATAAPTTTGRTLRKRG

SEQ ID NO: 7199 - DNA, 1699 bp, Muscodor strobelii
  misc_feature: SGI EST ID NO. CUFF.18044.1
  misc_feature: Variant of the nucleotide sequence at SEQ ID NO 7197
taaacatccagttcaaacacacactctcagattccagatcccagcttcaagcttctgcatcatcgcgcactcatcaattctgacatcgtctgttctgcatacaagcaacaatctgctctgctcatcaagcaaccaagatcaatcacacactaccagcattttgcacccgcgacagttcccatcggaactctccgtcgcaacctgcatcacgctttcatcgtcacttccatcgcgcctcgctcgatccttctcacaaggccagctgccttcatctatcacgcacgcactttacttcaagctacttgaagatacgcattgattcagtcgcaatggatcccggctcatcgaagaaacgatcagccagtcgctctcccgagcggagcccgaccaagagcttcaccaagaagctcaaaaccggcatcacagccatccagaaacaagccttagtcgacaacctgcagcttgagatcactgaacgtgctcgccgtctcagagcccagtataacatccaagctcagcagttgcgatcacgcctcgagatgcgcgtcttccgcgtcccctacaaactccgcaaaatgaccatgggcgaactgttcgagaagtcactgcagcctcagctgcctcccgtcccgcccaagtcctcgtacgtacctgccgccagacctccacctgtcccggccaaggactcgcccaagcctgtcccaaagcccattgctcggaagccagtgcccgtgcgcagctcggttgctgaacccaagccctcgacgtatggcgcgccaccagcgcttccgtccgcgtccgcgctaacactccccagcgacgacatctctggtgcaaacaaggagaactatgctgcccccgttagtaagggggagccgcgaaaccgcgttgtgccggcgctctctaaggccccagcctctgctgctcaagtcctgtcaccgacgtcgtctaacacacgcgtcatgccccgggaacgcccagcttcacccatgaaatccatgatcagccggcccatgtcacctgtcaagactaccgccgccacatcagctacaactgcatccgccgccaagggctcttcaaacattctttcaacattcgttggcaaagccagagccacacgaactgcagcgagcaccagaaaagctaccacatcctcaaacaccagctcgaatagtggtgccgtacccgctgccaccacagcgactggccgcgtccgcaaagccgctgcaccccctccatccacatcaactacacgcggacgacgcagagtcagcgctaatagcgagacaagcgagaagagcacaggcacagtgatcagaaaggcggcagctgcgccgaagaaaacggcaactaagaaggccacggcggcgcctaccacaacgggtagaactttacggaagcgcggttagctgcacgcggttcgaaatgctattcggaagtaatgagttaaggtatgcataggtgcgggtgtttggggacagtctgtttggggataacctgtttggggagaatcatcaatggcgttgcggacaggagtatcacttagcgcaggcgtttgggtcataggaaatcatacatgcagccaggcttggctcaggacatcaggcacaacatacttatagtgtgcccggcacgaaacatgtcttatatagaaacgtgcccatgaataacgaatcgaataaaactgctttattgagtc

SEQ ID NO: 7200 - DNA, 579 bp, Muscodor strobelii
  misc_feature: SGI cDNA ID NO. 562158
  misc_feature: Elevated expression when VOC is produced
  misc_feature: Encodes the peptide sequence at SEQ ID NO 7201
atggccgacacagaagcacccgaactcccaaaggagcctcaaggtcgtcatgtcatctactgcggtgtctgcacattaccacctgagtactgtgaatacggtggcacagtcaagaagtgccaggaatggctggagaaggcacatcctgacatgtatgccgtaatatggtcaccggaagccttggaagcagcaacggcctccctctccctcgaagcccaaaagcgcgcagccaaagacgcccagaagaagacagcccaggccgagaaggcctcgcagaaagccgcagacaagatcgcaaactccgtcataaccatcaagcgcgtcgagcgcaataagcggaaatacgtcactgccgtgtccgggctcgaagccttcggcctcgacctgaaaaaggtcgccaaggaattcggcaagaagttcgccaccggttcctcagtaaccaaggtaccaagcggaggagaggagatcgtggtccagggcgacgtgagtgatgagattgaggagtttctgctggagaagtacaaggatatccccgaggacaatatcgagctggtagacgataagaagaagaagacgtag

SEQ ID NO: 7201 - protein, 192 aa, Muscodor strobelii
  misc_feature: SGI Peptide ID NO. 562158
  misc_feature (97)..(179): Pfam Id: PF01253 Pfam Desc: Translation initiation factor SUI1
  misc_feature (1)..(191): NCBI GI: 256735122 Blast Desc: NECHADRAFT_98746 [Nectria haematococca mpVI 77-13-4]
  misc_feature (1)..(191): NCBI GI: 171684785 Blast Desc: protein product [Podospora anserina] gi|170942353|emb|CAP68005.1| protein product [Podospora anserina]
  misc_feature (15)..(187): NCBI GI: 85118049 Blast Desc: NCU02984 [Neurospora crassa OR74A] gi|74638644|sp|Q9P3T4.1|DENR_NEUCR RecName: Full=Translation machinery-associated protein 22 gi|9367249|emb|CAB97266.1| crassa
  misc_feature (13)..(191): NCBI GI: 116192401 Blast Desc: CHGG_05918 [Chaetomium globosum CBS 148.51] gi|121786174|sp|Q2H5Z7.1|DENR_CHAGB RecName: Full=Translation machinery-associated protein 22 gi|88181831|gb|EAQ89299.1| CBS
  misc_feature (1)..(187): NCBI GI: 46108478 Blast Desc: FG01121.1 [Gibberella zeae PH-1]
  misc_feature (1)..(191): NCBI GI: 145603065 Blast Desc: MGG_04504 [Magnaporthe grisea 70-15] gi|189030956|sp|A4QVI3.1|DENR_MAGGR RecName: Full=Translation machinery-associated protein 22 gi|145011389|gb|EDJ96045.1|
  misc_feature (1)..(191): NCBI GI: 154296765 Blast Desc: BC1G_12410 [Botryotinia fuckeliana B05.10] gi|206558272|sp|A6SIZ0.1|DENR_BOTFB RecName: Full=Translation machinery-associated protein 22 gi|150843249|gb|EDN18442.1|
  misc_feature (18)..(191): NCBI GI: 189203877 Blast Desc: conserved [Pyrenophora tritici-repentis Pt-1C-BFP] gi|187985373|gb|EDU50861.1| conserved [Pyrenophora tritici-repentis Pt-1C-BFP]
  misc_feature (1)..(187): NCBI GI: 238845050 Blast Desc: density-regulated protein [Microsporum canis CBS 113480]
  misc_feature (10)..(191): NCBI GI: 212541488 Blast Desc: RNA binding protein Tma22, [Penicillium marneffei ATCC 18224] gi|210068198|gb|EEA22290.1| RNA binding protein Tma22, [Penicillium marneffei ATCC 18224]
  misc_feature: Useful for introducing or modulating the production of volatile compounds
MADTEAPELPKEPQGRHVIYCGVCTLPPEYCEYGGTVKKCQEWLEKAHPDMYAVIWSPEALEAATASLSLEAQKRAAKDAQKKTAQAEKASQKAADKIANSVITIKRVERNKRKYVTAVSGLEAFGLDLKKVAKEFGKKFATGSSVTKVPSGGEEIVVQGDVSDEIEEFLLEKYKDIPEDNIELVDDKKKKT

SEQ ID NO: 7202 - DNA, 1018 bp, Muscodor strobelii
  misc_feature: SGI EST ID NO. CUFF.17809.0
  misc_feature: Variant of the nucleotide sequence at SEQ ID NO 7200
agtgatgctagcgttaacactagaaaacactaaccttacctgacaagccccttggacaaggttggactctagagtccgagggagtatacgtaacaggcaatttaccccaccatcaaccaacaagcaccccgctatctcaagacatcccaccttcaacacgcggcaaaacagcgccttgctcgaccgtgacaaaacataacgcgtttctccattctcaatttatcgcaattgcagaggccatggccgacacagaagcacccgaactcccaaaggagcctcaaggtcgtcatgtcatctactgcggtgtctgcacattaccacctgagtactgtgaatacggtggcacagtcaagaagtgccaggaatggctggagaaggcacatcctgacatgtatgccgtaatatggtcaccggaagccttggaagcagcaacggcctccctctccctcgaagcccaaaagcgcgcagccaaagacgcccagaagaagacagcccaggccgagaaggcctcgcagaaagccgcagacaagatcgcaaactccgtcataaccatcaagcgcgtcgagcgcaataagcggaaatacgtcactgccgtgtccgggctcgaagccttcggcctcgacctgaaaaaggtcgccaaggaattcggcaagaagttcgccaccggttcctcagtaaccaaggtaccaagcggaggagaggagatcgtggtccagggcgacgtgagtgatgagattgaggagtttctgctggagaagtacaaggatatccccgaggacaatatcgagctggtagacgataagaagaagaagacgtagcggaatatagtgcatttgtaacgatgaccacttgattgcgaatcggcaaagcaagtcgcgtgtccaatagcaccgcaaactgctgtctatagtactttccagcccagtgctattcacctgtattatgttctctgcccagtaagtgtgcggatctctaaactgttaaatgatatattgtcaaaacgtagcactaatccagc

SEQ ID NO: 7203 - DNA, 3369 bp, Muscodor strobelii
  misc_feature: SGI cDNA ID NO. 562159
  misc_feature: Encodes the peptide sequence at SEQ ID NO 7204
atggctagcgaaggcgacgacgtcacccgacaacattccgatgttggcgccgagtctaatgatggtgttgagaaacaacaacagtccgcagcgacaacgcagcctgacagtgcctccgagtctggcaatggtacacctaaagcgccgcctgcctcgaaaccaggcatcatggctaaacttggacttgatcccccgactttgatagtgatgttcaaaggcggattagcacctgttattggtctcgcaatgaatcaatcctttgccgttgcccaagagttccagacactgggttatcttgttggcatcatatctgttttatcgctcaccattctccctcgtggaaaattcattcaaactctggtccttaatctgctttttctgggcatcggctctgccatcgctcttttgattctgtggtcagctttacaagctcgactgcacacggaaacaaccccggctcgttataactcgagccaggcagctgtgtcaggagtctggcttttcgccaatatctggattgtcaacacgcttcgtgccaaatttccaagtctcaatgtacctagtatcgtctattccatcatcaccaacatcacatgcacactcagtccctccattacatccaatgccatgtttgaggtactgatccggcgcctcatcactgccatgcttgccggctttgctattgccactgccgtttcactcatcatcatacccgttccaagccgtgcagcaacaatggggcagtttaaaggaggaatcatgctgttgcggggcgcagtaaaacaggagaaggcatatctccagagtctagagagagaagacatgtttgctatacccactgacattagctgtgccacccacacaatgactgactctgatgagtccatcgatgaaagcaataatcgcaatgccaaaagcaaaaataaggaggataaagaaaagccacaacccgtgtcaactgccgagggcaaagccatcaaggagacgatattcaagatacgtgtacttgtgggtaaaatctacgttgacttaccatttgcgaagagagacttcgcatatgccaaactagggccaaaggatttggggaggattcttgaactgatgagaggcattgcaatcccaattcatggcattggaactgtcatcgatatcttccagcgcctggccgagaagagaggctggatgaccacctcagacacgccactggaagaattgtttgagaagaatgaagagaaaagagtatggaatgaagtgatgaagcagcttcacgagccctttgagcttctctctgcagcaatcgatggcggtctagagcacgctggtatggtcctggagattctcccacggcccaagacgcccaagaccaagactaagcaagcggatggtgcggcgggccctgctgcagatgcagacgtagaagccgtgggagatttggtcaaacctggtgatgctggctatgcagaagttttgaaaaatcagataaaagctttccacgatatccgcggggcaattcttcgtgcttgggctaaggaaaaaggtctcttgactgatgattgctcgttcgaagaggtcaacaatatcccatttccccaagatgacccacaacaccaacgagaccagagccagctctatatattattgtaccttgagactttgatggaagcagcaggagaggcggtacttcggttcgtccggtttgcggaccataaggtcgccgatgggactatggcgcggaatagactcattgtacctgggattaaggtgctgcaaaaatgggctgcgagcgtcttcaaggacgaagataagcacgaagagaaccatgctgacctttttgattccggtgttacgatcgtctacatgggtgacagctttgcccagaagagagatccagaacacttaccggccaagactgcgtgggagcgtctcggcaacctcttgcgtgccatttcaaagttctttgcatctgaggaatctgcatttggattccgcgctgccgcagcaactctcacggttggaattgtagcattcctcgaaaacacacaagtgttcttccaagaacagagactcgtatgggctatgattatcatcgcaatcggaatgacgcaaacatccggacagtccattaatggattcttcttgagaatctttggcactctcgttggcgcgatcttcgcgcttatcgcttggtacattgttgacgagaaagttccgggaatcttcgtattcctctacatattccaggctatcacgatgtattttctcgtgaaatttccacagatgatacctggtgtcatgatctgcatggtcacacaggtcttgatcattggatacgagctacaagtactgaaaatcggtatcgcagtatcagaaacaaccggtcagccttactacccgatctacaaattagccccttaccgccttgctactgttgcagcaggctgtgccattgcctttttctggactattttcccgtccccgatcaccgagagaagttggctgcggcgggatctctcaactactctctacatgctagccacttacttcagtgccatcaacggaacactagagagcaagctcaagggcacatacggagatcgaaacatcaaaggcacgccagcctaccatctagctaagcatcgacgacgcctcttcagcaaactgatgctcctcctcccctcactcgcccaacacgccgagttccaacgctgggaaccaacaatcggtggtcgtttcccgcgagaactctaccaagacataatcgtccgctgctcccgcataaactcctacctcaccctcctctcctacaccgtcggcggcggcggcatgggctgtccagagatgacgatcacagattgtcttgacgccgcaacttgtgacaacccctccaacccagagaccgagagtaaactcaaagcagaactcaacaaccgcgcctggctcgacgccctccgcgtgctcctcgccgacatcgcaccaacgcaacagtcaatcataggcgtactaaccctcctctccaacgcgctccaatccggccactccctccccccacatctcaagctgccccgtccctacgaactaacccggcagctcgaagccatagacgcggcagcgaaaaccacacgcgctcgcggtttactagacgctaagaatatgacccaagcaggctacgccgaattcgcgatcctccaagtttgcagtgcgctggtctgtgacgatatcgaaggtcttgtaaagaccgtcagcaaaatcgtcggagtcgtcgatttcagctatcgcgtgggagactcaagtacgaccacgagcgcggggagcagcatcacgggtgttgattttggtaatgagggtgggaacaagggcaaagtagattaa

SEQ ID NO: 7204 - protein, 1122 aa, Muscodor strobelii
  misc_feature: SGI Peptide ID NO. 562159
  misc_feature (48)..(1036): NCBI GI: 171680924 Blast Desc: protein product [Podospora anserina] gi|170940420|emb|CAP65647.1| protein product [Podospora anserina]
  misc_feature (56)..(1122): NCBI GI: 145601207 Blast Desc: MGG_08697 [Magnaporthe grisea 70-15] gi|145009240|gb|EDJ93951.1| MGG_08697 [Magnaporthe grisea 70-15]
  misc_feature (24)..(1118): NCBI GI: 116191533 Blast Desc: CHGG_05484 [Chaetomium globosum CBS 148.51] gi|88181397|gb|EAQ88865.1| CHGG_05484 [Chaetomium globosum CBS 148.51]
  misc_feature (140)..(1030): NCBI GI: 164423096 Blast Desc: NCU09157 [Neurospora crassa OR74A] gi|157069945|gb|EAA29831.2| [Neurospora crassa OR74A]
  misc_feature (24)..(1093): NCBI GI: 256720329 Blast Desc: NECHADRAFT_98339 [Nectria haematococca mpVI 77-13-4]
  misc_feature (192)..(1122): NCBI GI: 156058250 Blast Desc: SS1G_03136 [Sclerotinia sclerotiorum 1980] gi|154700924|gb|EDO00663.1| SS1G_03136 [Sclerotinia sclerotiorum 1980]
  misc_feature (2)..(1114): NCBI GI: 169614361 Blast Desc: SNOG_10322 [Phaeosphaeria nodorum SN15] gi|160707331|gb|EAT82657.2| SNOG_10322 [Phaeosphaeria nodorum SN15]
  misc_feature (2)..(1110): NCBI GI: 189199760 Blast Desc: conserved [Pyrenophora tritici-repentis Pt-1C-BFP] gi|187983316|gb|EDU48804.1| conserved [Pyrenophora tritici-repentis Pt-1C-BFP]
  misc_feature (9)..(1103): NCBI GI: 115401262 Blast Desc: conserved [Aspergillus terreus NIH2624] gi|114190160|gb|EAU31860.1| conserved [Aspergillus terreus NIH2624]
  misc_feature (46)..(1105): NCBI GI: 169786029 Blast Desc: [Aspergillus oryzae RIB40] gi|83776223|dbj|BAE66342.1| protein product [Aspergillus oryzae]
MASEGDDVTRQHSDVGAESNDGVEKQQQSAATTQPDSASESGNGTPKAPPASKPGIMAKLGLDPPTLIVMFKGGLAPVIGLAMNQSFAVAQEFQTLGYLVGIISVLSLTILPRGKFIQTLVLNLLFLGIGSAIALLILWSALQARLHTETTPARYNSSQAAVSGVWLFANIWIVNTLRAKFPSLNVPSIVYSIITNITCTLSPSITSNAMFEVLIRRLITAMLAGFAIATAVSLIIIPVPSRAATMGQFKGGIMLLRGAVKQEKAYLQSLEREDMFAIPTDISCATHTMTDSDESIDESNNRNAKSKNKEDKEKPQPVSTAEGKAIKETIFKIRVLVGKIYVDLPFAKRDFAYAKLGPKDLGRILELMRGIAIPIHGIGTVIDIFQRLAEKRGWMTTSDTPLEELFEKNEEKRVWNEVMKQLHEPFELLSAAIDGGLEHAGMVLEILPRPKTPKTKTKQADGAAGPAADADVEAVGDLVKPGDAGYAEVLKNQIKAFHDIRGAILRAWAKEKGLLTDDCSFEEVNNIPFPQDDPQHQRDQSQLYILLYLETLMEAAGEAVLRFVRFADHKVADGTMARNRLIVPGIKVLQKWAASVFKDEDKHEENHADLFDSGVTIVYMGDSFAQKRDPEHLPAKTAWERLGNLLRAISKFFASEESAFGFRAAAATLTVGIVAFLENTQVFFQEQRLVWAMIIIAIGMTQTSGQSINGFFLRIFGTLVGAIFALIAWYIVDEKVPGIFVFLYIFQAITMYFLVKFPQMIPGVMICMVTQVLIIGYELQVLKIGIAVSETTGQPYYPIYKLAPYRLATVAAGCAIAFFWTIFPSPITERSWLRRDLSTTLYMLATYFSAINGTLESKLKGTYGDRNIKGTPAYHLAKHRRRLFSKLMLLLPSLAQHAEFQRWEPTIGGRFPRELYQDIIVRCSRINSYLTLLSYTVGGGGMGCPEMTITDCLDAATCDNPSNPETESKLKAELNNRAWLDALRVLLADIAPTQQSIIGVLTLLSNALQSGHSLPPHLKLPRPYELTRQLEAIDAAAKTTRARGLLDAKNMTQAGYAEFAILQVCSALVCDDIEGLVKTVSKIVGVVDFSYRVGDSSTTTSAGSSITGVDFGNEGGNKGKVD

SEQ ID NO: 7205 - DNA, 9289 bp, Muscodor strobelii
  misc_feature: SGI EST ID NO. CUFF.18563.1
  misc_feature: Variant of the nucleotide sequence at SEQ ID NO 7203
tcgaaaaggactttgaaatgcccgcgaatcgtgaaatcgaagctcgaaccaacatccctgctgcgccgccaacaactgatcctgcgtatgcacatcagtctctgtcaggccagtataataaaaactccttcccattgtcattccgccctgtctttcgcgtcctcgaacaataaatgcggatgacgaaccatggctagcgaaggcgacgacgtcacccgacaacattccgatgttggcgccgagtctaatgatggtgttgagaaacaacaacagtccgcagcgacaacgcagcctgacagtgcctccgagtctggcaatggtacacctaaagcgccgcctgcctcgaaaccaggcatcatggctaaacttggacttgatcccccgactttgatagtgatgttcaaaggcggattagcacctgttattggtctcgcaatgaatcaatcctttgccgttgcccaagagttccagacactgggttatcttgttggcatcatatctgttttatcgctcaccattctccctcgtggaaaattcattcaaactctggtccttaatctgctttttctgggcatcggctctgccatcgctcttttgattctgtggtcagctttacaagctcgactgcacacggaaacaaccccggctcgttataactcgagccaggcagctgtgtcaggagtctggcttttcgccaatatctggattgtcaacacgcttcgtgccaaatttccaagtctcaatgtacctagtatcgtctattccatcatcaccaacatcacatgcacactcagtccctccattacatccaatgccatgtttgaggtactgatccggcgcctcatcactgccatgcttgccggctttgctattgccactgccgtttcactcatcatcatacccgttccaagccgtgcagcaacaatggggcagtttaaaggaggaatcatgctgttgcggggcgcagtaaaacaggagaaggcatatctccagagtctagagagagaagacatgtttgctatacccactgacattagctgtgccacccacacaatgactgactctgatgagtccatcgatgaaagcaataatcgcaatgccaaaagcaaaaataaggaggataaagaaaagccacaacccgtgtcaactgccgagggcaaagccatcaaggagacgatattcaagatacgtgtacttgtgggtaaaatctacgttgacttaccatttgcgaagagagacttcgcatatgccaaactagggccaaaggatttggggaggattcttgaactgatgagaggcattgcaatcccaattcatggcattggaactgtcatcgatatcttccagcgcctggccgagaagagaggctggatgaccacctcagacacgccactggaagaattgtttgagaagaatgaagagaaaagagtatggaatgaagtgatgaagcagcttcacgagccctttgagcttctctctgcagcaatcgatggcggtctagagcacgctggtatggtcctggagattctcccacggcccaagacgcccaagaccaagactaagcaagcggatggtgcggcgggccctgctgcagatgcagacgtagaagccgtgggagatttggtcaaacctggtgatgctggctatgcagaagttttgaaaaatcagataaaagctttccacgatatccgcggggcaattcttcgtgcttgggctaaggaaaaaggtctcttgactgatgattgctcgttcgaagaggtcaacaatatcccatttccccaagatgacccacaacaccaacgagaccagagccagctctatatattattgtaccttgagactttgatggaagcagcaggagaggcggtacttcggttcgtccggtttgcggaccataaggtcgccgatgggactatggcgcggaatagactcattgtacctgggattaaggtgctgcaaaaatgggctgcgagcgtcttcaaggacgaagataagcacgaagagaaccatgctgacctttttgattccggtgttacgatcgtctacatgggtgacagctttgcccagaagagagatccagaacacttaccggccaagactgcgtgggagcgtctcggcaacctcttgcgtgccatttcaaagttctttgcatctgaggaatctgcatttggattccgcgctgccgcagcaactctcacggttggaattgtagcattcctcgaaaacacacaagtgttcttccaagaacagagactcgtatgggctatgattatcatcgcaatcggaatgacgcaaacatccggacagtccattaatggattcttcttgagaatctttggcactctcgttggcgcgatcttcgcgcttatcgcttggtacattgttgacgagaaagttccgggaatcttcgtattcctctacatattccaggctatcacgatgtattttctcgtgaaatttccacagatgatacctggtgtcatgatctgcatggtcacacaggtcttgatcattggatacgagctacaagtactgaaaatcggtatcgcagtatcagaaacaaccggtcagccttactacccgatctacaaattagccccttaccgccttgctactgttgcagcaggctgtgccattgcctttttctggactattttcccgtccccgatcaccgagagaagttggctgcggcgggatctctcaactactctctacatgctagccacttacttcagtgccatcaacggaacactagagagcaagctcaagggcacatacggagatcgaaacatcaaaggcacgccagcctaccatctagctaagcatcgacgacgcctcttcagcaaactgatgctcctcctcccctcactcgcccaacacgccgagttccaacgctgggaaccaacaatcggtggtcgtttcccgcgagaactctaccaagacataatcgtccgctgctcccgcataaactcctacctcaccctcctctcctacaccgtcggcggcggcggcatgggctgtccagagatgacgatcacagattgtcttgacgccgcaacttgtgacaacccctccaacccagagaccgagagtaaactcaaagcagaactcaacaaccgcgcctggctcgacgccctccgcgtgctcctcgccgacatcgcaccaacgcaacagtcaatcataggcgtactaaccctcctctccaacgcgctccaatccggccactccctccccccacatctcaagctgccccgtccctacgaactaacccggcagctcgaagccatagacgcggcagcgaaaaccacacgcgctcgcggtttactagacgctaagaatatgacccaagcaggctacgccgaattcgcgatcctccaagtttgcagtgcgctggtctgtgacgatatcgaaggtcttgtaaagaccgtcagcaaaatcgtcggagtcgtcgatttcagctatcgcgtgggagactcaagtacgaccacgagcgcggggagcagcatcacgggtgttgattttggtaatgagggtgggaacaagggcaaagtagattaaaattaaaccaagactaacggaaaggggcggaaaacaaacatctatggcatgacttggataggcagtcgtagaatgatcatctaggagcggcaagaaaccggattattggtcatataccattttcttaccttgctgttggactttgttcgatttcatacttgaggagatcaatcaatatattggggtatttttttaattccttgctcttggaaaaaattcagcatacgatcaaacgtagccttgatgtattcgctccctaggtatctccggatacatcatctctcccacatacatacacaggtcgcctttaaaggctccgttttattttcacttcattcccatacactcgtagcatcgcatgctgcgtaaatacgaacaattcgccccacgccgccatcttctcaggtcgtagcccccattgaagatctagcgttgtctaacaacaagccgagttccacggcttcaccacccgtgacagattccgaatacccgttttcgccatctggtcctcacttccctggttacacgagtgcatctcaaggccgttccttcagagaatcgtgactcggtcgtcgattgtgattttcggcgctttattttctccatcatgtctccctttctccctctcctatatacccgatttctttgccctgtgtcgacattggtcgacctttttgatcatatcttccgccttctacgactgactgtgtttactacacagaagcccggacatctgaaaagctacatgatttgctcatatgaccgctaagagtgcatcatatatcaaggtatgaccagtcattgcttcgtcgaaacgtaaaatcatttggctccgttcccttgctgatcttctcagaacattgagacgtcgcggctgggtaattcgcgacacataaaaataacaactccaaaatggatccgtagaatgaccatgcgcagtgtagatgggaaaaagccctatatgatgagaaacgctagcgatggtatcataataaataataaaaccaatggagcaaagcggacattcatgacgtgaggatcgagaagcgcggcgttttcctttttcttgccctgtaggggtcttggattccacggttagcaagacggaccgtcacggccatcgagcatctcgtaacatcgcgatacgttgctcggcgattcgagacagttgaggcagtttccattgagtccatgcctcactcacttgcaagcacagacttctccgccctggctcgagctatggccgcatggctttcgaggcaccgggccatgagattcaatactgcggatcctcattagaacaacaaacaacggccagacaatcgccaaaacttaccaggccacacagcagacttatccaacatgtatgaagtaacgcgaagtatcttggcggcatagccgcccatagcgtccacctgtagattggcatcgtagttgccgttcaccgtaccattcaccatatcgatattcaatttgatctcagcagtatgcagaaggtcctggatttggatgatgagtcgcatgtcttcttcctccaggagaataacgctggggactccacttagatccacatcatcccttcccagtattcctaggtatcgtccaacacgatcctgtagggtagcgatccattcagcaagaacttgggcacagtcaaatgtgcacatagcggattgcacaggaagctctttgctagtaaattcagcaaaagtcacgcctaatttattgttgttagccaatgaatcggcggcgtagaacgccgccttgcgcagatgcttctctcgccgcgagatttgtcgggtcgagcctggagcctgtgagggaggttgtggaggcatgaaggggaacttagcagaggagaactcaggcgaggaggattgcgttggcggcgactcgacaaacacggagcttgtggccgatgcatcggacgggtctgctgtagactcggcattcgaacctggtgagtgttcggcgtgttgaatgatctccgtgccacgagaaagttcttctgcaaggccctcccagtcgcgctgccagaatttctctttagttcgtgacatattgacaaacagccggacgtaggccaagtcaagtaatggaatagcatctgcagataatggtcccatgccaaaaggattgggtctttccaagctatgatgtgggttgttcgcccatgcagattgccatgctttcaacgccggttcgatatggcgatgcatcttctcggtctcctcgttggtccaaactttattgagatgacgctgtcttgtttcccatatgtaattgtgcaaagcatttatgagaaccaagcaaccaagcgtacttggcttcagctcgcttttgggaatatcactcatgttgaccatggaacccagtggctggtggacattattgaaggcaagtttctgctgcttctcgttggtgcggagcaattctcccagcgcttcgtggaatgtcatacggttgtggccagcggcgcgtacaccgcctttcaattgaaaggcggcggcgctctcggcggcaaagaattcctcgtcgcagggcagatcgagcaaaatctccgagttggtaagggcgggattgtgattgtaggcagccactaagagactggagagtatgaatatgatgtaaagagttcgtttacgttcctcgagcgtcttccatcgcagccattcagcttgctcttctgtctcggcttttgtcccgccgttccaatttccctcagcatcgatcgcctggatctctcgaagctcggccgagtcaagttttatggacctaagcaagcctgctgcttgagcgaggctcaccaatgctgcggagtgtgttgacgctatatcgttagctgtcttgtcgccacagttatgaccgtatacgacgttcagaagcatgccctgaacgagccacaacggggtgttagtgacggattctgcagtaggagctccctgatcagatgtgggtgttcgacggaagtcggctttgcgcatgtcagcctttcgtcgttcctcgaggtagatttggatcatcttcttcgatagctcaaacagctctctagattgcggcctctccagctcgtacaatgcaccaatagcagccattgccaatatgagacaaccactgcctcccgccgttatgtgtcgtccggtattggcgggcggcacgtcaaaagacagcgtgggaatatgaaggaaaggcagatgtgggtggcagtatctcaaatagctcccgacatagcgttgtagatcctggacattgggcagactgtttgctaggtcggcggagctatctggactggcctggacttgaggagacattggcgaacttggggaagggaaggagtacttgcggccactgctcttcgccacacactgagaaagagcaccgatgatggcggtcctggtagcgtccgtgatagtcgtagcaggagagtgagattgatgccctccgcccatggtaggggtttcggggccaggtccaaaactcatagcgtggttcaagccgggccccgataagccctgcatgacagaagggctaagggaactcattgatggtggtggggacgagaaattgtacatatcgctcatcgtcttttgcgccggcggctgaggcgatacgggggcgccgttcagcaggtccgggaagacgccgccgttcatgtccagcgagaaaggagtggtcatctgcggaggacccatcagaccaggctgccacatggagctagtgacagtaggcatcgtggtatggttggagccatcgagcatgacatcgctcatgccgctctggctggtggtactcatggccgagggggacgactcgccgatagcgttctcgttcatgtttgtgaaagacatctggttgtcgaagcctgtcaaccactcgagactgtcgtcggtgtgggcattattggacatatccgtcatgccgtgggcgaatggagaggtcggatcgagggccatggagtggggagactcggtataatgcaatgcattgggattgatggtcgagtttgcctggccgaacatgaggctctcaaagtcgtagtctgggttgaaggagatgggaggggcggtacggaggccggcgttgaagtccatgttgggcaggccgtgtgtgtcgagcttcaagccgtggttcatgccgcggtggcccatgacggccgacatgccggcgaaggcgtccatgttgtgcatgggcaggccgatgaggctctggtggcgggcgtggtggtggatttgaggtacgtgttgctgctgctgctgctggcgggcaacctgggcgttggcggccgcaatcatctggatgtggttcccgtcgacatggctgatggtgttggctcggggccgcatcgaggccgcattgggctgggcggcggcgtttgcagcattagcagcgctggccgcgttggcgacgctgttcttgcgggcacggctctgggcggtggcggcaccgctggtgctctcacggcgccggggccgagaagagggcgtggtggactggtgcagcttctgctggtggcgcagcagcaggtcgcggcgggcgaagcatcgcgtgcactcgggacactcgaagggcttctccttggtgtgggagcgctcgtggcgcttcagatgctcgaggcgggcaaaggagcgctggcaggtgccgcagacgtgagggcgaggcttgtcggtcttgggcggcgggaattggcccggtgcgggagcgggagccttggtggtgttgacggtgatggacgacgctggaggattgacagtcatggtcaacaacaatgcccgcggatctaggtctggatctgcgtatcatgtgctctctggctattcgcaaacagcgcgaaagcaacaggcaagcaattcaagcaactgggggcgaggcgtggtggttggcgtgtggacgtgggcgcgggtagagggcgggatggagggggagagtgagggttgatagacagcttggtgaacgggtgggtgacggatggagggggatggaggggcagagggcagcagggcaggagcaggagcagtcccagcagcaccgggcaagcaagagcacgcacagaacccgcaggcacacagacgcagcaggcagggcacgatggggggggcataggggggtaattctggctgtggatatggagacaattatggagctggataggtactatatggataggacacgataagtggcgggtggacaccagagtggacataccagagtcatcgttgcttgtaccggctttactgctagcactattaggtgcaggcgcaggagcagcagctgtagtgggcggtggtggtggattggccggcggattggacatgacgattgacgtgagcccgtgaggcgagtgatgggctgccaacggccagacaccgcggatcgtcacggcagagagtccttctgccttccggggcacaattgacggcggcgacgtgtagcaatgcgtccgcagcgagtccggctaggccacgagagagagttcaggttgcgagaggtgaggttgccaacagcaagtaggtcgaggcaggcagagtcaagacgatggaaggtcaatagcaccagtagcagcccccgggtcgggcggtcggaagacaggcgatagagagcaacctcaacgccacgtgtgtctcagaccctagattcaggtatcttgctatcaattggataggtacatgtatgcagcaaacaaacaagagctttgccagcactgaacatgagaagagcagataatgctttggta

SEQ ID NO: 7206 - DNA, 3594 bp, Muscodor strobelii
  misc_feature: SGI cDNA ID NO. 562160
  misc_feature: Reduced expression when VOC is produced
  misc_feature: Encodes the peptide sequence at SEQ ID NO 7207
atgtccaatccgccggccaatccaccaccaccgcccactacagctgctgctcctgcgcctgcacctaatagtgctagcagtaaagccggtacaagcaacgatgactctgcgtcgtccatcaccgtcaacaccaccaaggctcccgctcccgcaccgggccaattcccgccgcccaagaccgacaagcctcgccctcacgtctgcggcacctgccagcgctcctttgcccgcctcgagcatctgaagcgccacgagcgctcccacaccaaggagaagcccttcgagtgtcccgagtgcacgcgatgcttcgcccgccgcgacctgctgctgcgccaccagcagaagctgcaccagtccaccacgccctcttctcggccccggcgccgtgagagcaccagcggtgccgccaccgcccagagccgtgcccgcaagaacagcgtcgccaacgcggccagcgctgctaatgctgcaaacgccgccgcccagcccaatgcggcctcgatgcggccccgagccaacaccatcagccatgtcgacgggaaccacatccagatgattgcggccgccaacgcccaggttgcccgccagcagcagcagcagcaacacgtacctcaaatccaccaccacgcccgccaccagagcctcatcggcctgcccatgcacaacatggacgccttcgccggcatgtcggccgtcatgggccaccgcggcatgaaccacggcttgaagctcgacacacacggcctgcccaacatggacttcaacgccggcctccgtaccgcccctcccatctccttcaacccagactacgactttgagagcctcatgttcggccaggcaaactcgaccatcaatcccaatgcattgcattataccgagtctccccactccatggccctcgatccgacctctccattcgcccacggcatgacggatatgtccaataatgcccacaccgacgacagtctcgagtggttgacaggcttcgacaaccagatgtctttcacaaacatgaacgagaacgctatcggcgagtcgtccccctcggccatgagtaccaccagccagagcggcatgagcgatgtcatgctcgatggctccaaccataccacgatgcctactgtcactagctccatgtggcagcctggtctgatgggtcctccgcagatgaccactcctttctcgctggacatgaacggcggcgtcttcccggacctgctgaacggcgcccccgtatcgcctcagccgccggcgcaaaagacgatgagcgatatgtacaatttctcgtccccaccaccatcaatgagttcccttagcccttctgtcatgcagggcttatcggggcccggcttgaaccacgctatgagttttggacctggccccgaaacccctaccatgggcggagggcatcaatctcactctcctgctacgactatcacggacgctaccaggaccgccatcatcggtgctctttctcagtgtgtggcgaagagcagtggccgcaagtactccttcccttccccaagttcgccaatgtctcctcaagtccaggccagtccagatagctccgccgacctagcaaacagtctgcccaatgtccaggatctacaacgctatgtcgggagctatttgagatactgccacccacatctgcctttccttcatattcccacgctgtcttttgacgtgccgcccgccaataccggacgacacataacggcgggaggcagtggttgtctcatattggcaatggctgctattggtgcattgtacgagctggagaggccgcaatctagagagctgtttgagctatcgaagaagatgatccaaatctacctcgaggaacgacgaaaggctgacatgcgcaaagccgacttccgtcgaacacccacatctgatcagggagctcctactgcagaatccgtcactaacaccccgttgtggctcgttcagggcatgcttctgaacgtcgtatacggtcataactgtggcgacaagacagctaacgatatagcgtcaacacactccgcagcattggtgagcctcgctcaagcagcaggcttgcttaggtccataaaacttgactcggccgagcttcgagagatccaggcgatcgatgctgagggaaattggaacggcgggacaaaagccgagacagaagagcaagctgaatggctgcgatggaagacgctcgaggaacgtaaacgaactctttacatcatattcatactctccagtctcttagtggctgcctacaatcacaatcccgcccttaccaactcggagattttgctcgatctgccctgcgacgaggaattctttgccgccgagagcgccgccgcctttcaattgaaaggcggtgtacgcgccgctggccacaaccgtatgacattccacgaagcgctgggagaattgctccgcaccaacgagaagcagcagaaacttgccttcaataatgtccaccagccactgggttccatggtcaacatgagtgatattcccaaaagcgagctgaagccaagtacgcttggttgcttggttctcataaatgctttgcacaattacatatgggaaacaagacagcgtcatctcaataaagtttggaccaacgaggagaccgagaagatgcatcgccatatcgaaccggcgttgaaagcatggcaatctgcatgggcgaacaacccacatcatagcttggaaagacccaatccttttggcatgggaccattatctgcagatgctattccattacttgacttggcctacgtccggctgtttgtcaatatgtcacgaactaaagagaaattctggcagcgcgactgggagggccttgcagaagaactttctcgtggcacggagatcattcaacacgccgaacactcaccaggttcgaatgccgagtctacagcagacccgtccgatgcatcggccacaagctccgtgtttgtcgagtcgccgccaacgcaatcctcctcgcctgagttctcctctgctaagttccccttcatgcctccacaacctccctcacaggctccaggctcgacccgacaaatctcgcggcgagagaagcatctgcgcaaggcggcgttctacgccgccgattcattggctaacaacaataaattaggcgtgacttttgctgaatttactagcaaagagcttcctgtgcaatccgctatgtgcacatttgactgtgcccaagttcttgctgaatggatcgctaccctacaggatcgtgttggacgatacctaggaatactgggaagggatgatgtggatctaagtggagtccccagcgttattctcctggaggaagaagacatgcgactcatcatccaaatccaggaccttctgcatactgctgagatcaaattgaatatcgatatggtgaatggtacggtgaacggcaactacgatgccaatctacaggtggacgctatgggcggctatgccgccaagatacttcgcgttacttcatacatgttggataagtctgctgtgtggcctgtattgaatctcatggcccggtgcctcgaaagccatgcggccatagctcgagccagggcggagaagtctgtgcttgcaagtgagtga

SEQ ID NO: 7207 - protein, 1197 aa, Muscodor strobelii
  misc_feature: SGI Peptide ID NO. 562160
  misc_feature (94)..(117): Pfam Id: PF00096 Pfam Desc: Zinc finger, C2H2 type
  misc_feature (66)..(88): Pfam Id: PF00096 Pfam Desc: Zinc finger, C2H2 type
  misc_feature (34)..(1197): NCBI GI: 171680920 Blast Desc: protein product [Podospora anserina] gi|170940418|emb|CAP65645.1| protein product [Podospora anserina]
  misc_feature (31)..(1194): NCBI GI: 46111723 Blast Desc: FG02743.1 [Gibberella zeae PH-1]
  misc_feature (71)..(1197): NCBI GI: 261359212 Blast Desc: DNA binding regulatory protein AmdX [Verticillium albo-atrum VaMs.102]
  misc_feature (13)..(1197): NCBI GI: 164422938 Blast Desc: NCU09496 [Neurospora crassa OR74A] gi|157069879|gb|EAA28620.2| conserved [Neurospora crassa OR74A]
  misc_feature (55)..(1195): NCBI GI: 225561611 Blast Desc: DNA binding regulatory protein AmdX [Ajellomyces capsulatus G186AR]
  misc_feature (39)..(1194): NCBI GI: 225684532 Blast Desc: conserved [Paracoccidioides brasiliensis Pb03]
  misc_feature (36)..(1172): NCBI GI: 261189819 Blast Desc: C2H2 transcription factor [Ajellomyces dermatitidis SLH14081] gi|239591556|gb|EEQ74137.1| C2H2 transcription factor [Ajellomyces dermatitidis SLH14081] gi|239612914|gb|EEQ89901.1|
  misc_feature (51)..(1194): NCBI GI: 255956449 Blast Desc: Pc21g19860 [Penicillium chrysogenum Wisconsin 54-1255] gi|211590688|emb|CAP96883.1| Pc21g19860 [Penicillium chrysogenum Wisconsin 54-1255]
  misc_feature (29)..(1169): NCBI GI: 226278912 Blast Desc: DNA binding regulatory protein AmdX [Paracoccidioides brasiliensis Pb01]
  misc_feature (39)..(1169): NCBI GI: 226294189 Blast Desc: DNA binding regulatory protein AmdX [Paracoccidioides brasiliensis Pb18]
  misc_feature: Useful for introducing or modulating the production of volatile compounds
MSNPPANPPPPPTTAAAPAPAPNSASSKAGTSNDDSASSITVNTTKAPAPAPGQFPPPKTDKPRPHVCGTCQRSFARLEHLKRHERSHTKEKPFECPECTRCFARRDLLLRHQQKLHQSTTPSSRPRRRESTSGAATAQSRARKNSVANAASAANAANAAAQPNAASMRPRANTISHVDGNHIQMIAAANAQVARQQQQQQHVPQIHHHARHQSLIGLPMHNMDAFAGMSAVMGHRGMNHGLKLDTHGLPNMDFNAGLRTAPPISFNPDYDFESLMFGQANSTINPNALHYTESPHSMALDPTSPFAHGMTDMSNNAHTDDSLEWLTGFDNQMSFTNMNENAIGESSPSAMSTTSQSGMSDVMLDGSNHTTMPTVTSSMWQPGLMGPPQMTTPFSLDMNGGVFPDLLNGAPVSPQPPAQKTMSDMYNFSSPPPSMSSLSPSVMQGLSGPGLNHAMSFGPGPETPTMGGGHQSHSPATTITDATRTAIIGALSQCVAKSSGRKYSFPSPSSPMSPQVQASPDSSADLANSLPNVQDLQRYVGSYLRYCHPHLPFLHIPTLSFDVPPANTGRHITAGGSGCLILAMAAIGALYELERPQSRELFELSKKMIQIYLEERRKADMRKADFRRTPTSDQGAPTAESVTNTPLWLVQGMLLNVVYGHNCGDKTANDIASTHSAALVSLAQAAGLLRSIKLDSAELREIQAIDAEGNWNGGTKAETEEQAEWLRWKTLEERKRTLYIIFILSSLLVAAYNHNPALTNSEILLDLPCDEEFFAAESAAAFQLKGGVRAAGHNRMTFHEALGELLRTNEKQQKLAFNNVHQPLGSMVNMSDIPKSELKPSTLGCLVLINALHNYIWETRQRHLNKVWTNEETEKMHRHIEPALKAWQSAWANNPHHSLERPNPFGMGPLSADAIPLLDLAYVRLFVNMSRTKEKFWQRDWEGLAEELSRGTEIIQHAEHSPGSNAESTADPSDASATSSVFVESPPTQSSSPEFSSAKFPFMPPQPPSQAPGSTRQISRREKHLRKAAFYAADSLANNNKLGVTFAEFTSKELPVQSAMCTFDCAQVLAEWIATLQDRVGRYLGILGRDDVDLSGVPSVILLEEEDMRLIIQIQDLLHTAEIKLNIDMVNGTVNGNYDANLQVDAMGGYAAKILRVTSYMLDKSAVWPVLNLMARCLESHAAIARARAEKSVLASE

SEQ ID NO: 7208 - DNA, 7367 bp, Muscodor strobelii
  misc_feature: SGI EST ID NO. CUFF.18564.2
  misc_feature: Variant of the nucleotide sequence at SEQ ID NO 7206
ctcatgttcagtgctggcaaagctcttgtttgtttgctgcatacatgtacctatccaattgatagcaagatacctgaatctagggtctgagacacacgtggcgttgaggttgctctctatcgcctgtcttccgaccgcccgacccgggggctgctactggtgctattgaccttccatcgtcttgactctgcctgcctcgacctacttgctgttggcaacctcacctctcgcaacctgaactctctctcgtggcctagccggactcgctgcggacgcattgctacacgtcgccgccgtcaattgtgccccggaaggcagaaggactctctgccgtgacgatccgcggtgtctggccgttggcagcccatcactcgcctcacgggctcacgtcaatcgtcatgtccaatccgccggccaatccaccaccaccgcccactacagctgctgctcctgcgcctgcacctaatagtgctagcagtaaagccggtacaagcaacgatgactctggtatgtccactctggtgtccacccgccacttatcgtgtcctatccatatagtacctatccagctccataattgtctccatatccacagccagaattacccccctatgccccccccatcgtgccctgcctgctgcgtctgtgtgcctgcgggttctgtgcgtgctcttgcttgcccggtgctgctgggactgctcctgctcctgccctgctgccctctgcccctccatccccctccatccgtcacccacccgttcaccaagctgtctatcaaccctcactctccccctccatcccgccctctacccgcgcccacgtccacacgccaaccaccacgcctcgcccccagttgcttgaattgcttgcctgttgctttcgcgctgtttgcgaatagccagagagcacatgatacgcagatccagacctagatccgcgggcattgttgttgaccatgactgtcaatcctccagcgtcgtccatcaccgtcaacaccaccaaggctcccgctcccgcaccgggccaattcccgccgcccaagaccgacaagcctcgccctcacgtctgcggcacctgccagcgctcctttgcccgcctcgagcatctgaagcgccacgagcgctcccacaccaaggagaagcccttcgagtgtcccgagtgcacgcgatgcttcgcccgccgcgacctgctgctgcgccaccagcagaagctgcaccagtccaccacgccctcttctcggccccggcgccgtgagagcaccagcggtgccgccaccgcccagagccgtgcccgcaagaacagcgtcgccaacgcggccagcgctgctaatgctgcaaacgccgccgcccagcccaatgcggcctcgatgcggccccgagccaacaccatcagccatgtcgacgggaaccacatccagatgattgcggccgccaacgcccaggttgcccgccagcagcagcagcagcaacacgtacctcaaatccaccaccacgcccgccaccagagcctcatcggcctgcccatgcacaacatggacgccttcgccggcatgtcggccgtcatgggccaccgcggcatgaaccacggcttgaagctcgacacacacggcctgcccaacatggacttcaacgccggcctccgtaccgcccctcccatctccttcaacccagactacgactttgagagcctcatgttcggccaggcaaactcgaccatcaatcccaatgcattgcattataccgagtctccccactccatggccctcgatccgacctctccattcgcccacggcatgacggatatgtccaataatgcccacaccgacgacagtctcgagtggttgacaggcttcgacaaccagatgtctttcacaaacatgaacgagaacgctatcggcgagtcgtccccctcggccatgagtaccaccagccagagcggcatgagcgatgtcatgctcgatggctccaaccataccacgatgcctactgtcactagctccatgtggcagcctggtctgatgggtcctccgcagatgaccactcctttctcgctggacatgaacggcggcgtcttcccggacctgctgaacggcgcccccgtatcgcctcagccgccggcgcaaaagacgatgagcgatatgtacaatttctcgtccccaccaccatcaatgagttcccttagcccttctgtcatgcagggcttatcggggcccggcttgaaccacgctatgagttttggacctggccccgaaacccctaccatgggcggagggcatcaatctcactctcctgctacgactatcacggacgctaccaggaccgccatcatcggtgctctttctcagtgtgtggcgaagagcagtggccgcaagtactccttcccttccccaagttcgccaatgtctcctcaagtccaggccagtccagatagctccgccgacctagcaaacagtctgcccaatgtccaggatctacaacgctatgtcgggagctatttgagatactgccacccacatctgcctttccttcatattcccacgctgtcttttgacgtgccgcccgccaataccggacgacacataacggcgggaggcagtggttgtctcatattggcaatggctgctattggtgcattgtacgagctggagaggccgcaatctagagagctgtttgagctatcgaagaagatgatccaaatctacctcgaggaacgacgaaaggctgacatgcgcaaagccgacttccgtcgaacacccacatctgatcagggagctcctactgcagaatccgtcactaacaccccgttgtggctcgttcagggcatgcttctgaacgtcgtatacggtcataactgtggcgacaagacagctaacgatatagcgtcaacacactccgcagcattggtgagcctcgctcaagcagcaggcttgcttaggtccataaaacttgactcggccgagcttcgagagatccaggcgatcgatgctgagggaaattggaacggcgggacaaaagccgagacagaagagcaagctgaatggctgcgatggaagacgctcgaggaacgtaaacgaactctttacatcatattcatactctccagtctcttagtggctgcctacaatcacaatcccgcccttaccaactcggagattttgctcgatctgccctgcgacgaggaattctttgccgccgagagcgccgccgcctttcaattgaaaggcggtgtacgcgccgctggccacaaccgtatgacattccacgaagcgctgggagaattgctccgcaccaacgagaagcagcagaaacttgccttcaataatgtccaccagccactgggttccatggtcaacatgagtgatattcccaaaagcgagctgaagccaagtacgcttggttgcttggttctcataaatgctttgcacaattacatatgggaaacaagacagcgtcatctcaataaagtttggaccaacgaggagaccgagaagatgcatcgccatatcgaaccggcgttgaaagcatggcaatctgcatgggcgaacaacccacatcatagcttggaaagacccaatccttttggcatgggaccattatctgcagatgctattccattacttgacttggcctacgtccggctgtttgtcaatatgtcacgaactaaagagaaattctggcagcgcgactgggagggccttgcagaagaactttctcgtggcacggagatcattcaacacgccgaacactcaccaggttcgaatgccgagtctacagcagacccgtccgatgcatcggccacaagctccgtgtttgtcgagtcgccgccaacgcaatcctcctcgcctgagttctcctctgctaagttccccttcatgcctccacaacctccctcacaggctccaggctcgacccgacaaatctcgcggcgagagaagcatctgcgcaaggcggcgttctacgccgccgattcattggctaacaacaataaattaggcgtgacttttgctgaatttactagcaaagagcttcctgtgcaatccgctatgtgcacatttgactgtgcccaagttcttgctgaatggatcgctaccctacaggatcgtgttggacgatacctaggaatactgggaagggatgatgtggatctaagtggagtccccagcgttattctcctggaggaagaagacatgcgactcatcatccaaatccaggaccttctgcatactgctgagatcaaattgaatatcgatatggtgaatggtacggtgaacggcaactacgatgccaatctacaggtggacgctatgggcggctatgccgccaagatacttcgcgttacttcatacatgttggataagtctgctgtgtggcctgtattgaatctcatggcccggtgcctcgaaagccatgcggccatagctcgagccagggcggagaagtctgtgcttgcaagtgagtgaggcatggactcaatggaaactgcctcaactgtctcgaatcgccgagcaacgtatcgcgatgttacgagatgctcgatggccgtgacggtccgtcttgctaaccgtggaatccaagacccctacagggcaagaaaaaggaaaacgccgcgcttctcgatcctcacgtcatgaatgtccgctttgctccattggttttattatttattatgataccatcgctagcgtttctcatcatatagggctttttcccatctacactgcgcatggtcattctacggatccattttggagttgttatttttatgtgtcgcgaattacccagccgcgacgtctcaatgttctgagaagatcagcaagggaacggagccaaatgattttacgtttcgacgaagcaatgactggtcataccttgatatatgatgcactcttagcggtcatatgagcaaatcatgtagcttttcagatgtccgggcttctgtgtagtaaacacagtcagtcgtagaaggcggaagatatgatcaaaaaggtcgaccaatgtcgacacagggcaaagaaatcgggtatataggagagggagaaagggagacatgatggagaaaataaagcgccgaaaatcacaatcgacgaccgagtcacgattctctgaaggaacggccttgagatgcactcgtgtaaccagggaagtgaggaccagatggcgaaaacgggtattcggaatctgtcacgggtggtgaagccgtggaactcggcttgttgttagacaacgctagatcttcaatgggggctacgacctgagaagatggcggcgtggggcgaattgttcgtatttacgcagcatgcgatgctacgagtgtatgggaatgaagtgaaaataaaacggagcctttaaaggcgacctgtgtatgtatgtgggagagatgatgtatccggagatacctagggagcgaatacatcaaggctacgtttgatcgtatgctgaattttttccaagagcaaggaattaaaaaaataccccaatatattgattgatctcctcaagtatgaaatcgaacaaagtccaacagcaaggtaagaaaatggtatatgaccaataatccggtttcttgccgctcctagatgatcattctacgactgcctatccaagtcatgccatagatgtttgttttccgcccctttccgttagtcttggtttaattttaatctactttgcccttgttcccaccctcattaccaaaatcaacacccgtgatgctgctccccgcgctcgtggtcgtacttgagtctcccacgcgatagctgaaatcgacgactccgacgattttgctgacggtctttacaagaccttcgatatcgtcacagaccagcgcactgcaaacttggaggatcgcgaattcggcgtagcctgcttgggtcatattcttagcgtctagtaaaccgcgagcgcgtgtggttttcgctgccgcgtctatggcttcgagctgccgggttagttcgtagggacggggcagcttgagatgtggggggagggagtggccggattggagcgcgttggagaggagggttagtacgcctatgattgactgttgcgttggtgcgatgtcggcgaggagcacgcggagggcgtcgagccaggcgcggttgttgagttctgctttgagtttactctcggtctctgggttggaggggttgtcacaagttgcggcgtcaagacaatctgtgatcgtcatctctggacagcccatgccgccgccgccgacggtgtaggagaggagggtgaggtaggagtttatgcgggagcagcggacgattatgtcttggtagagttctcgcgggaaacgaccaccgattgttggttcccagcgttggaactcggcgtgttgggcgagtgaggggaggaggagcatcagtttgctgaagaggcgtcgtcgatgcttagctagatggtaggctggcgtgcctttgatgtttcgatctccgtatgtgcccttgagcttgctctctagtgttccgttgatggcactgaagtaagtggctagcatgtagagagtagttgagagatcccgccgcagccaacttctctcggtgatcggggacgggaaaatagtccagaaaaaggcaatggcacagcctgctgcaacagtagcaaggcggtaaggggctaatttgtagatcgggtagtaaggctgaccggttgtttctgatactgcgataccgattttcagtacttgtagctcgtatccaatgatcaagacctgtgtgaccatgcagatcatgacaccaggtatcatctgtggaaatttcacgagaaaatacatcgtgatagcctggaatatgtagaggaatacgaagattcccggaactttctcgtcaacaatgtaccaagcgataagcgcgaagatcgcgccaacgagagtgccaaagattctcaagaagaatccattaatggactgtccggatgtttgcgtcattccgattgcgatgataatcatagcccatacgagtctctgttcttggaagaacacttgtgtgttttcgaggaatgctacaattccaaccgtgagagttgctgcggcagcgcggaatccaaatgcagattcctcagatgcaaagaactttgaaatggcacgcaagaggttgccgagacgctcccacgcagtcttggccggtaagtgttctggatctctcttctgggcaaagctgtcacccatgtagacgatcgtaacaccggaatcaaaaaggtcagcatggttctcttcgtgcttatcttcgtccttgaagacgctcgcagcccatttttgcagcaccttaatcccaggtacaatgagtctattccgcgccatagtcccatcggcgaccttatggtccgcaaaccggacgaaccgaagtaccgcctctcctgctgcttcca

SEQ ID NO: 7209 - DNA, 3648 bp, Muscodor strobelii
  misc_feature: SGI cDNA ID NO. 562161
  misc_feature: Encodes the peptide sequence at SEQ ID NO 7210
atgtccaatccgccggccaatccaccaccaccgcccactacagctgctgctcctgcgcctgcacctaatagtgctagcagtaaagccggtacaagcaacgatgactctgatccagacctagatccgcgggcattgttgttgaccatgactgtcaatcctccagcgtcgtccatcaccgtcaacaccaccaaggctcccgctcccgcaccgggccaattcccgccgcccaagaccgacaagcctcgccctcacgtctgcggcacctgccagcgctcctttgcccgcctcgagcatctgaagcgccacgagcgctcccacaccaaggagaagcccttcgagtgtcccgagtgcacgcgatgcttcgcccgccgcgacctgctgctgcgccaccagcagaagctgcaccagtccaccacgccctcttctcggccccggcgccgtgagagcaccagcggtgccgccaccgcccagagccgtgcccgcaagaacagcgtcgccaacgcggccagcgctgctaatgctgcaaacgccgccgcccagcccaatgcggcctcgatgcggccccgagccaacaccatcagccatgtcgacgggaaccacatccagatgattgcggccgccaacgcccaggttgcccgccagcagcagcagcagcaacacgtacctcaaatccaccaccacgcccgccaccagagcctcatcggcctgcccatgcacaacatggacgccttcgccggcatgtcggccgtcatgggccaccgcggcatgaaccacggcttgaagctcgacacacacggcctgcccaacatggacttcaacgccggcctccgtaccgcccctcccatctccttcaacccagactacgactttgagagcctcatgttcggccaggcaaactcgaccatcaatcccaatgcattgcattataccgagtctccccactccatggccctcgatccgacctctccattcgcccacggcatgacggatatgtccaataatgcccacaccgacgacagtctcgagtggttgacaggcttcgacaaccagatgtctttcacaaacatgaacgagaacgctatcggcgagtcgtccccctcggccatgagtaccaccagccagagcggcatgagcgatgtcatgctcgatggctccaaccataccacgatgcctactgtcactagctccatgtggcagcctggtctgatgggtcctccgcagatgaccactcctttctcgctggacatgaacggcggcgtcttcccggacctgctgaacggcgcccccgtatcgcctcagccgccggcgcaaaagacgatgagcgatatgtacaatttctcgtccccaccaccatcaatgagttcccttagcccttctgtcatgcagggcttatcggggcccggcttgaaccacgctatgagttttggacctggccccgaaacccctaccatgggcggagggcatcaatctcactctcctgctacgactatcacggacgctaccaggaccgccatcatcggtgctctttctcagtgtgtggcgaagagcagtggccgcaagtactccttcccttccccaagttcgccaatgtctcctcaagtccaggccagtccagatagctccgccgacctagcaaacagtctgcccaatgtccaggatctacaacgctatgtcgggagctatttgagatactgccacccacatctgcctttccttcatattcccacgctgtcttttgacgtgccgcccgccaataccggacgacacataacggcgggaggcagtggttgtctcatattggcaatggctgctattggtgcattgtacgagctggagaggccgcaatctagagagctgtttgagctatcgaagaagatgatccaaatctacctcgaggaacgacgaaaggctgacatgcgcaaagccgacttccgtcgaacacccacatctgatcagggagctcctactgcagaatccgtcactaacaccccgttgtggctcgttcagggcatgcttctgaacgtcgtatacggtcataactgtggcgacaagacagctaacgatatagcgtcaacacactccgcagcattggtgagcctcgctcaagcagcaggcttgcttaggtccataaaacttgactcggccgagcttcgagagatccaggcgatcgatgctgagggaaattggaacggcgggacaaaagccgagacagaagagcaagctgaatggctgcgatggaagacgctcgaggaacgtaaacgaactctttacatcatattcatactctccagtctcttagtggctgcctacaatcacaatcccgcccttaccaactcggagattttgctcgatctgccctgcgacgaggaattctttgccgccgagagcgccgccgcctttcaattgaaaggcggtgtacgcgccgctggccacaaccgtatgacattccacgaagcgctgggagaattgctccgcaccaacgagaagcagcagaaacttgccttcaataatgtccaccagccactgggttccatggtcaacatgagtgatattcccaaaagcgagctgaagccaagtacgcttggttgcttggttctcataaatgctttgcacaattacatatgggaaacaagacagcgtcatctcaataaagtttggaccaacgaggagaccgagaagatgcatcgccatatcgaaccggcgttgaaagcatggcaatctgcatgggcgaacaacccacatcatagcttggaaagacccaatccttttggcatgggaccattatctgcagatgctattccattacttgacttggcctacgtccggctgtttgtcaatatgtcacgaactaaagagaaattctggcagcgcgactgggagggccttgcagaagaactttctcgtggcacggagatcattcaacacgccgaacactcaccaggttcgaatgccgagtctacagcagacccgtccgatgcatcggccacaagctccgtgtttgtcgagtcgccgccaacgcaatcctcctcgcctgagttctcctctgctaagttccccttcatgcctccacaacctccctcacaggctccaggctcgacccgacaaatctcgcggcgagagaagcatctgcgcaaggcggcgttctacgccgccgattcattggctaacaacaataaattaggcgtgacttttgctgaatttactagcaaagagcttcctgtgcaatccgctatgtgcacatttgactgtgcccaagttcttgctgaatggatcgctaccctacaggatcgtgttggacgatacctaggaatactgggaagggatgatgtggatctaagtggagtccccagcgttattctcctggaggaagaagacatgcgactcatcatccaaatccaggaccttctgcatactgctgagatcaaattgaatatcgatatggtgaatggtacggtgaacggcaactacgatgccaatctacaggtggacgctatgggcggctatgccgccaagatacttcgcgttacttcatacatgttggataagtctgctgtgtggcctgtattgaatctcatggcccggtgcctcgaaagccatgcggccatagctcgagccagggcggagaagtctgtgcttgcaagtgagtga

SEQ ID NO: 7210 - protein, 1215 aa, Muscodor strobelii
  misc_feature: SGI Peptide ID NO. 562161
  misc_feature (112)..(135): Pfam Id: PF00096 Pfam Desc: Zinc finger, C2H2 type
  misc_feature (84)..(106): Pfam Id: PF00096 Pfam Desc: Zinc finger, C2H2 type
  misc_feature (55)..(1215): NCBI GI: 171680920 Blast Desc: protein product [Podospora anserina] gi|170940418|emb|CAP65645.1| protein product [Podospora anserina]
  misc_feature (50)..(1212): NCBI GI: 46111723 Blast Desc: FG02743.1 [Gibberella zeae PH-1]
  misc_feature (89)..(1215): NCBI GI: 261359212 Blast Desc: DNA binding regulatory protein AmdX [Verticillium albo-atrum VaMs.102]
  misc_feature (53)..(1215): NCBI GI: 164422938 Blast Desc: NCU09496 [Neurospora crassa OR74A] gi|157069879|gb|EAA28620.2| conserved [Neurospora crassa OR74A]
  misc_feature (48)..(1212): NCBI GI: 225684532 Blast Desc: conserved [Paracoccidioides brasiliensis Pb03]
  misc_feature (53)..(1213): NCBI GI: 225561611 Blast Desc: DNA binding regulatory protein AmdX [Ajellomyces capsulatus G186AR]
  misc_feature (53)..(1190): NCBI GI: 261189819 Blast Desc: C2H2 transcription factor [Ajellomyces dermatitidis SLH14081] gi|239591556|gb|EEQ74137.1| C2H2 transcription factor [Ajellomyces dermatitidis SLH14081] gi|239612914|gb|EEQ89901.1|
  misc_feature (69)..(1212): NCBI GI: 255956449 Blast Desc: Pc21g19860 [Penicillium chrysogenum Wisconsin 54-1255] gi|211590688|emb|CAP96883.1| Pc21g19860 [Penicillium chrysogenum Wisconsin 54-1255]
  misc_feature (52)..(1187): NCBI GI: 226278912 Blast Desc: DNA binding regulatory protein AmdX [Paracoccidioides brasiliensis Pb01]
  misc_feature (52)..(1187): NCBI GI: 226294189 Blast Desc: DNA binding regulatory protein AmdX [Paracoccidioides brasiliensis Pb18]
MSNPPANPPPPPTTAAAPAPAPNSASSKAGTSNDDSDPDLDPRALLLTMTVNPPASSITVNTTKAPAPAPGQFPPPKTDKPRPHVCGTCQRSFARLEHLKRHERSHTKEKPFECPECTRCFARRDLLLRHQQKLHQSTTPSSRPRRRESTSGAATAQSRARKNSVANAASAANAANAAAQPNAASMRPRANTISHVDGNHIQMIAAANAQVARQQQQQQHVPQIHHHARHQSLIGLPMHNMDAFAGMSAVMGHRGMNHGLKLDTHGLPNMDFNAGLRTAPPISFNPDYDFESLMFGQANSTINPNALHYTESPHSMALDPTSPFAHGMTDMSNNAHTDDSLEWLTGFDNQMSFTNMNENAIGESSPSAMSTTSQSGMSDVMLDGSNHTTMPTVTSSMWQPGLMGPPQMTTPFSLDMNGGVFPDLLNGAPVSPQPPAQKTMSDMYNFSSPPPSMSSLSPSVMQGLSGPGLNHAMSFGPGPETPTMGGGHQSHSPATTITDATRTAIIGALSQCVAKSSGRKYSFPSPSSPMSPQVQASPDSSADLANSLPNVQDLQRYVGSYLRYCHPHLPFLHIPTLSFDVPPANTGRHITAGGSGCLILAMAAIGALYELERPQSRELFELSKKMIQIYLEERRKADMRKADFRRTPTSDQGAPTAESVTNTPLWLVQGMLLNVVYGHNCGDKTANDIASTHSAALVSLAQAAGLLRSIKLDSAELREIQAIDAEGNWNGGTKAETEEQAEWLRWKTLEERKRTLYIIFILSSLLVAAYNHNPALTNSEILLDLPCDEEFFAAESAAAFQLKGGVRAAGHNRMTFHEALGELLRTNEKQQKLAFNNVHQPLGSMVNMSDIPKSELKPSTLGCLVLINALHNYIWETRQRHLNKVWTNEETEKMHRHIEPALKAWQSAWANNPHHSLERPNPFGMGPLSADAIPLLDLAYVRLFVNMSRTKEKFWQRDWEGLAEELSRGTEIIQHAEHSPGSNAESTADPSDASATSSVFVESPPTQSSSPEFSSAKFPFMPPQPPSQAPGSTRQISRREKHLRKAAFYAADSLANNNKLGVTFAEFTSKELPVQSAMCTFDCAQVLAEWIATLQDRVGRYLGILGRDDVDLSGVPSVILLEEEDMRLIIQIQDLLHTAEIKLNIDMVNGTVNGNYDANLQVDAMGGYAAKILRVTSYMLDKSAVWPVLNLMARCLESHAAIARARAEKSVLASE

SEQ ID NO: 7211 - DNA, 7367 bp, Muscodor strobelii; identical to SEQ ID NO: 7208
  misc_feature: SGI EST ID NO. CUFF.18564.2
  misc_feature: Variant of the nucleotide sequence at SEQ ID NO 7209

SEQ ID NO: 7212 - DNA, 1248 bp, Muscodor strobelii
  misc_feature: SGI cDNA ID NO. 562162
  misc_feature: Encodes the peptide sequence at SEQ ID NO 7213
atgccgactcctaataagcaggatcagatcctcatcgttggcggtgggacatggggtttgtcgacagcatacacactcgcttgcgacgggtatacatcagtcacagttctcgaagcaggggaaacaattccttcacctctttctgctggtaatgatctaaacaagattatacgggccgaatatacagaccctttctatgcggattttgcgctcgaggctatccacgagtggaagtctaacccggtctataaaccccattacttcgaaaccggttatctattaggcaacacaggcaaggcgcccgaggagaccaaactgaccgtcatccgacaacgcgagagtatccagacaaagtccgcatgggcagggaaaattacacccatcagcacgcgagaggacatccgtcatgttgccccagtacttgatggaccgatggaaggttggcttggctatttcaacgcttttgctggttacgcacacgcggctaatgccatcaaatccacgtataaggcttgtttagcaaagggcgtcacgatctgcatgggagaggctgcagcaagtctaatatatgatagtgataaatgcgtgggagtcaacacggcttctggcaagcgtttcactgctgatgttgttgttctgaccatgggcgcgtccctcggccgaatactgccagagctagagagacaggttgtggcgaaggcttggtcggtagcgcacatacagcttacgccatctgaagcagagaaactgaaagatatacctgtcaccttcgctagagatttaggttttttcttcgagcctgagccaggtacgggactcttcaagatctgcactagcggcgcgggcatttccaatttcgagactcccacaaactcagtgccacccgcaaacaacgacttcatcctccccgaggacgagggaaaaatgcggcaactaatgagagatactctacctgatcttgctgaccggcccttcaccaatcggcatatttgttggtgcgctgacacggcggacactgatttcatcattgatgccctgccagggaaaagggggctctttgtcgctaccggcgactcaggccatggcttcaaaatgatgccgatagcaggtaggtggatacaaaaattgatcgagacaggttatcaaaacgagcctaaatggaggtggaaagagaacaccgatgccaccggctgggtcgactggcggcatggtgaaataacagacctcaagaataggatacagttgtag

SEQ ID NO: 7213 - protein, 415 aa, Muscodor strobelii
  misc_feature: SGI Peptide ID NO. 562162
  misc_feature (9)..(376): Pfam Id: PF01266 Pfam Desc: FAD dependent oxidoreductase
  misc_feature (9)..(54): Pfam Id: PF00732 Pfam Desc: GMC oxidoreductase
  misc_feature (5)..(409): NCBI GI: 256727851 Blast Desc: NECHADRAFT_46190 [Nectria haematococca mpVI 77-13-4]
  misc_feature (10)..(390): NCBI GI: 256723206 Blast Desc: NECHADRAFT_51810 [Nectria haematococca mpVI 77-13-4]
  misc_feature (1)..(410): NCBI GI: 145237874 Blast Desc: An07g05010 [Aspergillus niger] gi|134076061|emb|CAK39420.1| protein product [Aspergillus niger]
  misc_feature (6)..(411): NCBI GI: 256720516 Blast Desc: NECHADRAFT_55834 [Nectria haematococca mpVI 77-13-4]
  misc_feature (6)..(409): NCBI GI: 115443404 Blast Desc: conserved [Aspergillus terreus NIH2624] gi|114188378|gb|EAU30078.1| conserved [Aspergillus terreus NIH2624]
  misc_feature (1)..(409): NCBI GI: 46116002 Blast Desc: FG03843.1 [Gibberella zeae PH-1]
  misc_feature (5)..(411): NCBI GI: 169765380 Blast Desc: [Aspergillus oryzae RIB40] gi|83765016|dbj|BAE55159.1| protein product [Aspergillus oryzae]
  misc_feature (5)..(411): NCBI GI: 238481915 Blast Desc: sarcosine oxidase, [Aspergillus flavus NRRL3357] gi|220700246|gb|EED56584.1| sarcosine oxidase, [Aspergillus flavus NRRL3357]
  misc_feature (6)..(409): NCBI GI: 255935113 Blast Desc: Pc13g01380 [Penicillium chrysogenum Wisconsin 54-1255] gi|211583203|emb|CAP91207.1| Pc13g01380 [Penicillium chrysogenum Wisconsin 54-1255]
  misc_feature (6)..(410): NCBI GI: 46114458 Blast Desc: FG03071.1 [Gibberella zeae PH-1]
  misc_feature (6)..(391): SWISSPROT Homolog: EC 1.5.3.7 L-pipecolate oxidase
MPTPNKQDQILIVGGGTWGLSTAYTLACDGYTSVTVLEAGETIPSPLSAGNDLNKIIRAEYTDPFYADFALEAIHEWKSNPVYKPHYFETGYLLGNTGKAPEETKLTVIRQRESIQTKSAWAGKITPISTREDIRHVAPVLDGPMEGWLGYFNAFAGYAHAANAIKSTYKACLAKGVTICMGEAAASLIYDSDKCVGVNTASGKRFTADVVVLTMGASLGRILPELERQVVAKAWSVAHIQLTPSEAEKLKDIPVTFARDLGFFFEPEPGTGLFKICTSGAGISNFETPTNSVPPANNDFILPEDEGKMRQLMRDTLPDLADRPFTNRHICWCADTADTDFIIDALPGKRGLFVATGDSGHGFKMMPIAGRWIQKLIETGYQNEPKWRWKENTDATGWVDWRHGEITDLKNRIQL

SEQ ID NO: 7214 - DNA, 1773 bp, Muscodor strobelii
  misc_feature: SGI EST ID NO. CUFF.17881.0
  misc_feature: Variant of the nucleotide sequence at SEQ ID NO 7212
cctcaatctgctcgcttcggacattcttcacataatcaactatcaataagctcatgaaccgataatctatgtcaaggtagtcaatcgacttctggatcaaggaaacatatggtcgatatgcatgcgtcgatcatgctctcgacttgagtcttggtactgccatcatgatttgggctggcataagataggcatcacgcgtattctcggtggtggctgcggcgactttatacgagcataagacaagaccatgaaacattttcgaataatctcaacatcagaatcatccaatgccgactcctaataagcaggatcagatcctcatcgttggcggtgggacatggggtttgtcgacagcatacacactcgcttgcgacgggtatacatcagtcacagttctcgaagcaggggaaacaattccttcacctctttctgctggtaatgatctaaacaagattatacgggccgaatatacagaccctttctatgcggattttgcgctcgaggctatccacgagtggaagtctaacccggtctataaaccccattacttcgaaaccggttatctattaggcaacacaggcaaggcgcccgaggagaccaaactgaccgtcatccgacaacgcgagagtatccagacaaagtccgcatgggcagggaaaattacacccatcagcacgcgagaggacatccgtcatgttgccccagtacttgatggaccgatggaaggttggcttggctatttcaacgcttttgctggttacgcacacgcggctaatgccatcaaatccacgtataaggcttgtttagcaaagggcgtcacgatctgcatgggagaggctgcagcaagtctaatatatgatagtgataaatgcgtgggagtcaacacggcttctggcaagcgtttcactgctgatgttgttgttctgaccatgggcgcgtccctcggccgaatactgccagagctagagagacaggttgtggcgaaggcttggtcggtagcgcacatacagcttacgccatctgaagcagagaaactgaaagatatacctgtcaccttcgctagagatttaggttttttcttcgagcctgagccaggtacgggactcttcaagatctgcactagcggcgcgggcatttccaatttcgagactcccacaaactcagtgccacccgcaaacaacgacttcatcctccccgaggacgagggaaaaatgcggcaactaatgagagatactctacctgatcttgctgaccggcccttcaccaatcggcatatttgttggtgcgctgacacggcggacactgatttcatcattgatgccctgccagggaaaagggggctctttgtcgctaccggcgactcaggccatggcttcaaaatgatgccgatagcaggtaggtggatacaaaaattgatcgagacaggttatcaaaacgagcctaaatggaggtggaaagagaacaccgatgccaccggctgggtcgactggcggcatggtgaaataacagacctcaagaataggatacagttgtagtcagcttaagcgcgtatacagaaatatatacatgtctaaaaacttatttactacaatggttagacaacatggtgaaagtatggtctggactacagattggttacagcctccaatttgttggatcgggtccttcagcctggatggctgtataacttaagacgttttcttttccctcgagagctgtcgattgcatcgctgttctctcattgttgtattaataggtacgcaaacatcaaag

SEQ ID NO: 7215 - DNA, 1089 bp, Muscodor strobelii
  misc_feature: SGI cDNA ID NO. 562163
  misc_feature: Reduced expression when VOC is produced
  misc_feature: Encodes the peptide sequence at SEQ ID NO 7216
atggcaccgcccgccgagatcaccatccccacaacctccctgcacacgcccgccgacaactcaaagccctacacactatacaacatcacattgagacttccgctgcgcacttttgtcgttcagaagcgctactccgacttcgcctccctgcatcaaaccctcaccaacctcgtctccgccgcgccgccggctcctttacccgctaaatcctggttcaagtctactctcaaatcccccgagctgctcgaagaccgccgcagaggcctcgagtcctatcttcgtgccatcgcagaatcgcccgaccgacggtggcgcgacactcccacttggcgcacgttcctcaacctacccgccgccagtagcactggcaacagcgctgcgagcgtcactggaggctatggaatccccaacaaagatgctgccaatgccgcagccgctgaggatccgggcacgtggttagatcttcacggcgagatgaagagagactttcaggaagcccggaggtgcttggcaaagagggacgctgctctcgatagcaacgccgccatacagtcggcctcggccgctaagaaggcattggtaaaggcaggcgggctcatgactactttgaaatctggcctgcaagctatggaagatgccaaaagactgggcgagggcgaaattcggagacggaaagatctcttagcggccgcacgggtcgatagagaggatctcgagaccttgacttccactatgacctcgacgacacgacccgtacaggcttcttccgcagcagcaagcagggccgcgccgcaacgaaccgaaccctccaagggtcggagagtgctgggcgcacccatccctgaatctgagcggacgagagaggtagataacaatggcgtcgtccaactccaggtgcagatgatgaaggagcaagatgaagacgttgaggcattgggcaagatcatcaggcggcagcgggacatggcagaggctatcacccgcgaggtggaggaacagaatgagatgctggatcatgttaacgaccaaaccgatctcttgcaaggcaaggtggatattgccaagaagcgggtaaagaagatatcatga

SEQ ID NO: 7216 - protein, 362 aa, Muscodor strobelii
  misc_feature: SGI Peptide ID NO. 562163
  misc_feature (5)..(117): Pfam Id: PF00787 Pfam Desc: PX domain
  misc_feature (304)..(362): Pfam Id: PF05739 Pfam Desc: SNARE domain
  misc_feature (1)..(361): NCBI GI: 154301992 Blast Desc: BC1G_10233 [Botryotinia fuckeliana B05.10] gi|150855625|gb|EDN30817.1| BC1G_10233 [Botryotinia fuckeliana B05.10]
  misc_feature (1)..(357): NCBI GI: 85086620 Blast Desc: NCU00242 [Neurospora crassa OR74A] gi|28918808|gb|EAA28477.1| [Neurospora crassa OR74A]
  misc_feature (1)..(361): NCBI GI: 171685572 Blast Desc: protein product [Podospora anserina] gi|170942747|emb|CAP68400.1| protein product [Podospora anserina]
  misc_feature (1)..(361): NCBI GI: 156051516 Blast Desc: SS1G_07165 [Sclerotinia sclerotiorum 1980] gi|154704943|gb|EDO04682.1| SS1G_07165 [Sclerotinia sclerotiorum 1980]
  misc_feature (1)..(361): NCBI GI: 256732854 Blast Desc: NECHADRAFT_92992 [Nectria haematococca mpVI 77-13-4]
  misc_feature (1)..(362): NCBI GI: 39941032 Blast Desc: MGG_05428 [Magnaporthe grisea 70-15] gi|145022077|gb|EDK06097.1| MGG_05428 [Magnaporthe grisea 70-15]
  misc_feature (1)..(362): NCBI GI: 238496251 Blast Desc: SNARE complex subunit (Vam7), [Aspergillus flavus NRRL3357] gi|117166091|dbj|BAF36378.1| v-SNARE [Aspergillus oryzae] gi|220694241|gb|EED50585.1| SNARE complex subunit (Vam7),
  misc_feature (1)..(362): NCBI GI: 255942181 Blast Desc: Pc18g00120 [Penicillium chrysogenum Wisconsin 54-1255] gi|211586592|emb|CAP94236.1| Pc18g00120 [Penicillium chrysogenum Wisconsin 54-1255]
  misc_feature (1)..(362): NCBI GI: 119498145 Blast Desc: SNARE complex subunit (Vam7), [Neosartorya fischeri NRRL 181] gi|119413994|gb|EAW23933.1| SNARE complex subunit (Vam7), [Neosartorya fischeri NRRL 181]
  misc_feature (1)..(362): NCBI GI: 225684066 Blast Desc: Vam7p [Paracoccidioides brasiliensis Pb03]
  misc_feature: Useful for introducing or modulating the production of volatile compounds
MAPPAEITIPTTSLHTPADNSKPYTLYNITLRLPLRTFVVQKRYSDFASLHQTLTNLVSAAPPAPLPAKSWFKSTLKSPELLEDRRRGLESYLRAIAESPDRRWRDTPTWRTFLNLPAASSTGNSAASVTGGYGIPNKDAANAAAAEDPGTWLDLHGEMKRDFQEARRCLAKRDAALDSNAAIQSASAAKKALVKAGGLMTTLKSGLQAMEDAKRLGEGEIRRRKDLLAAARVDREDLETLTSTMTSTTRPVQASSAAASRAAPQRTEPSKGRRVLGAPIPESERTREVDNNGVVQLQVQMMKEQDEDVEALGKIIRRQRDMAEAITREVEEQNEMLDHVNDQTDLLQGKVDIAKKRVKKIS

SEQ ID NO: 7217 - DNA, 1696 bp, Muscodor strobelii
  misc_feature: SGI EST ID NO. CUFF.17937.0
  misc_feature: Variant of the nucleotide sequence at SEQ ID NO 7215
tgacgatgctacaggttgggccagtctaggcagcccacgatccatcaaactctcaaactgatctctgccacctgatcctctagcacttgatcgctgttctgtcttagttcttgtatattgtatacgtgtacctgaattgcacataaaaagatacggtagtcgaatgcgacactgaattctgatacatgccacctactttctcttcctcaggacgccgactctagccgttcatcaaagcgtcgtgacgacgccgtcgttgctattgagtatggcaccgcccgccgagatcaccatccccacaacctccctgcacacgcccgccgacaactcaaagccctacacactatacaacatcacattgagacttccgctgcgcacttttgtcgttcagaagcgctactccgacttcgcctccctgcatcaaaccctcaccaacctcgtctccgccgcgccgccggctcctttacccgctaaatcctggttcaagtctactctcaaatcccccgagctgctcgaagaccgccgcagaggcctcgagtcctatcttcgtgccatcgcagaatcgcccgaccgacggtggcgcgacactcccacttggcgcacgttcctcaacctacccgccgccagtagcactggcaacagcgctgcgagcgtcactggaggctatggaatccccaacaaagatgctgccaatgccgcagccgctgaggatccgggcacgtggttagatcttcacggcgagatgaagagagactttcaggaagcccggaggtgcttggcaaagagggacgctgctctcgatagcaacgccgccatacagtcggcctcggccgctaagaaggcattggtaaaggcaggcgggctcatgactactttgaaatctggcctgcaagctatggaagatgccaaaagactgggcgagggcgaaattcggagacggaaagatctcttagcggccgcacgggtcgatagagaggatctcgagaccttgacttccactatgacctcgacgacacgacccgtacaggcttcttccgcagcagcaagcagggccgcgccgcaacgaaccgaaccctccaagggtcggagagtgctgggcgcacccatccctgaatctgagcggacgagagaggtagataacaatggcgtcgtccaactccaggtgcagatgatgaaggagcaagatgaagacgttgaggcattgggcaagatcatcaggcggcagcgggacatggcagaggctatcacccgcgaggtggaggaacagaatgagatgctggatcatgttaacgaccaaaccgatctcttgcaaggcaaggtggatattgccaagaagcgggtaaagaagatatcatgagcagacgtcgatctttgagtctagagatttgaactcatacggtcttcactgtctcgcaatcacgcagggagtcatcgaagaccgacacgcggattgtattcgagctctctgggatttcttgctgtggagttgttttgcacagcgaggctgtatgttccacgggctaggtacattttgccccttttctactgggctctgttttcagcgcaggttgcatatatgataccaatagatcaagataatttctctatatttttaagcacaaatacaaaggtatgatttaggatcatccatcatacaaatacgcatgctcaatagtggcaggtggcaagatcagtc

SEQ ID NO: 7218 - DNA, 555 bp, Muscodor strobelii
  misc_feature: SGI cDNA ID NO. 562164
  misc_feature: Reduced expression when VOC is produced
  misc_feature: Encodes the peptide sequence at SEQ ID NO 7219
atgtatggcctcgtgttcacctctcttctgtccctggcggccgcggcgccaacaacctctacttcaaacccaacgtgctcgtcaacaaccatgaacaattttagatggactatcgaagattttacataccaggctggatatctgttcacgacgccagcccatcaagtctctagtggctctgttgcattcaaccttaccaacagagctgttgacgagaccgtctcatgcaccgcgtacagcacccagttggaagatttcttttacggaaacttcaactacaactgcactgccaacgatgactctaccacctttactacattcgcttttagccgcccgagtggtcagttgaacattaatcaaacttggacttgcgacgagaatgcagaccctgtgcaattctttggtgtcggcgccgcaaacttgactctcgactgtacagagtcaaactaccagaacccagattggcagatgggcgaaacgtactcagaccgcactattgactgcaaacccgtcaccataccactcaagccttcgcagatcacaggtgttgcgtga

SEQ ID NO: 7219 - protein, 184 aa, Muscodor strobelii
  misc_feature: SGI Peptide ID NO. 562164
  misc_feature (12)..(184): NCBI GI: 116198625 Blast Desc: CHGG_07468 [Chaetomium globosum CBS 148.51] gi|88178747|gb|EAQ86215.1| CHGG_07468 [Chaetomium globosum CBS 148.51]
  misc_feature (4)..(184): NCBI GI: 171692659 Blast Desc: protein product [Podospora anserina] gi|170946278|emb|CAP73079.1| protein product [Podospora anserina]
  misc_feature (25)..(184): NCBI GI: 85104130 Blast Desc: NCU01063 [Neurospora crassa OR74A] gi|18376212|emb|CAD21328.1| conserved [Neurospora crassa] gi|28923223|gb|EAA32439.1| [Neurospora crassa OR74A]
  misc_feature (26)..(184): NCBI GI: 39973213 Blast Desc: MGG_07901 [Magnaporthe grisea 70-15] gi|145012712|gb|EDJ97366.1| MGG_07901 [Magnaporthe grisea 70-15]
  misc_feature (33)..(182): NCBI GI: 116200293 Blast Desc: CHGG_08302 [Chaetomium globosum CBS 148.51] gi|88179581|gb|EAQ87049.1| CHGG_08302 [Chaetomium globosum CBS 148.51]
  misc_feature (25)..(184): NCBI GI: 261359884 Blast Desc: conserved [Verticillium albo-atrum VaMs.102]
  misc_feature (25)..(183): NCBI GI: 171682832 Blast Desc: protein product [Podospora anserina] gi|170941375|emb|CAP67025.1| protein product [Podospora anserina]
  misc_feature (10)..(183): NCBI GI: 256725991 Blast Desc: NECHADRAFT_42877 [Nectria haematococca mpVI 77-13-4]
  misc_feature (26)..(180): NCBI GI: 85115766 Blast Desc: NCU00773 [Neurospora crassa OR74A] gi|28926727|gb|EAA35693.1| [Neurospora crassa OR74A] gi|38636407|emb|CAE81944.1| [Neurospora crassa]
  misc_feature (24)..(171): NCBI GI: 164423400 Blast Desc: NCU08720 [Neurospora crassa OR74A] gi|16944677|emb|CAD11424.1| [Neurospora crassa] gi|157070077|gb|EAA34345.2| NCU08720 [Neurospora crassa OR74A]
  misc_feature: Useful for introducing or modulating the production of volatile compounds
MYGLVFTSLLSLAAAAPTTSTSNPTCSSTTMNNFRWTIEDFTYQAGYLFTTPAHQVSSGSVAFNLTNRAVDETVSCTAYSTQLEDFFYGNFNYNCTANDDSTTFTTFAFSRPSGQLNINQTWTCDENADPVQFFGVGAANLTLDCTESNYQNPDWQMGETYSDRTIDCKPVTIPLKPSQITGVA

SEQ ID NO: 7220 - DNA, 1149 bp, Muscodor strobelii
  misc_feature: SGI EST ID NO. CUFF.17943.0
  misc_feature: Variant of the nucleotide sequence at SEQ ID NO 7218
gacggacccagtaatactacctcgacaacacaatttcccgcaatacggcaggatatacgtcgtgatgggcaacggtaggggtttaggctggtgaaagccatcgtataaagaatcaaggtctcgcaatgtaatgatttcgcattccgaatcatcagattaccatcacctcatctcgttcttcaaataagctcctgcctcccaggaattaattcgacgtcaatccgcttcacaaagcaatctcgctccatacagttctcaaaaatgtatggcctcgtgttcacctctcttctgtccctggcggccgcggcgccaacaacctctacttcaaacccaacgtgctcgtcaacaaccatgaacaattttagatggactatcgaagattttacataccaggctggatatctgttcacgacgccagcccatcaagtctctagtggctctgttgcattcaaccttaccaacagagctgttgacgagaccgtctcatgcaccgcgtacagcacccagttggaagatttcttttacggaaacttcaactacaactgcactgccaacgatgactctaccacctttactacattcgcttttagccgcccgagtggtcagttgaacattaatcaaacttggacttgcgacgagaatgcagaccctgtgcaattctttggtgtcggcgccgcaaacttgactctcgactgtacagagtcaaactaccagaacccagattggcagatgggcgaaacgtactcagaccgcactattgactgcaaacccgtcaccataccactcaagccttcgcagatcacaggtgttgcgtgaacaacttaatgtgtaacataacttttacaaggtagcgacaactggtttgcatacaggagaataatgaattttgttatttcgggagcaagtcgtcatagacattaaagagttaatataatcataattggctaaccttgggctactattatcttgcaacaaattgtttttcttgaatcgctgagtactggggtcgaaattagctctcagtcccaatccatcacttctcctttgcacggtccttttgaatcagattcttgaccccttattttgctgcatcattctgcaatgcccgtttcgccaacctgcaaactaggtaataatgaggacttgctg

SEQ ID NO: 7221 - DNA, 1458 bp, Muscodor strobelii
  misc_feature: SGI cDNA ID NO. 562165
  misc_feature: Encodes the peptide sequence at SEQ ID NO 7222
atgtcgctggcatcaccagtgacgaaagacggcttcgcctacgccggtggggacctgtatgcagacgctagtggacacaaccgccatcgtcgtgccactatctccgaacttaaggaccatttcaagactggcgatggcaaggactacccggctcactggttcgaagctcagctgattcactatggtcttccaccatcaaagacgaaaggtgtcgcgcgtatgcgtttgcttgatgccgtcaacggaggaaagctatcagttccagcaaatatccagaaattggagacggaactaaagaaggaatgggcaaagaaggaacgcgaggctaagaaggcgttgaaggaagatagcagcacgaagaccgttaagaatgcaaagcgcaaggcagacaccgagggtgttgatgtcactgttaaagttggcggcgtcaatgtcaccatctcggctagcggcccgtcaaagaagattaaggctgagaacaagactaagccagcgacgcctgcaaagaccaccaagaaggaacccgagcctaaagctaaaactccgaagaaggccacggtgacttccaaaacaacgacgcccaagcccaaaccagagcctaaaggagaggcaaaggccccatcagtgtccaagaaagagcccgcagctaagaaggcgaatgcggttaagaaggaacccgttgtcaagaaggcgacggctgtaaaaaaggagcccaccgtcaagaagcccaccatcaaacaagagccttcctcttccgcaacttccgcgccgattgttagtcgcgccgctcgatattctggacctccccgaggaggctccaatgccgccagaggccgtgttcatcaaccttctcacaacctccctcacaaccacatgtgggacgatgacaacgacgatatccctgatgatcatatgtatgacgattacgacgatgatctcgacccgccgccgccttataccgaatcaactgctcgatgggcttctgattcatctgatgattggcccgataataccagactcgagtccttgggtctcctaaacggtcgctacgacatcaaatccccgtacgtaacagaacaatggggagatcgcaatttcagcttgagtcttacactcaacggtaccgagctgtggggtcgcttcgatcttggcgttgtcgatggagtcatacgcatgacacagcgaccttacacatcgtcgtatgactgtgttgaattcctatggcgaggtcgcgaacgcgaaggtccaatgatgtatggcaacaacaaccatggctggatcaaatttctcgggggtggccgtatcgagggccatattgactggcagtccatctcgttccatggcacccgcctcggaggtcaggatacgcgtactatcagtattggagatttacgtaccgagtgggatggatacaacgaggacgaatatgagcaggagaaccgcagacgttggagatga

SEQ ID NO: 7222 - protein, 485 aa, Muscodor strobelii
  misc_feature: SGI Peptide ID NO. 562165
  misc_feature (1)..(469): NCBI GI: 116201541 Blast Desc: CHGG_08655 [Chaetomium globosum CBS 148.51] gi|88177173|gb|EAQ84641.1| CHGG_08655 [Chaetomium globosum CBS 148.51]
  misc_feature (7)..(484): NCBI GI: 46117394 Blast Desc: FG04539.1 [Gibberella zeae PH-1]
  misc_feature (1)..(130): NCBI GI: 115491097 Blast Desc: [Aspergillus terreus NIH2624] gi|114197036|gb|EAU38736.1| [Aspergillus terreus NIH2624]
  misc_feature (1)..(476): NCBI GI: 169612429 Blast Desc: SNOG_09337 [Phaeosphaeria nodorum SN15] gi|160702508|gb|EAT83529.2| SNOG_09337 [Phaeosphaeria nodorum SN15]
  misc_feature (4)..(130): NCBI GI: 256729353 Blast Desc: NECHADRAFT_47452 [Nectria haematococca mpVI 77-13-4]
  misc_feature (12)..(110): NCBI GI: 255932157 Blast Desc: Pc12g08020 [Penicillium chrysogenum Wisconsin 54-1255] gi|211582254|emb|CAP80429.1| Pc12g08020 [Penicillium chrysogenum Wisconsin 54-1255]
  misc_feature (3)..(238): NCBI GI: 189190176 Blast Desc: PTRG_01094 [Pyrenophora tritici-repentis Pt-1C-BFP] gi|187973033|gb|EDU40532.1| PTRG_01094 [Pyrenophora tritici-repentis Pt-1C-BFP]
  misc_feature (337)..(484): NCBI GI: 170091460 Blast Desc: [Laccaria bicolor S238N-H82] gi|164648445|gb|EDR12688.1| [Laccaria bicolor S238N-H82]
  misc_feature (348)..(483): NCBI GI: 170091462 Blast Desc: [Laccaria bicolor S238N-H82] gi|164648446|gb|EDR12689.1| [Laccaria bicolor S238N-H82]
  misc_feature (4)..(111): NCBI GI: 170091460 Blast Desc: [Laccaria bicolor S238N-H82] gi|164648445|gb|EDR12688.1| [Laccaria bicolor S238N-H82]
MSLASPVTKDGFAYAGGDLYADASGHNRHRRATISELKDHFKTGDGKDYPAHWFEAQLIHYGLPPSKTKGVARMRLLDAVNGGKLSVPANIQKLETELKKEWAKKEREAKKALKEDSSTKTVKNAKRKADTEGVDVTVKVGGVNVTISASGPSKKIKAENKTKPATPAKTTKKEPEPKAKTPKKATVTSKTTTPKPKPEPKGEAKAPSVSKKEPAAKKANAVKKEPVVKKATAVKKEPTVKKPTIKQEPSSSATSAPIVSRAARYSGPPRGGSNAARGRVHQPSHNLPHNHMWDDDNDDIPDDHMYDDYDDDLDPPPPYTESTARWASDSSDDWPDNTRLESLGLLNGRYDIKSPYVTEQWGDRNFSLSLTLNGTELWGRFDLGVVDGVIRMTQRPYTSSYDCVEFLWRGREREGPMMYGNNNHGWIKFLGGGRIEGHIDWQSISFHGTRLGGQDTRTISIGDLRTEWDGYNEDEYEQENRRRWR

SEQ ID NO: 7223 - DNA, 213 bp, Muscodor strobelii
  misc_feature: SGI EST ID NO. CUFF.17949.0
  misc_feature: Variant of the nucleotide sequence at SEQ ID NO 7221
ccgataataccagactcgagtccttgggtctcctaaacggtcgctacgacatcaaatccccgtacgtaacagaacaatggggagatcgcaatttcagcttgagtcttacactcaacggtaccgagctgtggggtcgcttcgatcttggcgttgtcgatggagtcatacgcatgacacagcgaccttacacatcgtcgtatgactgtgttgaat

SEQ ID NO: 7224 - DNA, 378 bp, Muscodor strobelii
  misc_feature: SGI cDNA ID NO. 562166
  misc_feature: Encodes the peptide sequence at SEQ ID NO 7225
atgcgcttcaccaccttcaccgccgtcttcttcactggccagctcgtaagagcatcgtgctattattctggccaaagtggagatccccatgatctccttcgagcagccaatcagttttgctatggcggcggcgctaatggtacttatgcgcctaacgaaagtcgaactgcttgtatcgatggtaatcctaataatttcaactggcgtattgtaatccaaaacacggatagccagaatccaaaagatcttgactccgacccctgtacacgtaatttgatgggagtttttaaccgctgcagtggtggacaaggtggtagctttaccctagacgggttccacatagttgttgaccctaaccacggcctttgcccgaactag

SEQ ID NO: 7225 - protein, 125 aa, Muscodor strobelii
  misc_feature: SGI Peptide ID NO. 562166
MRFTTFTAVFFTGQLVRASCYYSGQSGDPHDLLRAANQFCYGGGANGTYAPNESRTACIDGNPNNFNWRIVIQNTDSQNPKDLDSDPCTRNLMGVFNRCSGGQGGSFTLDGFHIVVDPNHGLCPN

SEQ ID NO: 7226 - DNA, 888 bp, Muscodor strobelii
  misc_feature: SGI EST ID NO. CUFF.17907.0
  misc_feature: Variant of the nucleotide sequence at SEQ ID NO 7224
gaatggttggtcatcctggtcacgatgtgatatccgaagtaacgtgatgggacaatgcatgatgttgctggaatgtgaatgtacgacgtgaagagcctgaggcaatgaagcaaacaacatgcccatagaaccaatttgtacaaatatcgacgtaggttgctagaatttgggaaatcttccgagtcaatgaatactcatcaggtttgatacatacacaaggtccacgaactacaaggcacgaccatgcgcttcaccaccttcaccgccgtcttcttcactggccagctcgtaagagcatcgtgctattattctggccaaagtggagatccccatgatctccttcgagcagccaatcagttttgctatggcggcggcgctaatggtacttatgcgcctaacgaaagtcgaactgcttgtatcgatggtaatcctaataatttcaactggcgtattgtaatccaaaacacggatagccagaatccaaaagatcttgactccgacccctgtacacgtaatttgatgggagtttttaaccgctgcagtggtggacaaggtggtagctttaccctagacgggttccacatagttgttgaccctaaccacggcctttgcccgaactagaagggctagctaagctgtcttcacatctcggtcggcgagagttctatatgagctcttctcatccaccagcgatgaaggttttcgacaaaatgctgcccttcaggttatctataccaggagatcgatcatgtaccttaatatagattaagctgtcgtctttggaaattctatcaacactatattggtaatagcaactcgcacgtttgctgtctcttgggactagctccattcatatacatctagacttgcaactagacagttagcccg

SEQ ID NO: 7227 - DNA, 237 bp, Muscodor strobelii
  misc_feature: SGI cDNA ID NO. 562167
  misc_feature: Reduced expression when VOC is produced
  misc_feature: Encodes the peptide sequence at SEQ ID NO 7228
atgtcttcgcaccttgaagaggctagaaatgagccaaccaacccagtccccagcgatagcacacaggaggatctaagctcgaagatcgagactcacgatgaagcggtgaaagaccaagtcgacggtgctgtggccagtgggccgaagagagctgatcagacaacgggtggtcgtgttcaggttgctgagacgggtgacttacatgatcttgccgcgcgtcgaaagtccaagacatag

SEQ ID NO: 7228 - protein, 78 aa, Muscodor strobelii
  misc_feature: SGI Peptide ID NO. 562167
  misc_feature: Useful for introducing or modulating the production of volatile compounds
MSSHLEEARNEPTNPVPSDSTQEDLSSKIETHDEAVKDQVDGAVASGPKRADQTTGGRVQVAETGDLHDLAARRKSKT

SEQ ID NO: 7229 - DNA, 550 bp, Muscodor strobelii
  misc_feature: SGI EST ID NO. CUFF.17993.1
  misc_feature: Variant of the nucleotide sequence at SEQ ID NO 7227
agttactcgtaaatatcaaactgccagaactgtctgaaagtggatacccatcgcgaagattcaaagcaacgctattcatcatgtcttcgcaccttgaagaggctagaaatgagccaaccaacccagtccccagcgatagcacacaggaggatctaagctcgaagatcgagactcacgatgaagcggtgaaagaccaagtcgacggtgctgtggccagtgggccgaagagagctgatcagacaacgggtggtcgtgttcaggttgctgagacgggtgacttacatgatcttgccgcgcgtcgaaagtccaagacataggcgcggagttgaaggggaaacaaggatgaggtggaggataaagaggaatggtgacctatgagattatgagtgtatttgtattacgacttatgagttactgaagaggtacggtgtatgattgtgtgtcgtctgaggtaacagtggtgggtcaagaaatacagttatcatcaccgtttctacttccctttgcgtctgtgtctgagtgtcggctccccagatctcgcgcgtctgaa

SEQ ID NO: 7230 - DNA, 810 bp, Muscodor strobelii
  misc_feature: SGI cDNA ID NO. 562168
  misc_feature: Encodes the peptide sequence at SEQ ID NO 7231
atgccttggccgtggtcatcagtatcatcccagcctccatctcagtctacggccgaagagtccaggcccgccgcagatactgcctcgccttccaatgcgcccaagccggcgcccaaggtctatacctcgcggccaatcatccgcccagacttcagcttagaatccaaacctgtctccgtacacgatgatgtacaggtcaggacacagcgagaagatgggccatcgtcgttcgatgaattcttgaccatagggacgaaggctttcaaaaccggagccgtaacaggtggcgccggcgtactctttggagctggagcgggcatcattcgctctgcaccaccaagtctttttgctgtggctgctggtatccagtggttcgttcttggctctactttcatggcttccaaaggtctcatttgccatgcgtggggaggtgaagagagcatggcgagttctgccctcgtcaaagccaatggcgctgctggtggtattgctggcacagttggaggcatgctccgcggtccgcgcaatattatacccggaatgctcgttttcggcacactgggagcaggtggctcttatatgtcgcagcactttgtaccttcgacccaggacaaacctaagacaaactggctcgattcaagatggtctccgatgacaaaattgtcggacagagaatacatggacaaattagacgagaagatactccgtatcgatgcggaaattgctgttatcgatgataatattgcgtctatcaaggaagccgcacagttctcagacaaggctttggagcccaaggatacaccaaaatga

SEQ ID NO: 7231 - protein, 269 aa, Muscodor strobelii
  misc_feature: SGI Peptide ID NO. 562168
  misc_feature (79)..(256): NCBI GI: 261358398 Blast Desc: conserved [Verticillium albo-atrum VaMs.102]
  misc_feature (61)..(254): NCBI GI: 171685938 Blast Desc: protein product [Podospora anserina] gi|170942930|emb|CAP68583.1| protein product [Podospora anserina]
  misc_feature (88)..(260): NCBI GI: 46111389 Blast Desc: FG02576.1 [Gibberella zeae PH-1]
  misc_feature (88)..(268): NCBI GI: 256726172 Blast Desc: NECHADRAFT_94525 [Nectria haematococca mpVI 77-13-4]
  misc_feature (87)..(253): NCBI GI: 85081741 Blast Desc: NCU00458 [Neurospora crassa OR74A] gi|28917854|gb|EAA27541.1| [Neurospora crassa OR74A]
  misc_feature (79)..(256): NCBI GI: 116207548 Blast Desc: CHGG_03067 [Chaetomium globosum CBS 148.51] gi|88183664|gb|EAQ91132.1| CHGG_03067 [Chaetomium globosum CBS 148.51]
  misc_feature (43)..(266): NCBI GI: 154309386 Blast Desc: BC1G_07587 [Botryotinia fuckeliana B05.10] gi|150852411|gb|EDN27603.1| BC1G_07587 [Botryotinia fuckeliana B05.10]
  misc_feature (85)..(253): NCBI GI: 39939954 Blast Desc: [Magnaporthe grisea 70-15] gi|145010455|gb|EDJ95111.1| [Magnaporthe grisea 70-15]
  misc_feature (65)..(266): NCBI GI: 156058224 Blast Desc: SS1G_03123 [Sclerotinia sclerotiorum 1980] gi|154700911|gb|EDO00650.1| SS1G_03123 [Sclerotinia sclerotiorum 1980]
  misc_feature (68)..(255): NCBI GI: 169613705 Blast Desc: SNOG_09985 [Phaeosphaeria nodorum SN15] gi|111061200|gb|EAT82320.1| SNOG_09985 [Phaeosphaeria nodorum SN15]
MPWPWSSVSSQPPSQSTAEESRPAADTASPSNAPKPAPKVYTSRPIIRPDFSLESKPVSVHDDVQVRTQREDGPSSFDEFLTIGTKAFKTGAVTGGAGVLFGAGAGIIRSAPPSLFAVAAGIQWFVLGSTFMASKGLICHAWGGEESMASSALVKANGAAGGIAGTVGGMLRGPRNIIPGMLVFGTLGAGGSYMSQHFVPSTQDKPKTNWLDSRWSPMTKLSDREYMDKLDEKILRIDAEIAVIDDNIASIKEAAQFSDKALEPKDTPK

SEQ ID NO: 7232 - DNA, 1344 bp, Muscodor strobelii
  misc_feature: SGI EST ID NO. CUFF.18012.1
  misc_feature: Variant of the nucleotide sequence at SEQ ID NO 7230
ccagattctatgccacactacccaattcgccagacctcacctccagctacgacatcgtatatgttcgctcttagtattacctgaaagtacctatattattcttctcattaagagtttactaccttaacataatatgagtttgaaagtttatttcgattttgaataacctctgtccactcccctatcctaattctactcatatgtccaattctacatcaccgcaaataatctagcatgccttggccgtggtcatcagtatcatcccagcctccatctcagtctacggccgaagagtccaggcccgccgcagatactgcctcgccttccaatgcgcccaagccggcgcccaaggtctatacctcgcggccaatcatccgcccagacttcagcttagaatccaaacctgtctccgtacacgatgatgtacaggtcaggacacagcgagaagatgggccatcgtcgttcgatgaattcttgaccatagggacgaaggctttcaaaaccggagccgtaacaggtggcgccggcgtactctttggagctggagcgggcatcattcgctctgcaccaccaagtctttttgctgtggctgctggtatccagtggttcgttcttggctctactttcatggcttccaaaggtctcatttgccatgcgtggggaggtgaagagagcatggcgagttctgccctcgtcaaagccaatggcgctgctggtggtattgctggcacagttggaggcatgctccgcggtccgcgcaatattatacccggaatgctcgttttcggcacactgggagcaggtggctcttatatgtcgcagcactttgtaccttcgacccaggacaaacctaagacaaactggctcgattcaagatggtctccgatgacaaaattgtcggacagagaatacatggacaaattagacgagaagatactccgtatcgatgcggaaattgctgttatcgatgataatattgcgtctatcaaggaagccgcacagttctcagacaaggctttggagcccaaggatacaccaaaatgagtatagacgctcgatacactcaaccatcgagccgggggttcatgtatatcagaagactcgatgcctatctagacgtttagtgctgaatttgcacttgtataacaagcgaggtgttctctttacctaggatatctaccaatgtacaatcaaaattcgagacatgatagagcagttcagaattattgcttatcaagatcaaagccacacccaaatctctaaccattcgatcttgttggttccaaggaacaatcctccagtaaggagggcgcagtttctaagcccttgcattttgcagcgaat

SEQ ID NO: 7233 - DNA, 1704 bp, Muscodor strobelii
  misc_feature: SGI cDNA ID NO. 562169
  misc_feature: Reduced expression when VOC is produced
  misc_feature: Encodes the peptide sequence at SEQ ID NO 7234
atggcgcccaaaaagaaggagacgcagaagatgtctctcagctcgttcatgaacgacgaaaagtatggcgggtcatgggctgacgaagtcgaggacgttgtcggctcccagcctctgccgccccccaccgtcgagcgccgaagctaccagccctacggcggcagcagtgaccgcggcgagcgcagctaccccgttcgtgactctttccctactcagctacccaccaagccgccctataccgcccatctcggaaatctttcctatgaagccaccagcgaggccgtcaccgacttctttgccgagtgcgagatcaccagcgtccgcatcatcgaagaccgcatcgagcaacggcctaagggattcgcctacgccgagttcgctacccttgatggactcaagatggcactcgaactcgatggatcaagcttccagggacgcaccatcaaagtgcgaattgccgatcctcccaaggaccgcggcgatggaggcatggctcgagaggccatcagctgggagcgcaagggtcctttggccgatgctcctcgcggcaacgatcgacgtcctaacgacttcggagaacgtcgtcagcccagcttccgggacgccccacccgatgatgggaaagtccgagattttggcaactgggaacgcaagggtcccctttctcccattcagccagagcgctccatgtcgcgcgacggtagtcgccctcgaaacaacccccgtaccgattctttccagaaagaccgcaaggtttcacctgccacttggggcgaaggaaggccagaaggctcccgcggccctcccagagagttcagagagcgtccggaacgccccgagagaacgcccacagctgccgagcttgacaaccaatggcgcaccaacatgcgtcctgacgcaccagtcaagtcttcagagcagtctcgtgaaggcagcgaagcaccgccttcgcctgctcctgcagccgctgtccctgcacccggtggacgcccacgcttggcgctcgccaagagaactgtctccgaggctcccgatgttgcatcgcctgcgctatcagctagtggcgactcgaaagcaagcccgttcggcgctgcccgtcctattgatacggcagctaaagagcgtgagattgccgacaagcgtgagcaggtgctaaaagaaaagaaggaagcggacgaaaaggccaaggaggaccgtcgtctagctaaagaagcagcggcaaaggaggccgaagagaaggctgctgccgaagctgaagccgaagctgctgcaatcgccgccgcagccgcggcccctgaaactaagcccgagactcctgtcgagtcttcaaccgaggctattgagaatggcactcctaatgagaaggtcccgacgagacctaaggacaacgtccaaaacaccaagtcccgcgcaacagacagtggcaactggaggacagcatctggagagcaacgacaaggacgtggcggctatgtcaacgcacgcggccgcggcgatgctcgaggacgtggtggtgctccccgtggcccccgaggcggtgcttatgagggtggccgaggtgctagatccaacggcaacgctccagctgctccttcgcagcagcccgcccctactagccctactgctgccactgaaggagaagctgcccctccacaggacccagatggctggaccactgtctccactaagggacgacgccgttag

SEQ ID NO: 7234 - protein, 567 aa, Muscodor strobelii
  misc_feature: SGI Peptide ID NO. 562169
  misc_feature (81)..(150): Pfam Id: PF00076 Pfam Desc: RNA recognition motif. (a.k.a. RRM, RBD, or RNP domain)
  misc_feature (1)..(566): NCBI GI: 85081737 Blast Desc: NCU00457 [Neurospora crassa OR74A] gi|28917853|gb|EAA27540.1| conserved [Neurospora crassa OR74A]
  misc_feature (1)..(560): NCBI GI: 145602001 Blast Desc: MGG_05264 [Magnaporthe grisea 70-15] gi|145010454|gb|EDJ95110.1| MGG_05264 [Magnaporthe grisea 70-15]
  misc_feature (1)..(561): NCBI GI: 154309388 Blast Desc: BC1G_07588 [Botryotinia fuckeliana B05.10] gi|150852412|gb|EDN27604.1| BC1G_07588 [Botryotinia fuckeliana B05.10]
  misc_feature (1)..(561): NCBI GI: 156058226 Blast Desc: SS1G_03124 [Sclerotinia sclerotiorum 1980] gi|154700912|gb|EDO00651.1| SS1G_03124 [Sclerotinia sclerotiorum 1980]
  misc_feature (1)..(484): NCBI GI: 256725772 Blast Desc: NECHADRAFT_42935 [Nectria haematococca mpVI 77-13-4]
  misc_feature (1)..(566): NCBI GI: 46111387 Blast Desc: FG02575.1 [Gibberella zeae PH-1]
  misc_feature (2)..(566): NCBI GI: 171685940 Blast Desc: protein product [Podospora anserina] gi|170942931|emb|CAP68584.1| protein product [Podospora anserina]
  misc_feature (4)..(399): NCBI GI: 238841355 Blast Desc: translation initiation factor 4B [Microsporum canis CBS 113480]
  misc_feature (1)..(313): NCBI GI: 261358399 Blast Desc: translation initiation factor 4B [Verticillium albo-atrum VaMs.102]
  misc_feature (11)..(565): NCBI GI: 154276056 Blast Desc: conserved [Ajellomyces capsulatus NAm1] gi|150413946|gb|EDN09311.1| conserved [Ajellomyces capsulatus NAm1]
  misc_feature: Useful for introducing or modulating the production of volatile compounds
MAPKKKETQKMSLSSFMNDEKYGGSWADEVEDVVGSQPLPPPTVERRSYQPYGGSSDRGERSYPVRDSFPTQLPTKPPYTAHLGNLSYEATSEAVTDFFAECEITSVRIIEDRIEQRPKGFAYAEFATLDGLKMALELDGSSFQGRTIKVRIADPPKDRGDGGMAREAISWERKGPLADAPRGNDRRPNDFGERRQPSFRDAPPDDGKVRDFGNWERKGPLSPIQPERSMSRDGSRPRNNPRTDSFQKDRKVSPATWGEGRPEGSRGPPREFRERPERPERTPTAAELDNQWRTNMRPDAPVKSSEQSREGSEAPPSPAPAAAVPAPGGRPRLALAKRTVSEAPDVASPALSASGDSKASPFGAARPIDTAAKEREIADKREQVLKEKKEADEKAKEDRRLAKEAAAKEAEEKAAAEAEAEAAAIAAAAAAPETKPETPVESSTEAIENGTPNEKVPTRPKDNVQNTKSRATDSGNWRTASGEQRQGRGGYVNARGRGDARGRGGAPRGPRGGAYEGGRGARSNGNAPAAPSQQPAPTSPTAATEGEAAPPQDPDGWTTVSTKGRRR

SEQ ID NO: 7235 - DNA, 3230 bp, Muscodor strobelii
  misc_feature: SGI EST ID NO. CUFF.18416.0
  misc_feature: Variant of the nucleotide sequence at SEQ ID NO 7233
gccctccccaccaccagcgcctgcgaattggttgaattggtcgaattgtagtgggagaaaggcagaattggccctccgccattaaatttttcttaagcaagcgtctccccttgcacgaccctcttctcggagactccccttcgacatcccatcgcctgccaatcgtcacaccgcgacattggcgacgggacactcctcttacccaaagtcttgatctgttgcggccctggtctcaacagttccgaaaacacacaacttagccacccaaagcctcgtcgagtgtactttactacactcttcgcccacatcccaccgactgcatccagtcgtcaccccgatccctctgcgcgccaccaccctctgctctcgtctcgctttcgcgaaacaacaccgcaatcatggcgcccaaaaagaaggagacgcagaagatgtctctcagctcgttcatgaacgacgaaaagtatggcgggtcatgggctgacgaagtcgaggacgttgtcggctcccagcctctgccgccccccaccgtcgagcgccgaagctaccagccctacggcggcagcagtgaccgcggcgagcgcagctaccccgttcgtgactctttccctactcagctacccaccaagccgccctataccgcccatctcggaaatctttcctatgaagccaccagcgaggccgtcaccgacttctttgccgagtgcgagatcaccagcgtccgcatcatcgaagaccgcatcgagcaacggcctaagggattcgcctacgccgagttcgctacccttgatggactcaagatggcactcgaactcgatggatcaagcttccagggacgcaccatcaaagtgcgaattgccgatcctcccaaggaccgcggcgatggaggcatggctcgagaggccatcagctgggagcgcaagggtcctttggccgatgctcctcgcggcaacgatcgacgtcctaacgacttcggagaacgtcgtcagcccagcttccgggacgccccacccgatgatgggaaagtccgagattttggcaactgggaacgcaagggtcccctttctcccattcagccagagcgctccatgtcgcgcgacggtagtcgccctcgaaacaacccccgtaccgattctttccagaaagaccgcaaggtttcacctgccacttggggcgaaggaaggccagaaggctcccgcggccctcccagagagttcagagagcgtccggaacgccccgagagaacgcccacagctgccgagcttgacaaccaatggcgcaccaacatgcgtcctgacgcaccagtcaagtcttcagagcagtctcgtgaaggcagcgaagcaccgccttcgcctgctcctgcagccgctgtccctgcacccggtggacgcccacgcttggcgctcgccaagagaactgtctccgaggctcccgatgttgcatcgcctgcgctatcagctagtggcgactcgaaagcaagcccgttcggcgctgcccgtcctattgatacggcagctaaagagcgtgagattgccgacaagcgtgagcaggtgctaaaagaaaagaaggaagcggacgaaaaggccaaggaggaccgtcgtctagctaaagaagcagcggcaaaggaggccgaagagaaggctgctgccgaagctgaagccgaagctgctgcaatcgccgccgcagccgcggcccctgaaactaagcccgagactcctgtcgagtcttcaaccgaggctattgagaatggcactcctaatgagaaggtcccgacgagacctaaggacaacgtccaaaacaccaagtcccgcgcaacagacagtggcaactggaggacagcatctggagagcaacgacaaggacgtggcggctatgtcaacgcacgcggccgcggcgatgctcgaggacgtggtggtgctccccgtggcccccgaggcggtgcttatgagggtggccgaggtgctagatccaacggcaacgctccagctgctccttcgcagcagcccgcccctactagccctactgctgccactgaaggagaagctgcccctccacaggacccagatggctggaccactgtctccactaagggacgacgccgttagtaccgcgtccaggcgcttttggcatgagttgtacaaaaccaaattctctattgcttaggctcttgatcaaaggggaaaatatgtgccacgtctctcgattacgccgatatcatcacgacttgttttcattcccgatacttgctaggggcgatacgcattttctttccttctactagaccacggctgtgactggatacctccgaacccgttgaatgctcacggtaccaacggagaagaaaagatgtcgatgcagctgacttctaactaccctctctccacttgatttgtccgcaaagaaaacagacctgccgttctacggacctacctacttcttacaatacacgccgatatgaggaggaaaaacgaaacgaaagatgcgggagcccctggttgttacgtgtccacgagagacatgtcagaggatggttgcatttggagcaatttatcttgtggtcacgaaacgaaagttctaatgatttgcccagatttgattagaggggtgatgtgtgatgacaggtggcggcgtgtctttgcccggatcatctatggacgtgcttctcgcatgtttagcatagacgtcgctgttaggaagtgctcaataaaaaggatgttcattatttcatgaaaagttccatgtgagtgtacatcgaatgcttgacggtgcgactatataagtacttaagtacgtaagacaacggttctacgaagagggtataattcagtgtggcgggcttaaaaattaccggctcttctctccccgtgatgatgctaatactatgcctattgcttgaaaacctaaaccatcctacttcttaaaaacttgtgctcctaagcgctcaatctcatgaccttctggcgtggtcttcccggcggcttcgagaagacgcatccatgactcggcatctcgtaatttgacggcttcctcggcggcttttacgcgcataccgcatttctcgtacatggcgattgatgcaccgggttcgaggttcgtgcactttggtatgaaagttgctgcgagacgggcgtttcctgcttggagaacttggttgaagaatggctgtggttttttgttagatgatacgggatagacgcagaatagagctcgatggtgggcttacctcccatccg

SEQ ID NO: 7236 - DNA, 2337 bp, Muscodor strobelii
  misc_feature: SGI cDNA ID NO. 562170
  misc_feature: Encodes the peptide sequence at SEQ ID NO 7237
atggaggctccgagaccgactgctgggtgggaggcggttggtgactctttttatcgcaagactcagctgtacaccgcagtcttcgaccaggacttggacctggataattacatcgttgctggagccccgtatggcggtgctgtagcaatcacccgagatgatactaaagttgcagcctatcgggctggtcagtctacaaagcctagcatagacatctacagctgcgcaggcaaacttctgaaaagtatcgcatgggataaaggcgctatcaaggggcttggctggtccgaggacgagaagctgctcgttgtcagttacgatggcactatccgctgctactacaatctccaaggagatttcaatcagttctcgctcggccgcgaagccgaggacttcggcgtacattcgtgttgcttctatgatcatggaatggtcgctcttctcactaataacaccttggtgaatgtgtcatcttatgatgagccgcgccccaaggtcttgaccacacctccggagggcgaggtcaattcttgggcaattgtaccacctagctttacactgtctcgatccgttgagattagtgtgtcgcctaatggcaaattcgctgctctctatacctcaagtggcaaggcacacgttatcacagcagacttccaagatcgtctgagtgaatacaactccaagtctcacatcaagcccgactatcttgaatggtgtggtaactctgccatcgtcatcgcatgggaggatgaggtcaatgtagttggtccaaggagtgccgcaacgagttttgtctatgagggccgggttcatgtcattgctgaagttgttgaggaggtgttccgtttcggtacagaatcaccagcatcgattcttctcgatgcagtggagcaactcgagaaccaatcaccaaaagcagacgataatatccaactcatccgatcgaatctcgtcgaagcagtcgacacttgtgttgccgcagctgggcatgagttcggtcatcactggcagaagcagttattgaaagcagcttcattcggcaaatctgtcctagatatctacaacagcgatgatttcgttgacatgtgcgagacactaagagtactcaatgcagtacggcattacgaaatcggtctcccattatcgtatgagcagtaccaacgtctcacccccgaaggattaatacagaggctgatcaaccgccacgagtatcttctcgccctccgggttgctggatatcttcgcttgccaacagaccgtatctacgtacactgggcatcagcaaaggtacgaaatggctcgggcgatgatgatacaatctgccgactggtagtacaaaagcttgccggcaagcccggcatctcatttgagaccattgcccgcgcagcatacgatgaaggtcgtggccgactcgcaaccagcctgctcaatcacgaaccacgagcaggtcgtcaagtcccccttctccttagtatggaagaagacgagatcgccctagacaaggcgatcgaaagcggtgactcagacctcatattattcgttcttctccaactcaagaagaagttgcccctggcatcgttcttccgcgtgatcaacgctcggccagccgccacagctctcgtcgagtcctccgccatgctagaaaacgacaatgccctactcaaagatctgtattatcaagatgaccgccgagtcgacggcgccggggtcttcatccgcgaagcgctcgaacaacccgatgctcgtacatctggcgacaaactagcgcttgctgcgaaattactttcagattcgagagagaacagcttcgaacttacggctctgaaagaagcagcagctcttgtgcggatgcaggaaggtctggatcgggatctgacggattctttcaagggcctaagtgttaatgagacgatgtataaactcatccatctcggtttctccaacaaagccaggaaaatccagagcgagttcaaggtcccggagaaagtcgcttggtggattcgtttacgagccctcgtcgcaaaacgagactggaatgaaatcgaagatatcgcaaagaacagaaaaagtcccatcggatgggagccattcttcaaccaagttctccaagcaggaaacgcccgtctcgcagcaactttcataccaaagtgcacgaacctcgaacccggtgcatcaatcgccatgtacgagaaatgcggtatgcgcgtaaaagccgccgaggaagccgtcaaattacgagatgccgagtcatggatgcgtcttctcgaagccgccgggaagaccacgccagaaggtcatgagattgagcgcttaggagcacaagtttttaagaagtag

SEQ ID NO: 7237 - protein, 778 aa, Muscodor strobelii
  misc_feature: SGI Peptide ID NO. 562170
  misc_feature (454)..(774): Pfam Id: PF04840 Pfam Desc: Vps16, C-terminal region
  misc_feature (6)..(361): Pfam Id: PF04841 Pfam Desc: Vps16, N-terminal region
  misc_feature (6)..(162): Pfam Id: PF04841 Pfam Desc: Vps16, N-terminal region
  misc_feature (277)..(361): Pfam Id: PF04841 Pfam Desc: Vps16, N-terminal region
  misc_feature (187)..(276): Pfam Id: PF04841 Pfam Desc: Vps16, N-terminal region
  misc_feature (6)..(778): NCBI GI: 39939968 Blast Desc: MGG_05256 [Magnaporthe grisea 70-15] gi|145010463|gb|EDJ95119.1| MGG_05256 [Magnaporthe grisea 70-15]
  misc_feature (1)..(778): NCBI GI: 116207596 Blast Desc: CHGG_03091 [Chaetomium globosum CBS 148.51] gi|88183688|gb|EAQ91156.1| CHGG_03091 [Chaetomium globosum CBS 148.51]
  misc_feature (1)..(776): NCBI GI: 171686116 Blast Desc: protein product [Podospora anserina] gi|170943019|emb|CAP68672.1| protein product [Podospora anserina]
  misc_feature (49)..(778): NCBI GI: 164425202 Blast Desc: NCU06268 [Neurospora crassa OR74A] gi|157070831|gb|EAA33636.2| NCU06268 [Neurospora crassa OR74A]
  misc_feature (49)..(778): NCBI GI: 256725778 Blast Desc: [Nectria haematococca mpVI 77-13-4]
  misc_feature (48)..(778): NCBI GI: 46111367 Blast Desc: FG02565.1 [Gibberella zeae PH-1]
  misc_feature (6)..(774): NCBI GI: 156065019 Blast Desc: SS1G_00520 [Sclerotinia sclerotiorum 1980] gi|154691379|gb|EDN91117.1| SS1G_00520 [Sclerotinia sclerotiorum 1980]
  misc_feature (6)..(773): NCBI GI: 154320049 Blast Desc: BC1G_02005 [Botryotinia fuckeliana B05.10] gi|150854744|gb|EDN29936.1| BC1G_02005 [Botryotinia fuckeliana B05.10]
  misc_feature (1)..(775): NCBI GI: 261189741 Blast Desc: vacuolar protein sorting vps16 [Ajellomyces dermatitidis SLH14081] gi|239591517|gb|EEQ74098.1| vacuolar protein sorting vps16 [Ajellomyces dermatitidis SLH14081] protein
  misc_feature (1)..(778): NCBI GI: 225561656 Blast Desc: vacuolar sorting-associated protein [Ajellomyces capsulatus G186AR]
MEAPRPTAGWEAVGDSFYRKTQLYTAVFDQDLDLDNYIVAGAPYGGAVAITRDDTKVAAYRAGQSTKPSIDIYSCAGKLLKSIAWDKGAIKGLGWSEDEKLLVVSYDGTIRCYYNLQGDFNQFSLGREAEDFGVHSCCFYDHGMVALLTNNTLVNVSSYDEPRPKVLTTPPEGEVNSWAIVPPSFTLSRSVEISVSPNGKFAALYTSSGKAHVITADFQDRLSEYNSKSHIKPDYLEWCGNSAIVIAWEDEVNVVGPRSAATSFVYEGRVHVIAEVVEEVFRFGTESPASILLDAVEQLENQSPKADDNIQLIRSNLVEAVDTCVAAAGHEFGHHWQKQLLKAASFGKSVLDIYNSDDFVDMCETLRVLNAVRHYEIGLPLSYEQYQRLTPEGLIQRLINRHEYLLALRVAGYLRLPTDRIYVHWASAKVRNGSGDDDTICRLVVQKLAGKPGISFETIARAAYDEGRGRLATSLLNHEPRAGRQVPLLLSMEEDEIALDKAIESGDSDLILFVLLQLKKKLPLASFFRVINARPAATALVESSAMLENDNALLKDLYYQDDRRVDGAGVFIREALEQPDARTSGDKLALAAKLLSDSRENSFELTALKEAAALVRMQEGLDRDLTDSFKGLSVNETMYKLIHLGFSNKARKIQSEFKVPEKVAWWIRLRALVAKRDWNEIEDIAKNRKSPIGWEPFFNQVLQAGNARLAATFIPKCTNLEPGASIAMYEKCGMRVKAAEEAVKLRDAESWMRLLEAAGKTTPEGHEIERLGAQVFKK

SEQ ID NO: 7238 - DNA, 5130 bp, Muscodor strobelii
  misc_feature: SGI EST ID NO. CUFF.18417.1
  misc_feature: Variant of the nucleotide sequence at SEQ ID NO 7236
cttcaagccaatacattgaaggtggccgcaacagcttcaggatgagaaggtaaagcaacaatggaggctccgagaccgactgctgggtgggaggcggttggtgactctttttatcgcaagactcagctgtacaccgcagtcttcgaccaggacttggacctggataattacatcgttgctggagccccgtatggcggtgctgtagcaatcacccgagatgatactaaagttgcagcctatcgggctggtcagtctacaaagcctagcatagacatctacagctgcgcaggcaaacttctgaaaagtatcgcatgggataaaggcgctatcaaggggcttggctggtccgaggacgagaagctgctcgttgtcagttacgatggcactatccgctgctactacaatctccaaggagatttcaatcagttctcgctcggccgcgaagccgaggacttcggcgtacattcgtgttgcttctatgatcatggaatggtcgctcttctcactaataacaccttggtgaatgtgtcatcttatgatgagccgcgccccaaggtcttgaccacacctccggagggcgaggtcaattcttgggcaattgtaccacctagctttacactgtctcgatccgttgaggttttttgagcatcggcaagacgatatatgtcgtggatgctactgattgcgaagaccgattcctcgacattggacctttcactcagattagtgtgtcgcctaatggcaaattcgctgctctctatacctcaagtggcaaggcacacgttatcacagcagacttccaagatcgtctgagtgaatacaactccaagtctcacatcaagcccgactatcttgaatggtgtggtaactctgccatcgtcatcgcatgggaggatgaggtcaatgtagttggtccaaggagtgccgcaacgagttttgtctatgagggccgggttcatgtcattgctgatcatgatggtgtgcgattattaagtaatgatgtctgcgacttcgtccaaaaagtaccagaagttgttgaggaggtgttccgtttcggtacagaatcaccagcatcgattcttctcgatgcagtggagcaactcgagaaccaatcaccaaaagcagacgataatatccaactcatccgatcgaatctcgtcgaagcagtcgacacttgtgttgccgcagctgggcatgagttcggtcatcactggcagaagcagttattgaaagcagcttcattcggcaaatctgtcctagatatctacaacagcgatgatttcgttgacatgtgcgagacactaagagtactcaatgcagtacggcattacgaaatcggtctcccattatcgtatgagcagtaccaacgtctcacccccgaaggattaatacagaggctgatcaaccgccacgagtatcttctcgccctccgggttgctggatatcttcgcttgccaacagaccgtatctacgtacactgggcatcagcaaaggtacgaaatggctcgggcgatgatgatacaatctgccgactggtagtacaaaagcttgccggcaagcccggcatctcatttgagaccattgcccgcgcagcatacgatgaaggtcgtggccgactcgcaaccagcctgctcaatcacgaaccacgagcaggtcgtcaagtcccccttctccttagtatggaagaagacgagatcgccctagacaaggcgatcgaaagcggtgactcagacctcatattattcgttcttctccaactcaagaagaagttgcccctggcatcgttcttccgcgtgatcaacgctcggccagccgccacagctctcgtcgagtcctccgccatgctagaaaacgacaatgccctactcaaagatctgtattatcaagatgaccgccgagtcgacggcgccggggtcttcatccgcgaagcgctcgaacaacccgatgctcgtacatctggcgacaaactagcgcttgctgcgaaattactttcagattcgagagagaacagcttcgaacttacggctctgaaagaagcagcagctcttgtgcggatgcaggaaggtctggatcgggatctgacggattctttcaagggcctaagtgttaatgagacgatgtataaactcatccatctcggtttctccaacaaagccaggaaaatccagagcgagttcaaggtcccggagaaagtcgcttggtggattcgtttacgagccctcgtcgcaaaacgagactggaatgaaatcgaagatatcgcaaagaacagaaaaagtcccatcggatgggagccattcttcaaccaagttctccaagcaggaaacgcccgtctcgcagcaactttcataccaaagtgcacgaacctcgaacccggtgcatcaatcgccatgtacgagaaatgcggtatgcgcgtaaaagccgccgaggaagccgtcaaattacgagatgccgagtcatggatgcgtcttctcgaagccgccgggaagaccacgccagaaggtcatgagattgagcgcttaggagcacaagtttttaagaagtaggatggtttaggttttcaagcaataggcatagtattagcatcatcacggggagagaagagccggtaatttttaagcccgccacactgaattataccctcttcgtagaaccgttgtcttacgtacttaagtacttatatagtcgcaccgtcaagcattcgatgtacactcacatggaacttttcatgaaataatgaacatcctttttattgagcacttcctaacagcgacgtctatgctaaacatgcgagaagcacgtccatagatgatccgggcaaagacacgccgccacctgtcatcacacatcacccctctaatcaaatctgggcaaatcattagaactttcgtttcgtgaccacaagataaattgctccaaatgcaaccatcctctgacatgtctctcgtggacacgtaacaaccaggggctcccgcatctttcgtttcgtttttcctcctcatatcggcgtgtattgtaagaagtaggtaggtccgtagaacggcaggtctgttttctttgcggacaaatcaagtggagagagggtagttagaagtcagctgcatcgacatcttttcttctccgttggtaccgtgagcattcaacgggttcggaggtatccagtcacagccgtggtctagtagaaggaaagaaaatgcgtatcgcccctagcaagtatcgggaatgaaaacaagtcgtgatgatatcggcgtaatcgagagacgtggcacatattttcccctttgatcaagagcctaagcaatagagaatttggttttgtacaactcatgccaaaagcgcctggacgcggtactaacggcgtcgtcccttagtggagacagtggtccagccatctgggtcctgtggaggggcagcttctccttcagtggcagcagtagggctagtaggggcgggctgctgcgaaggagcagctggagcgttgccgttggatctagcacctcggccaccctcataagcaccgcctcgggggccacggggagcaccaccacgtcctcgagcatcgccgcggccgcgtgcgttgacatagccgccacgtccttgtcgttgctctccagatgctgtcctccagttgccactgtctgttgcgcgggacttggtgttttggacgttgtccttaggtctcgtcgggaccttctcattaggagtgccattctcaatagcctcggttgaagactcgacaggagtctcgggcttagtttcaggggccgcggctgcggcggcgattgcagcagcttcggcttcagcttcggcagcagccttctcttcggcctcctttgccgctgcttctttagctagacgacggtcctccttggccttttcgtccgcttccttcttttcttttagcacctgctcacgcttgtcggcaatctcacgctctttagctgccgtatcaataggacgggcagcgccgaacgggcttgctttcgagtcgccactagctgatagcgcaggcgatgcaacatcgggagcctcggagacagttctcttggcgagcgccaagcgtgggcgtccaccgggtgcagggacagcggctgcaggagcaggcgaaggcggtgcttcgctgccttcacgagactgctctgaagacttgactggtgcgtcaggacgcatgttggtgcgccattggttgtcaagctcggcagctgtgggcgttctctcggggcgttccggacgctctctgaactctctgggagggccgcgggagccttctggccttccttcgccccaagtggcaggtgaaaccttgcggtctttctggaaagaatcggtacgggggttgtttcgagggcgactaccgtcgcgcgacatggagcgctctggctgaatgggagaaaggggacccttgcgttcccagttgccaaaatctcggactttcccatcatcgggtggggcgtcccggaagctgggctgacgacgttctccgaagtcgttaggacgtcgatcgttgccgcgaggagcatcggccaaaggacccttgcgctcccagctgatggcctctcgagccatgcctccatcgccgcggtccttggctatatagactatcagcaagagtagtttacttggtagattcgcaggagaacatacgaggatcggcaattcgcactttgatggtgcgtccctggaagcttgatccatcgagttcgagtgccatcttgagtccatcaagggtagcgaactcggcgtaggcgaatcccttaggccgttgctcgatgcggtcttcgatgatgcggacgctggtgatctcgcactcggcaaagaagtcggtgacggcctcgctggtggcttcataggaaagatttccgagatgggcggtatagggcggcttggtgggtagctgagtagggaaagagtcacgaacggggtagcctaggtagtcatgaatatcagagtccagtgccggtgtatgcaacaacagtgcgatgggatgggagtgagtgactacgtactgcgctcgccgcggtcactgctgccgccgtagggctggtagcttcggcgctcgacggtggggggcggcagaggctgggagcctgggggtctgtcagtcggccgattccgtgggatatgggatattgg

SEQ ID NO: 7239 - DNA, 1077 bp, Muscodor strobelii
  misc_feature: SGI cDNA ID NO. 562171
  misc_feature: Encodes the peptide sequence at SEQ ID NO 7240
atggtgcagtctacaggcatgtggacactgccaagtcagaatggcctcgagtccttgcactatgaagcaaacggaccaattcgatcggaacaagatctcaacccggacgaagtcctagttgaaatctgtgcagcgtcgctcaactatcgcgacgttcttgtctcgcaaggaggcgccggtagcccgatacgtcacattacgccgccttcttttatcccgggatctgatggttctggtcgaatcttagctatcggatccgcagtagcgtcaacgcgaccagatttgagaccgggggtcgaagtaattacacacatggtcccacgcgtcctggacgatgagctgccaggattcgatttaatcactactggtttaggtggtaaaactaatggcacactatgcaggagaggcatcttccataatggagctctcgtgcccaagcccaagacattgagccacgcccaagcagctactttgacatgttccggcttgacggcatggaatgctttgatgggatacgagggtcataaggttaagaagggcgattgggttctcgttcagggcactggtggagttagtattgccgcattgcagatcgctctcgcagccggagcaaacgtaatagcaacaacaagtagttccgctaaagcctctcgtctacactccctcggcgcaacgcacgtactcaactaccgcgagagcccttcctggggttcctcagccaaggccttgacaccatcgtcccgtggcgtcgaccacgtcatcgatgtaggaggcccaacgacacttccggaggctatgcaagccgtccgcatagacggactcattacggtctccgggctggtcggcgggctcgacagtaccgtcgacatgatgggtgcattgtggaatatctgtgctttgcgaggtattctactaggtacacggaatatgttaagagacatggtggctttcatagacgaacataaaattccgatcgctgttgatgacgttgagtttagtcttgaggatgcaaagggtgcttatgcaaggctgaaggaacagaaacatttctcgaaggttgttattaagatggagtaa

SEQ ID NO: 7240 - protein, 358 aa, Muscodor strobelii
  misc_feature: SGI Peptide ID NO. 562171
  misc_feature (35)..(146): Pfam Id: PF08240 Pfam Desc: Alcohol dehydrogenase GroES-like domain
  misc_feature (179)..(320): Pfam Id: PF00107 Pfam Desc: Zinc-binding dehydrogenase
  misc_feature (35)..(88): Pfam Id: PF08240 Pfam Desc: Alcohol dehydrogenase GroES-like domain
  misc_feature (8)..(358): NCBI GI: 256721548 Blast Desc: NECHADRAFT_92328 [Nectria haematococca mpVI 77-13-4]
  misc_feature (8)..(358): NCBI GI: 212538821 Blast Desc: zinc-containing alcohol dehydrogenase, [Penicillium marneffei ATCC 18224] gi|210069308|gb|EEA23399.1| zinc-containing alcohol dehydrogenase, [Penicillium marneffei ATCC 18224]
  misc_feature (81)..(358): NCBI GI: 171693161 Blast Desc: protein product [Podospora anserina] gi|170946529|emb|CAP73330.1| protein product [Podospora anserina]
  misc_feature (3)..(358): NCBI GI: 154317441 Blast Desc: BC1G_03072 [Botryotinia fuckeliana B05.10] gi|150844246|gb|EDN19439.1| BC1G_03072 [Botryotinia fuckeliana B05.10]
  misc_feature (4)..(357): NCBI GI: 189206043 Blast Desc: alcohol dehydrogenase [Pyrenophora tritici-repentis Pt-1C-BFP] gi|187975449|gb|EDU42075.1| alcohol dehydrogenase [Pyrenophora tritici-repentis Pt-1C-BFP]
  misc_feature (8)..(358): NCBI GI: 67540538 Blast Desc: AN6439.2 [Aspergillus nidulans FGSC A4] gi|40739271|gb|EAA58461.1| AN6439.2 [Aspergillus nidulans FGSC A4] gi|259479334|tpe|CBF69470.1| TPA: conserved [Aspergillus FGSC
  misc_feature (8)..(358): NCBI GI: 242820275 Blast Desc: alcohol dehydrogenase, [Talaromyces stipitatus ATCC 10500] gi|218713946|gb|EED13370.1| alcohol dehydrogenase, [Talaromyces stipitatus ATCC 10500]
  misc_feature (4)..(357): NCBI GI: 169610812 Blast Desc: SNOG_08513 [Phaeosphaeria nodorum SN15] gi|111062561|gb|EAT83681.1| SNOG_08513 [Phaeosphaeria nodorum SN15]
  misc_feature (66)..(358): NCBI GI: 67904758 Blast Desc: AN9366.2 [Aspergillus nidulans FGSC A4] gi|40747277|gb|EAA66433.1| AN9366.2 [Aspergillus nidulans FGSC A4] gi|259488208|tpe|CBF87482.1| TPA: conserved [Aspergillus FGSC
  misc_feature (4)..(358): NCBI GI: 156049283 Blast Desc: SS1G_08348 [Sclerotinia sclerotiorum 1980] gi|154692747|gb|EDN92485.1| SS1G_08348 [Sclerotinia sclerotiorum 1980]
  misc_feature (33)..(358): SWISSPROT Homolog: EC 1.1.1.1 Alcohol dehydrogenase
MVQSTGMWTLPSQNGLESLHYEANGPIRSEQDLNPDEVLVEICAASLNYRDVLVSQGGAGSPIRHITPPSFIPGSDGSGRILAIGSAVASTRPDLRPGVEVITHMVPRVLDDELPGFDLITTGLGGKTNGTLCRRGIFHNGALVPKPKTLSHAQAATLTCSGLTAWNALMGYEGHKVKKGDWVLVQGTGGVSIAALQIALAAGANVIATTSSSAKASRLHSLGATHVLNYRESPSWGSSAKALTPSSRGVDHVIDVGGPTTLPEAMQAVRIDGLITVSGLVGGLDSTVDMMGALWNICALRGILLGTRNMLRDMVAFIDEHKIPIAVDDVEFSLEDAKGAYARLKEQKHFSKVVIKME

SEQ ID NO: 7241 - DNA, 2884 bp, Muscodor strobelii
  misc_feature: SGI EST ID NO. CUFF.17955.0
  misc_feature: Variant of the nucleotide sequence at SEQ ID NO 7239
aggagaggcatcttccataatggagctctcgtgcccaagcccaagacattgagccacgcccaagcagctactttgacatgttccggcttgacggcatggaatgctttgatgggatacgagggtcataaggttaagaagggcgattgggttctcgttcagggcactggtggagttagtattgccgcattgcagatcgctctcgcagccggagcaaacgtaatagcaacaacaagtagttccgctaaagcctctcgtctacactccctcggcgcaacgcacgtactcaactaccgcgagagcccttcctggggttcctcagccaaggccttgacaccatcgtcccgtggcgtcgaccacgtcatcgatgtaggaggcccaacgacacttccggaggctatgcaagccgtccgcatagacggactcattacggtctccgggctggtcggcgggctcgacagtaccgtcgacatgatgggtgcattgtggaatatctgtgctttgcgaggtattctactaggtacacggaatatgttaagagacatggtggctttcatagacgaacataaaattccgatcgctgttgatgacgttgagtttagtcttgaggatgcaaagggtgcttatgcaaggctgaaggaacagaaacatttctcgaaggttgttattaagatggagtaagaagctcgtcgtcttgagttacggaatttttctttaatcttatccagatgtcccatgttatcacatctgtgaagcgcagtccatgctattcccagtctgcctatctaaaccacattttgaggtgagcatcaacaagacattttgagtgatattgtaacagtggatctcggatggctcaatgtagagcatggtaccgagagtttgcattgattctgctttatgatgttattggctctaagagcgccggggactagtcgacggcatctataaatgcggcaaatcctaatgccctatttctccgatatccatttctggtgcagagagactgaagctccgatctcgttcagctaacatgctctggaatgagggggtcgcctcattcacacggtctcgttggactgcgggcagacgtaaatggtttgcggttgcagggaaagtattgcgtcctctgcaggtatcccagatcatctcgcgtcatagcacaatagttgtgtcttttccaagtacacaacaagtttctagcagagcgatcatcctagttgtgtagcactgttgctactcacacaaggtcgactaatcattgaccaggacaagcaggaaggataaagtggccggaatggccgttccagatcaggtccaggaagggcgtggaatatagacgatttcgcgcgtggaaagtcgtaaggtgactggctgctgaaagcctgcttcatcccttatgttttcatcctttatacttgcttccatatctcttctgcatcatcttcttgtaatggcctttcttgccgctcgtctttgcagcttggatttcaccatacttgctcttgaacttcttgttcatatcctcggtatcaagaacgtcctctagaagtgtccgttttctttctttctttgtcatacgggagttgaagtagtcggttggtcctggaatgaaggtgcccacttgggagaactcaggcacccctcggctgttgtcctttttgtagaaccgcttcgggtccaatacgtctcgcctaaggacaagattagtaaatgatttgtggacgaattcgagtgttcaccgcacattttaagaagctgcaggtccttgcgaagctccggcgtgagatcagttttcggaagattgaaccactttggtccagcgtcgaccttggcattctgtaccttgttagtgttcaatcaagtacgaggtgatgatcgacattgaggtataaatcttctgtcagagtaactatgaatatgaatggatcattctggcgcaagaacattacccataacgggaatgtggcccgcatcacttaaaattgggataaaatttcatcctgaagatgcatggagagatatatatatatatatggggaaggaatccgtgagatgagcagcaacgtaccatctcctgttttgatttccgcataacagggactcggactgatagatcatttccatctgtgtttgaagaggacgcaggcttcaattcctttgccttttggtgggggacgacagcgttcggcgcatttcttgtcaccgtagaggtcgtgatcttctgctcgccctgctttgcttgaagtcttttctcggcaccactgagaagctcgtctatctgagcttcagatagactgagtgtatcggctgccatgatggcgtgctggcaggaaggtggcgtgaaccaacctaaggttgtgatgattgtaaaataattgaagtagaggagtatgggtgagagcagaattcctagtaaattctgtaagggtttttttgaatggagctgtcgagcgttaagccccaccttggctaaggtaggcacctgaggacatgccacctgcagatccgcagagtcgggacctctcggatgaatatgtggctgagctaccgtagtcttcagccacaactaacacttgctcggacaggacttccggccaaggcacccaggcaccttacctcccactatttcaacagggcgagcggcaggcgtggccccggaaaacctgcctggacgccgattgccctgcctgctggatgcggactcccaaagacattggaaatgagggctatgtcattctcgtggctgtctttatcaatgagttgtcgactgcgtcatggtctgtcgcgacccaattacctcgtttcgctttcctagacctgcaaggctggctgcatctcatcatagtattggtagaaaagttgaaatgcaggcgatgcatcggtc

SEQ ID NO: 7242 - DNA, 627 bp, Muscodor strobelii
  misc_feature: SGI cDNA ID NO. 562172
  misc_feature: Encodes the peptide sequence at SEQ ID NO 7243
atggcagccgatacactcagtctatctgaagctcagatagacgagcttctcagtggtgccgagaaaagacttcaagcaaagcagggcgagcagaagatcacgacctctacggtgacaagaaatgcgccgaacgctgtcgtcccccaccaaaaggcaaaggaattgaagcctgcgtcctcttcaaacacagatggaaatgatctatcagtccgagtccctgttatgcggaaatcaaaacaggagatgaatgccaaggtcgacgctggaccaaagtggttcaatcttccgaaaactgatctcacgccggagcttcgcaaggacctgcagcttcttaaaatgcgagacgtattggacccgaagcggttctacaaaaaggacaacagccgaggggtgcctgagttctcccaagtgggcaccttcattccaggaccaaccgactacttcaactcccgtatgacaaagaaagaaagaaaacggacacttctagaggacgttcttgataccgaggatatgaacaagaagttcaagagcaagtatggtgaaatccaagctgcaaagacgagcggcaagaaaggccattacaagaagatgatgcagaagagatatggaagcaagtataaaggatga

SEQ ID NO: 7243 - protein, 208 aa, Muscodor strobelii
  misc_feature: SGI Peptide ID NO. 562172
  misc_feature (82)..(178): Pfam Id: PF08698 Pfam Desc: Fcf2 pre-rRNA processing
  misc_feature (8)..(197): NCBI GI: 156064355 Blast Desc: SS1G_00185 [Sclerotinia sclerotiorum 1980] gi|154691047|gb|EDN90785.1| SS1G_00185 [Sclerotinia sclerotiorum 1980]
  misc_feature (1)..(202): NCBI GI: 39974761 Blast Desc: MGG_00473 [Magnaporthe grisea 70-15] gi|145018632|gb|EDK02911.1| MGG_00473 [Magnaporthe grisea 70-15]
  misc_feature (8)..(197): NCBI GI: 154312146 Blast Desc: BC1G_06106 [Botryotinia fuckeliana B05.10] gi|150850069|gb|EDN25262.1| BC1G_06106 [Botryotinia fuckeliana B05.10]
  misc_feature (8)..(205): NCBI GI: 189190552 Blast Desc: rRNA-processing protein FCF2 [Pyrenophora tritici-repentis Pt-1C-BFP] gi|187973221|gb|EDU40720.1| rRNA-processing protein FCF2 [Pyrenophora tritici-repentis
  misc_feature (85)..(201): NCBI GI: 226283146 Blast Desc: conserved [Paracoccidioides brasiliensis Pb01]
  misc_feature (72)..(201): NCBI GI: 212546167 Blast Desc: nucleolus protein required for cell viability, [Penicillium marneffei ATCC 18224] gi|210064757|gb|EEA18852.1| nucleolus protein required for cell viability, [Penicillium ATCC
  misc_feature (8)..(201): NCBI GI: 169611821 Blast Desc: SNOG_09025 [Phaeosphaeria nodorum SN15] gi|111062097|gb|EAT83217.1| SNOG_09025 [Phaeosphaeria nodorum SN15]
  misc_feature (80)..(206): NCBI GI: 261187668 Blast Desc: rRNA processing protein Fcf2 [Ajellomyces dermatitidis SLH14081] gi|239594144|gb|EEQ76725.1| rRNA processing protein Fcf2 [Ajellomyces dermatitidis SLH14081] rRNA processing protein
  misc_feature (3)..(201): NCBI GI: 171685678 Blast Desc: protein product [Podospora anserina] gi|170942800|emb|CAP68453.1| protein product [Podospora anserina]
  misc_feature (72)..(206): NCBI GI: 225554681 Blast Desc: rRNA-processing protein FCF2 [Ajellomyces capsulatus G186AR]
MAADTLSLSEAQIDELLSGAEKRLQAKQGEQKITTSTVTRNAPNAVVPHQKAKELKPASSSNTDGNDLSVRVPVMRKSKQEMNAKVDAGPKWFNLPKTDLTPELRKDLQLLKMRDVLDPKRFYKKDNSRGVPEFSQVGTFIPGPTDYFNSRMTKKERKRTLLEDVLDTEDMNKKFKSKYGEIQAAKTSGKKGHYKKMMQKRYGSKYKG

SEQ ID NO: 7244 - DNA, 2754 bp, Muscodor strobelii
  misc_feature: SGI EST ID NO. CUFF.17956.1
  misc_feature: Variant of the nucleotide sequence at SEQ ID NO 7242
gaccgatgcatcgcctgcatttcaacttttctaccaatactatgatgagatgcagccagccttgcaggtctaggaaagcgaaacgaggtaattgggtcgcgacagaccatgacgcagtcgacaactcattgataaagacagccacgagaatgacatagccctcatttccaatgtctttgggagtccgcatccagcaggcagggcaatcggcgtccaggcaggttttccggggccacgcctgccgctcgccctgttgaaatagtgggaggtaaggtgcctgggtgccttggccggaagtcctgtccgagcaagtgttagttgtggctgaagactacggtagctcagccacatattcatccgagaggtcccgactctgcggatctgcaggtggcatgtcctcaggtgcctaccttagccaaggtggggcttaacgctcgacagctccattcaaaaaaacccttacagaatttactaggaattctgctctcacccatactcctctacttcaattattttacaatcatcacaaccttaggttggttcacgccaccttcctgccagcacgccatcatggcagccgatacactcagtctatctgaagctcagatagacgagcttctcagtggtgccgagaaaagacttcaagcaaagcagggcgagcagaagatcacgacctctacggtgacaagaaatgcgccgaacgctgtcgtcccccaccaaaaggcaaaggaattgaagcctgcgtcctcttcaaacacagatggaaatgatctatcagtccgagtccctgttatgcggaaatcaaaacaggagatgaatgccaaggtcgacgctggaccaaagtggttcaatcttccgaaaactgatctcacgccggagcttcgcaaggacctgcagcttcttaaaatgcgagacgtattggacccgaagcggttctacaaaaaggacaacagccgaggggtgcctgagttctcccaagtgggcaccttcattccaggaccaaccgactacttcaactcccgtatgacaaagaaagaaagaaaacggacacttctagaggacgttcttgataccgaggatatgaacaagaagttcaagagcaagtatggtgaaatccaagctgcaaagacgagcggcaagaaaggccattacaagaagatgatgcagaagagatatggaagcaagtataaaggatgaaaacataagggatgaagcaggctttcagcagccagtcaccttacgactttccacgcgcgaaatcgtctatattccacgcccttcctggacctgatctggaacggccattccggccactttatccttcctgcttgtcctggtcaatgattagtcgaccttgtgtgagtagcaacagtgctacacaactaggatgatcgctctgctagaaacttgttgtgtacttggaaaagacacaactattgtgctatgacgcgagatgatctgggatacctgcagaggacgcaatactttccctgcaaccgcaaaccatttacgtctgcccgcagtccaacgagaccgtgtgaatgaggcgaccccctcattccagagcatgttagctgaacgagatcggagcttcagtctctctgcaccagaaatggatatcggagaaatagggcattaggatttgccgcatttatagatgccgtcgactagtccccggcgctcttagagccaataacatcataaagcagaatcaatgcaaactctcggtaccatgctctacattgagccatccgagatccactgttacaatatcactcaaaatgtcttgttgatgctcacctcaaaatgtggtttagataggcagactgggaatagcatggactgcgcttcacagatgtgataacatgggacatctggataagattaaagaaaaattccgtaactcaagacgacgagcttcttactccatcttaataacaaccttcgagaaatgtttctgttccttcagccttgcataagcaccctttgcatcctcaagactaaactcaacgtcatcaacagcgatcggaattttatgttcgtctatgaaagccaccatgtctcttaacatattccgtgtacctagtagaatacctcgcaaagcacagatattccacaatgcacccatcatgtcgacggtactgtcgagcccgccgaccagcccggagaccgtaatgagtccgtctatgcggacggcttgcatagcctccggaagtgtcgttgggcctcctacatcgatgacgtggtcgacgccacgggacgatggtgtcaaggccttggctgaggaaccccaggaagggctctcgcggtagttgagtacgtgcgttgcgccgagggagtgtagacgagaggctttagcggaactacttgttgttgctattacgtttgctccggctgcgagagcgatctgacgaggttgtcagtggatcttagcaagcaaacacaactgagcttctctttcaatccacgtttctaccgtctagattgcgatgttgtctgtgagagaaagcatgcaagcaaaaccacgctcaaacttgaaagaaggattgaaattcaccgtacctgcaatgcggcaatactaactccaccagtgccctgaacgagaacccaatcgcccttcttaaccttatgaccctcgtatcccatcaaagcattccatgccgtcaagccggaacatgtcaaagtagctgcttgggcgtggctcaatgtcttgggcttgggcacgagagctccattatggaagatgcctctcct

SEQ ID NO: 7245 - DNA, 813 bp, Muscodor strobelii
  misc_feature: SGI cDNA ID NO. 562173
  misc_feature: Encodes the peptide sequence at SEQ ID NO 7246
atggaccagtcttcttcctcgcgggcagcaggtggtgctgcaggaacgggtgccgctggcagctccgtcgagtacgatacacgccatggaggtcattacggtgccagtgctgcacttgccaactccggcttcgcacctgcagagctctacacaggtccctgggccaacgtccaccaaggtttacatggacagtataaagacatcctcaccacctactggcaacagactatcaaccaccttgagaacgaagcccatgattacaaactacatcaacttcccttggctcgtattaaaaaagtcatgaaggccgacccggaagtgaagatgatctcggccgaagccccgattctgtttgccaagggttgcgacatattcatcaccgagctcactatgcgcgcctggatccacgctgaggagaacaagagacgcactctgcagagatctgacattgcatccgccctcgctaagagcgacatgttcgacttcttgatcgacattgtaccgcgtgaagaggcaacgcacgcgaagcgacccaatccggccgctcaggcacagccaacgcagggcgtaccggccggcgccgcgggcaacgctatgagtggccagcacggcatgcccggcgcagcgaaccacatggcgccagactacatgggcgcacacgctatctcaccagaccaagagtatcgacccccgcccatgtatagccaggtacaacccagcgcgcaggcagcctacggccaacagccaccccaggccatgtatggtgagatggaaggtatgtacgggtatccaggaatgccacagcagcagtag

SEQ ID NO: 7246 - protein, 270 aa, Muscodor strobelii
  misc_feature: SGI Peptide ID NO. 562173
  misc_feature (90)..(154): Pfam Id: PF00808 Pfam Desc: Histone-like transcription factor (CBF/NF-Y) and archaeal histone
  misc_feature (84)..(157): Pfam Id: PF00125 Pfam Desc: Core histone H2A/H2B/H3/H4
  misc_feature (25)..(270): NCBI GI: 261358414 Blast Desc: nuclear transcription factor Y subunit C-4 [Verticillium albo-atrum VaMs.102]
  misc_feature (25)..(270): NCBI GI: 14577940 Blast Desc: CCAAT-binding protein subunit HAP5 [Hypocrea jecorina]
  misc_feature (25)..(270): NCBI GI: 46111453 Blast Desc: FG02608.1 [Gibberella zeae PH-1]
  misc_feature (25)..(270): NCBI GI: 256725824 Blast Desc: [Nectria haematococca mpVI 77-13-4]
  misc_feature (25)..(270): NCBI GI: 164428854 Blast Desc: NCU00116 [Neurospora crassa OR74A] gi|157072309|gb|EAA28004.2| NCU00116 [Neurospora crassa OR74A]
  misc_feature (25)..(270): NCBI GI: 2583171 Blast Desc: CCAAT-binding transcription factor subunit AAB-1 [Neurospora crassa]
  misc_feature (25)..(270): NCBI GI: 238493956 Blast Desc: CCAAT-binding factor complex subunit HapE [Aspergillus flavus NRRL3357] gi|3059251|dbj|BAA25636.1| HAPE [Aspergillus oryzae] gi|220694864|gb|EED51207.1| CCAAT-binding factor complex
  misc_feature (25)..(270): NCBI GI: 32967225 Blast Desc: HapE [Aspergillus niger]
  misc_feature (12)..(270): NCBI GI: 255931559 Blast Desc: Pc12g04670 [Penicillium chrysogenum Wisconsin 54-1255] gi|211581955|emb|CAP80094.1| Pc12g04670 [Penicillium chrysogenum Wisconsin 54-1255]
  misc_feature (25)..(270): NCBI GI: 116208152 Blast Desc: CHGG_03369 [Chaetomium globosum CBS 148.51] gi|88183966|gb|EAQ91434.1| CHGG_03369 [Chaetomium globosum CBS 148.51]
MDQSSSSRAAGGAAGTGAAGSSVEYDTRHGGHYGASAALANSGFAPAELYTGPWANVHQGLHGQYKDILTTYWQQTINHLENEAHDYKLHQLPLARIKKVMKADPEVKMISAEAPILFAKGCDIFITELTMRAWIHAEENKRRTLQRSDIASALAKSDMFDFLIDIVPREEATHAKRPNPAAQAQPTQGVPAGAAGNAMSGQHGMPGAANHMAPDYMGAHAISPDQEYRPPPMYSQVQPSAQAAYGQQPPQAMYGEMEGMYGYPGMPQQQ

SEQ ID NO: 7247 - DNA, 2830 bp, Muscodor strobelii
  misc_feature: SGI EST ID NO. CUFF.18047.0
  misc_feature: Variant of the nucleotide sequence at SEQ ID NO 7245
ctgaaactgtaattttctttgattttccaaatcctgcgcgtgagactcgttttacctctcatttacagcaattgtataacttaatttgaaaagctacagcggcagggaatccaaaagccgtgtgcaaccgttcagccgcaacgactagcaactcacagcagaatagaaacgccagaattactcagctcgccatcgctaaataagatagcagaaacaacaaagtgaacagacacagtaacagctcaaagatctagaagtggaggaaagcgcagagaagacggtgtcgcaagccggtgccaagcttattattagtattcgtaccgtagtattgcacggagacttgaccgcttggagttgaactaatcagcccggaaaagctatctcataaacagaggtaaccctaccagtcgaaatcctgtcagggcccatctcccactcccaccaaacggccaccgccaactcgcgaatcaccatcattatcgcacgccccagaaacatcccgccaattgccccctcctcccagccaatcaatctcaccaatccatcctagcaacatctcggtctaaacagagctcatttgttatattgttacatcatttcgttgcccgtcatacgccaaacatcggacaagcatacgccgcgcgctgtgcctctgcaacaacccaagacatcaactgtagaactccagcactggccaagaccttcgtcgggaccaacttcgagaactctaaacacaccatttcatgcaagttctcagtccgcgacactgtctttagtctcgcatatcgatattggcaccctaccgccgcaccacatcgacttgacaacgtccgctcccgtcacaaggtgatacctgtgtgtcgtgtggctgttgtctgttgctcatttgggcagcaaacggattcgacgcgggacgctggacagtgcccgtcgcgaaaaacactcttcactaccagccctcgagtctggactaccctttcaatatccgccctccacgcacgccagccagtgtggaataatcgagtctcttgctgcttagcaagcgatttcggcctgtaacacgcttctgtgtgcgcgcatactcttctacgattacaagacctgtctcgttactcagcctggcgctgatctgacttgagatcgaacacttcgcccaagctcaagcgaagcttcagccacccaagtaaagcatccaatcaattttcgtcgcgtttgtttccttgcctcttctggaaagttggggcataaacacaaagacaacaaccaaagaaacatattcatttagccagcccttcacatacagcaaccatggaccagtcttcttcctcgcgggcagcaggtggtgctgcaggaacgggtgccgctggcagctccgtcgagtacgatacacgccatggaggtcattacggtgccagtgctgcagtaagtaacacccgagtgcccgcctcattgcccctttcgtctccgtgcctagcctcgcaaacacttaattccaccacgggatcaatcgtgttcttcatgctcgcccaatccccgctcactctgtcctgctttccatgagaaactgaccagcattcgtgcattctgtatagcttgccaactccggcttcgcacctgcagagctctacacaggtccctgggccaacgtccaccaaggtttacatggacagtataaagacatcctcaccacctactggcaacagactatcaaccaccttgagaacgaagcccatgattacaaactacatcaacttcccttggctcgtattaaaaaagtcatgaaggccgacccggaagtgaagatgatctcggccgaagccccgattctgtttgccaagggttgcgacatattcatcaccgagctcactatgcgcgcctggatccacgctgaggagaacaagagacgcactctgcagagatctgacattgcatccgccctcgctaagagcgacatgttcgacttcttgatcgacattgtaccgcgtgaagaggcaacgcacgcgaagcgacccaatccggccgctcaggcacagccaacgcagggcgtaccggccggcgccgcgggcaacgctatgagtggccagcacggcatgcccggcgcagcgaaccacatggcgccagactacatgggcgcacacgctatctcaccagaccaagagtatcgacccccgcccatgtatagccaggtacaacccagcgcgcaggcagcctacggccaacagccaccccaggccatgtatggtgagatggaaggtatgtacgggtatccaggaatgccacagcagcagtaggacgcgcagggcacgggggcagcaccgtcatcagtctttcacgacgcaggagcaggagggattgtggatcatcaggtcgaggtgcagggcaccgcagagaaggcggattcgctgaagccagtgtaggacgacctcagcgagtcgaagccgtgaaaatagcagaagaaaatgattcttctggttcgagattgcttcgacagcgacaccggtcgttgtattttacttctctctttccgctaggtttcgaggatcatggcgtacggatgtatctcttaaaccctttctttgcttgagttaggctagattagggccgtagtatatgacatgggatgctggtcccgatagttctgttcgattgcgttttgcgacaataatccgagcgaccttattgggtacacaagacgcatagcaattggcctatgtgaaatcgtatgcacgagttccacttcatttgttcgacccgaatctagatgagagattcgatgaaaagttcgcaaagcgttgcgaagttgcgcccgggcttgagatctgtgtggtga

SEQ ID NO: 7248 - DNA, 2397 bp, Muscodor strobelii
  misc_feature: SGI cDNA ID NO. 562174
  misc_feature: Encodes the peptide sequence at SEQ ID NO 7249
atgcctcggaaaccccaaaactacgacgattacggctcagccgtccagcaaatcatcctctccacgaccgacgccgagttcctcgaccagctgatacccgtcttgaaagatgcgacaagcaccaaccgttcaagcaccctgacccagaatctgtcacagtacgccgatgaccgggaggttgaaatcgaacggataggtctgaccaaacacgaggagttcttgggttccgtcaaccaattgcagaatgtccgggagcgcaccgttgcgctgactgccgacatcctcgagctcaaccactccatccaggcgagcactgagaagctcgccgaacagaagcaagccctcgtcaacactcgtgctgtccgcgaaaacatctcggatgtatcagaagcgctcaaggagtccctgaagatactgcacagcgtcaacaacgcccacgacctgatcaggaagaagatgtactacggtgcactcaaatcgctcgacgacctccagaacgagttcctcatcccaactatccagaacaaatatgctacacagcatcggctggccgatctgatccagaaatccatacccgcatcgcagaagactatctccgaggctgtcatgacggatctcaacacatggctctatcgcataagagaaacatcccaattcctaggagaagtcgccttctaccacacagatatgcggagatcacgccagcaggaacgagtgaaggatgatgattttctggaacactttagcctgaactctgccatcgaacttgtcttcgacgaaagtgaagaattcgacgtgctcgacaatgaagagctccaggtcgacttcactcctcttttcgaagctatgcatattcacgaagctctcggacagagcgataagttccgatccgagtatgccgcgactagaaggcgtcagaaagagttattgctaccgaactctgtagacctcacaagcgacggtgaacagtccctgagcagtctactagagggcatatctggatttgctatcattgaaaaggcaactatgcgacgcgcaccacaactgcgatctgccattgacgtcgaagaactgtgggattctatgtgttcgaccgcaatcacgttgacgtccaaggctcttggagacatccagaacgccgaggttcttgtacagatcaaaggcgcagtagcactcttcattcaaacaatggagggttggggctactcggtgacgagacttgatgattttctagttaccttattcgacaaatacgctgagctactgaaacagagattcagcgaagatttccaagagattgtatctaccgacgattatatgcctatgcccattcagtctagagaagagtacgagaaagtgtccaatgtcagctggtttgctcaggatcggcccattgaggagatgaagttcccatgtgtcctgccgttctcacagatgtatccactgtgttgtatagacattaggaatttcctcaaccagttttacttcttctccaatgactacttccaacacccgaccaagatagacgagacactgcgaaagtctttagatgagctccttacggagaaggtgtgccaatcattagttgagcgactcagctctcaatatccaggccagatcgtgcaaattttgaccaatctggaacattttgagacggcgtgccaggaactagagcaactcttgatccgagcgcgatcatcgggctcggctggtggtcccttgaccctcgcagcaactgaacaattccgagagcataagaaaacagccgagaaacgaatattcgaattggtaaattcaaaaattgacgatctcatggagactgcagagtatgattggatggcgtataacacaccctccgagccaagcagttacatccagaccttgaccacttatctgtcaaatatcatgagtaccacgctactgggtctaccgcgcgagattaaggaactcatctatttcgatgcccttagtcatgccgctagcaaaatccttgcccttcccctctcaccagacgtgaagaagattaatcctaatggggtggcagcactcgccaaggacgtacagcatttgacagactttgtggacgatctcgaaaacggtttcatgctgcgatccaacttggatgagctggagcagacgacccaacttttacaatctgagaatacagacgaattctttgatacagcatcaaggaacaagaaatatggccgtgtcgatgccatgaatggtcctattttattagaaaagtatgtctgcttccttcaaagccttgatgaacagtcacttaccttcgatccgtccagactcaccacacagatctcaagcccgggcgcaacttcgcaacgctttgcgaacttttcatcgaatctctcatctagattcgggtcgaacaaatga

SEQ ID NO: 7249 - protein, 798 aa, Muscodor strobelii
  misc_feature: SGI Peptide ID NO. 562174
  misc_feature (449)..(787): Pfam Id: PF04091 Pfam Desc: Exocyst complex subunit Sec15-like
  misc_feature (449)..(675): Pfam Id: PF04091 Pfam Desc: Exocyst complex subunit Sec15-like
  misc_feature (1)..(750): NCBI GI: 145611328 Blast Desc: MGG_00471 [Magnaporthe grisea 70-15] gi|145018634|gb|EDK02913.1| MGG_00471 [Magnaporthe grisea 70-15]
  misc_feature (17)..(750): NCBI GI: 46111455 Blast Desc: FG02609.1 [Gibberella zeae PH-1]
  misc_feature (1)..(795): NCBI GI: 85084040 Blast Desc: NCU00117 [Neurospora crassa OR74A] gi|28918329|gb|EAA28005.1| NCU00117 [Neurospora crassa OR74A]
  misc_feature (1)..(795): NCBI GI: 171685674 Blast Desc: protein product [Podospora anserina] gi|170942798|emb|CAP68451.1| protein product [Podospora anserina]
  misc_feature (2)..(798): NCBI GI: 154312150 Blast Desc: BC1G_06108 [Botryotinia fuckeliana B05.10] gi|150850071|gb|EDN25264.1| BC1G_06108 [Botryotinia fuckeliana B05.10]
  misc_feature (1)..(798): NCBI GI: 261358413 Blast Desc: rsec15 [Verticillium albo-atrum VaMs.102]
  misc_feature (2)..(753): NCBI GI: 156064349 Blast Desc: SS1G_00182 [Sclerotinia sclerotiorum 1980] gi|154691044|gb|EDN90782.1| SS1G_00182 [Sclerotinia sclerotiorum 1980]
  misc_feature (17)..(795): NCBI GI: 119467864 Blast Desc: exocyst complex component Sec15, [Neosartorya fischeri NRRL 181] gi|119405890|gb|EAW15841.1| exocyst complex component Sec15, [Neosartorya fischeri NRRL 181]
  misc_feature (1)..(795): NCBI GI: 121703510 Blast Desc: exocyst complex component Sec15, [Aspergillus clavatus NRRL 1] gi|119398163|gb|EAW08593.1| exocyst complex component Sec15, [Aspergillus clavatus NRRL 1]
  misc_feature (1)..(748): NCBI GI: 239608879 Blast Desc: exocyst complex component Sec15 [Ajellomyces dermatitidis ER-3]
MPRKPQNYDDYGSAVQQIILSTTDAEFLDQLIPVLKDATSTNRSSTLTQNLSQYADDREVEIERIGLTKHEEFLGSVNQLQNVRERTVALTADILELNHSIQASTEKLAEQKQALVNTRAVRENISDVSEALKESLKILHSVNNAHDLIRKKMYYGALKSLDDLQNEFLIPTIQNKYATQHRLADLIQKSIPASQKTISEAVMTDLNTWLYRIRETSQFLGEVAFYHTDMRRSRQQERVKDDDFLEHFSLNSAIELVFDESEEFDVLDNEELQVDFTPLFEAMHIHEALGQSDKFRSEYAATRRRQKELLLPNSVDLTSDGEQSLSSLLEGISGFAIIEKATMRRAPQLRSAIDVEELWDSMCSTAITLTSKALGDIQNAEVLVQIKGAVALFIQTMEGWGYSVTRLDDFLVTLFDKYAELLKQRFSEDFQEIVSTDDYMPMPIQSREEYEKVSNVSWFAQDRPIEEMKFPCVLPFSQMYPLCCIDIRNFLNQFYFFSNDYFQHPTKIDETLRKSLDELLTEKVCQSLVERLSSQYPGQIVQILTNLEHFETACQELEQLLIRARSSGSAGGPLTLAATEQFREHKKTAEKRIFELVNSKIDDLMETAEYDWMAYNTPSEPSSYIQTLTTYLSNIMSTTLLGLPREIKELIYFDALSHAASKILALPLSPDVKKINPNGVAALAKDVQHLTDFVDDLENGFMLRSNLDELEQTTQLLQSENTDEFFDTASRNKKYGRVDAMNGPILLEKYVCFLQSLDEQSLTFDPSRLTTQISSPGATSQRFANFSSNLSSRFGSNK

SEQ ID NO: 7250 - DNA, 5440 bp, Muscodor strobelii
  misc_feature: SGI EST ID NO. CUFF.18048.2
  misc_feature: Variant of the nucleotide sequence at SEQ ID NO 7248
tcgagcttcaaaaagggttctaattgttgcgcaacctccacaataccaaacccttgaagactttgttatcgcaaccgttactctagatgcaaagggggtgacaccaagcttcacagcgaagaggactagagtttggactttgggagtgcgggagacgggggcgctgctgcggccagtagttcgatcctgagactcgacgactcggttgcatgttgctgttgcatcttcaattgcagcctgctcaagatacaccgagtttacctctgccaccgccttacattcaagatgcctcggaaaccccaaaactacgacgattacggctcagccgtccagcaaatcatcctctccacgaccgacgccgagttcctcgaccagctgatacccgtcttgaaagatgcgacaagcaccaaccgttcaagcaccctgacccagaatctgtcacagtacgccgatgaccgggaggttgaaatcgaacggataggtctgaccaaacacgaggagttcttgggttccgtcaaccaattgcagaatgtccgggagcgcaccgttgcgctgactgccgacatcctcgagctcaaccactccatccaggcgagcactgagaagctcgccgaacagaagcaagccctcgtcaacactcgtgctgtccgcgaaaacatctcggatgtatcagaagcgctcaaggagtccctgaagatactgcacagcgtcaacaacgcccacgacctgatcaggaagaagatgtactacggtgcactcaaatcgctcgacgacctccagaacgagttcctcatcccaactatccagaacaaatatgctacacagcatcggctggccgatctgatccagaaatccatacccgcatcgcagaagactatctccgaggctgtcatgacggatctcaacacatggctctatcgcataagagaaacatcccaattcctaggagaagtcgccttctaccacacagatatgcggagatcacgccagcaggaacgagtgaaggatgatgattttctggaacactttagcctgaactctgccatcgaacttgtcttcgacgaaagtgaagaattcgacgtgctcgacaatgaagagctccaggtcgacttcactcctcttttcgaagctatgcatattcacgaagctctcggacagagcgataagttccgatccgagtatgccgcgactagaaggcgtcagaaagagttattgctaccgaactctgtagacctcacaagcgacggtgaacagtccctgagcagtctactagagggcatatctggatttgctatcattgaaaaggcaactatgcgacgcgcaccacaactgcgatctgccattgacgtcgaagaactgtgggattctatgtgttcgaccgcaatcacgttgacgtccaaggctcttggagacatccagaacgccgaggttcttgtacagatcaaaggcgcagtagcactcttcattcaaacaatggagggttggggctactcggtgacgagacttgatgattttctagttaccttattcgacaaatacgctgagctactgaaacagagattcagcgaagatttccaagagattgtatctaccgacgattatatgcctatgcccattcagtctagagaagagtacgagaaagtgtccaatgtcagctggtttgctcaggatcggcccattgaggagatgaagttcccatgtgtcctgccgttctcacagatgtatccactgtgttgtatagacattaggaatttcctcaaccagttttacttcttctccaatgactacttccaacacccgaccaagatagacgagacactgcgaaagtctttagatgagctccttacggagaaggtgtgccaatcattagttgagcgactcagctctcaatatccaggccagatcgtgcaaattttgaccaatctggaacattttgagacggcgtgccaggaactagagcaactcttgatccgagcgcgatcatcgggctcggctggtggtcccttgaccctcgcagcaactgaacaattccgagagcataagaaaacagccgagaaacgaatattcgaattggtaaattcaaaaattgacgatctcatggagactgcagagtatgattggatggcgtataacacaccctccgagccaagcagttacatccagaccttgaccacttatctgtcaaatatcatgagtaccacgctactgggtctaccgcgcgagattaaggaactcatctatttcgatgcccttagtcatgccgctagcaaaatccttgcccttcccctctcaccagacgtgaagaagattaatcctaatggggtggcagcactcgccaaggacgtacagcatttgacagactttgtggacgatctcgaaaacggtttcatgctgcgatccaacttggatgagctggagcagacgacccaacttttacaatctgagaatacagacgaattctttgatacagcatcaaggaacaagaaatatggccgtgtcgatgccatgaatggtcctattttattagaaaaactcaccacacagatctcaagcccgggcgcaacttcgcaacgctttgcgaacttttcatcgaatctctcatctagattcgggtcgaacaaatgaagtggaactcgtgcatacgatttcacataggccaattgctatgcgtcttgtgtacccaataaggtcgctcggattattgtcgcaaaacgcaatcgaacagaactatcgggaccagcatcccatgtcatatactacggccctaatctagcctaactcaagcaaagaaagggtttaagagatacatccgtacgccatgatcctcgaaacctagcggaaagagagaagtaaaatacaacgaccggtgtcgctgtcgaagcaatctcgaaccagaagaatcattttcttctgctattttcacggcttcgactcgctgaggtcgtcctacactggcttcagcgaatccgccttctctgcggtgccctgcacctcgacctgatgatccacaatccctcctgctcctgcgtcgtgaaagactgatgacggtgctgcccccgtgccctgcgcgtcctactgctgctgtggcattcctggatacccgtacataccttccatctcaccatacatggcctggggtggctgttggccgtaggctgcctgcgcgctgggttgtacctggctatacatgggcgggggtcgatactcttggtctggtgagatagcgtgtgcgcccatgtagtctggcgccatgtggttcgctgcgccgggcatgccgtgctggccactcatagcgttgcccgcggcgccggccggtacgccctgcgttggctgtgcctgagcggccggattgggtcgcttcgcgtgcgttgcctcttcacgcggtacaatgtcgatcaagaagtcgaacatgtcgctcttagcgagggcggatgcaatgtcagatctctgcagagtgcgtctcttgttctcctcagcgtggatccaggcgcgcatagtgagctcggtgatgaatatgtcgcaacccttggcaaacagaatcggggcttcggccgagatcatcttcacttccgggtcggccttcatgacttttttaatacgagccaagggaagttgatgtagtttgtaatcatgggcttcgttctcaaggtggttgatagtctgttgccagtaggtggtgaggatgtctttatactgtccatgtaaaccttggtggacgttggcccagggacctgtgtagagctctgcaggtgcgaagccggagttggcaagctatacagaatgcacgaatgctggtcagtttctcatggaaagcaggacagagtgagcggggattgggcgagcatgaagaacacgattgatcccgtggtggaattaagtgtttgcgaggctaggcacggagacgaaaggggcaatgaggcgggcactcgggtgttacttactgcagcactggcacctagaagcagagatgattagcgacgtcgcacaagacgaaagcaagtcgcaacactaggttgacacatgcacactcaccgtaatgacctccatggcgtgtatcgtactcgacggagctgccagcggcacccgttcctgcagcaccacctgctgcccgcgaggaagaagactggtccatggttgctgtatgtgaagggctggctaaatgaatatgtttctttggttgttgtctttgtgtttatgccccaactttccagaagaggcaaggaaacaaacgcgacgaaaattgattggatgctttacttgggtggctgaagcttcgcttgagcttgggcgaagtgttcgatctcaagtcagatcagcgccaggctgagtaacgagacaggtcttgtaatcgtagaagagtatgcgcgcacacagaagcgtgttacaggccgaaatcgcttgctaagcagcaagagactcgattattccacactggctggcgtgcgtggagggcggatattgaaagggtagtccagactcgagggctggtagtgaagagtgtttttcgcgacgggcactgtccagcgtcccgcgtcgaatccgtttgctgcccaaatgagcaacagacaacagccacacgacacacaggtatcaccttgtgacgggagcggacgttgtcaagtcgatgtggtgcggcggtagggtgccaatatcgatatgcgagactaaagacagtgtcgcggactgagaacttgcatgaaatggtgtgtttagagttctcgaagttggtcccgacgaaggtcttggccagtgctggagttctacagttgatgtcttgggttgttgcagaggcacagcgcgcggcgtatgcttgtccgatgtttggcgtatgacgggcaacgaaatgatgtaacaatataacaaatgagctctgtttagaccgagatgttgctaggatggattggtgagattgattggctgggaggagggggcaattggcgggatgtttctggggcgtgcgataatgatggtgattcgcgagttggcggtggccgtttggtgggagtgggagatgggccctgacaggatttcgactggtagggttacctctgtttatgagatagcttttccgggctgattagttcaactccaagcggtcaagtctccgtgcaatactacggtacgaatactaataataagcttggcaccggcttgcgacaccgtcttctctgcgctttcctccacttctagatctttgagctgttactgtgtctgttcactttgttgtttctgctatcttatttagcgatggcgagctgagtaattctggcgtttctattctgctgtgagttgctagtcgttgcggctgaacggttgcacacggcttttggattccctgccgctgtagcttttcaaattaagttatacaattgctgtaaatgagaggtaaaacgagtctcacgcgcaggatttggaaaatcaaagaaaattacagtttcag

SEQ ID NO: 7251 - DNA, 2340 bp, Muscodor strobelii
  misc_feature: SGI cDNA ID NO. 562175
  misc_feature: Encodes the peptide sequence at SEQ ID NO 7252
atgcctcggaaaccccaaaactacgacgattacggctcagccgtccagcaaatcatcctctccacgaccgacgccgagttcctcgaccagctgatacccgtcttgaaagatgcgacaagcaccaaccgttcaagcaccctgacccagaatctgtcacagtacgccgatgaccgggaggttgaaatcgaacggataggtctgaccaaacacgaggagttcttgggttccgtcaaccaattgcagaatgtccgggagcgcaccgttgcgctgactgccgacatcctcgagctcaaccactccatccaggcgagcactgagaagctcgccgaacagaagcaagccctcgtcaacactcgtgctgtccgcgaaaacatctcggatgtatcagaagcgctcaaggagtccctgaagatactgcacagcgtcaacaacgcccacgacctgatcaggaagaagatgtactacggtgcactcaaatcgctcgacgacctccagaacgagttcctcatcccaactatccagaacaaatatgctacacagcatcggctggccgatctgatccagaaatccatacccgcatcgcagaagactatctccgaggctgtcatgacggatctcaacacatggctctatcgcataagagaaacatcccaattcctaggagaagtcgccttctaccacacagatatgcggagatcacgccagcaggaacgagtgaaggatgatgattttctggaacactttagcctgaactctgccatcgaacttgtcttcgacgaaagtgaagaattcgacgtgctcgacaatgaagagctccaggtcgacttcactcctcttttcgaagctatgcatattcacgaagctctcggacagagcgataagttccgatccgagtatgccgcgactagaaggcgtcagaaagagttattgctaccgaactctgtagacctcacaagcgacggtgaacagtccctgagcagtctactagagggcatatctggatttgctatcattgaaaaggcaactatgcgacgcgcaccacaactgcgatctgccattgacgtcgaagaactgtgggattctatgtgttcgaccgcaatcacgttgacgtccaaggctcttggagacatccagaacgccgaggttcttgtacagatcaaaggcgcagtagcactcttcattcaaacaatggagggttggggctactcggtgacgagacttgatgattttctagttaccttattcgacaaatacgctgagctactgaaacagagattcagcgaagatttccaagagattgtatctaccgacgattatatgcctatgcccattcagtctagagaagagtacgagaaagtgtccaatgtcagctggtttgctcaggatcggcccattgaggagatgaagttcccatgtgtcctgccgttctcacagatgtatccactgtgttgtatagacattaggaatttcctcaaccagttttacttcttctccaatgactacttccaacacccgaccaagatagacgagacactgcgaaagtctttagatgagctccttacggagaaggtgtgccaatcattagttgagcgactcagctctcaatatccaggccagatcgtgcaaattttgaccaatctggaacattttgagacggcgtgccaggaactagagcaactcttgatccgagcgcgatcatcgggctcggctggtggtcccttgaccctcgcagcaactgaacaattccgagagcataagaaaacagccgagaaacgaatattcgaattggtaaattcaaaaattgacgatctcatggagactgcagagtatgattggatggcgtataacacaccctccgagccaagcagttacatccagaccttgaccacttatctgtcaaatatcatgagtaccacgctactgggtctaccgcgcgagattaaggaactcatctatttcgatgcccttagtcatgccgctagcaaaatccttgcccttcccctctcaccagacgtgaagaagattaatcctaatggggtggcagcactcgccaaggacgtacagcatttgacagactttgtggacgatctcgaaaacggtttcatgctgcgatccaacttggatgagctggagcagacgacccaacttttacaatctgagaatacagacgaattctttgatacagcatcaaggaacaagaaatatggccgtgtcgatgccatgaatggtcctattttattagaaaaactcaccacacagatctcaagcccgggcgcaacttcgcaacgctttgcgaacttttcatcgaatctctcatctagattcgggtcgaacaaatga

SEQ ID NO: 7252 - protein, 779 aa, Muscodor strobelii
  misc_feature: SGI Peptide ID NO. 562175
  misc_feature (449)..(779): Pfam Id: PF04091 Pfam Desc: Exocyst complex subunit Sec15-like
  misc_feature (449)..(675): Pfam Id: PF04091 Pfam Desc: Exocyst complex subunit Sec15-like
  misc_feature (1)..(749): NCBI GI: 145611328 Blast Desc: MGG_00471 [Magnaporthe grisea 70-15] gi|145018634|gb|EDK02913.1| MGG_00471 [Magnaporthe grisea 70-15]
  misc_feature (17)..(749): NCBI GI: 46111455 Blast Desc: FG02609.1 [Gibberella zeae PH-1]
  misc_feature (1)..(776): NCBI GI: 85084040 Blast Desc: NCU00117 [Neurospora crassa OR74A] gi|28918329|gb|EAA28005.1| NCU00117 [Neurospora crassa OR74A]
  misc_feature (1)..(776): NCBI GI: 171685674 Blast Desc: protein product [Podospora anserina] gi|170942798|emb|CAP68451.1| protein product [Podospora anserina]
  misc_feature (2)..(779): NCBI GI: 154312150 Blast Desc: BC1G_06108 [Botryotinia fuckeliana B05.10] gi|150850071|gb|EDN25264.1| BC1G_06108 [Botryotinia fuckeliana B05.10]
  misc_feature (1)..(779): NCBI GI: 261358413 Blast Desc: rsec15 [Verticillium albo-atrum VaMs.102]
  misc_feature (17)..(776): NCBI GI: 119467864 Blast Desc: exocyst complex component Sec15, [Neosartorya fischeri NRRL 181] gi|119405890|gb|EAW15841.1| exocyst complex component Sec15, [Neosartorya fischeri NRRL 181]
  misc_feature (1)..(776): NCBI GI: 121703510 Blast Desc: exocyst complex component Sec15, [Aspergillus clavatus NRRL 1] gi|119398163|gb|EAW08593.1| exocyst complex component Sec15, [Aspergillus clavatus NRRL 1]
  misc_feature (2)..(749): NCBI GI: 156064349 Blast Desc: SS1G_00182 [Sclerotinia sclerotiorum 1980] gi|154691044|gb|EDN90782.1| SS1G_00182 [Sclerotinia sclerotiorum 1980]
  misc_feature (1)..(776): NCBI GI: 212546171 Blast Desc: Exocyst complex component Sec15, [Penicillium marneffei ATCC 18224] gi|210064759|gb|EEA18854.1| Exocyst complex component Sec15, [Penicillium marneffei ATCC 18224]
MPRKPQNYDDYGSAVQQIILSTTDAEFLDQLIPVLKDATSTNRSSTLTQNLSQYADDREVEIERIGLTKHEEFLGSVNQLQNVRERTVALTADILELNHSIQASTEKLAEQKQALVNTRAVRENISDVSEALKESLKILHSVNNAHDLIRKKMYYGALKSLDDLQNEFLIPTIQNKYATQHRLADLIQKSIPASQKTISEAVMTDLNTWLYRIRETSQFLGEVAFYHTDMRRSRQQERVKDDDFLEHFSLNSAIELVFDESEEFDVLDNEELQVDFTPLFEAMHIHEALGQSDKFRSEYAATRRRQKELLLPNSVDLTSDGEQSLSSLLEGISGFAIIEKATMRRAPQLRSAIDVEELWDSMCSTAITLTSKALGDIQNAEVLVQIKGAVALFIQTMEGWGYSVTRLDDFLVTLFDKYAELLKQRFSEDFQEIVSTDDYMPMPIQSREEYEKVSNVSWFAQDRPIEEMKFPCVLPFSQMYPLCCIDIRNFLNQFYFFSNDYFQHPTKIDETLRKSLDELLTEKVCQSLVERLSSQYPGQIVQILTNLEHFETACQELEQLLIRARSSGSAGGPLTLAATEQFREHKKTAEKRIFELVNSKIDDLMETAEYDWMAYNTPSEPSSYIQTLTTYLSNIMSTTLLGLPREIKELIYFDALSHAASKILALPLSPDVKKINPNGVAALAKDVQHLTDFVDDLENGFMLRSNLDELEQTTQLLQSENTDEFFDTASRNKKYGRVDAMNGPILLEKLTTQISSPGATSQRFANFSSNLSSRFGSNK

SEQ ID NO: 7253 - DNA, 5440 bp, Muscodor strobelii; identical to SEQ ID NO: 7250
  misc_feature: SGI EST ID NO. CUFF.18048.2
  misc_feature: Variant of the nucleotide sequence at SEQ ID NO 7251

SEQ ID NO: 7254 - DNA, 2193 bp, Muscodor strobelii
  misc_feature: SGI cDNA ID NO. 562176
  misc_feature: Encodes the peptide sequence at SEQ ID NO 7255
atgaactccaatctctcggcccgcgacggccacttcaatcctacttcgccacattcatccagcggagccgctgaatcgtttaagggaactccagaaacgcgtctgactgtgttctctcctgaggatggatcttccaagtcgtcaaaggcacgtcagcccttgagcatcggcagccgggagagtggccctattcgatttgcggccaacacccgcagcgctctcgagcttcccaacaccttcattcggtcaaacctacatgcggagagaggtgacccttttgtgtcttccacacttgcccctcccaatcgatcaacgtcacagaagttgtctccgacagcctctgtcttctcgccgtaccctagtcctctgactaacatctcatccaatgcgacgatcggacaacaaacccatggaactacagacaatgatcagatccatgatcaacagcctctgacacgcgctcagcagccgagtggccctcatagcgttctgagcactgacacaaatttggcacgatgccttatcattgctgatcctggacgaagacttggtgcagtcgatgtagctcagtacatttcggacttggagtcaaccggagtaaccatccacggacgtcgacagatctgcgagagtgataaccgagttttcgttcgtttcgtgaatattcgtgacgcgatcggcgtactctcaagcatccatgccgcatctgatgtacaatggatgacgagcttcattactccacgagagttttctcaggcaatcgagcctggttccggcgctaccaccgttcatgaaggacagatctacctcaatgtctttgcaactcaagtcgcggtctcgatggggcgtgaccaactcgagcttgtgctcaaggatcttttacaagaggaaggcgatcttttcgctttcaaggtcgatcccacaaccggcgcagaaggcagcctgttcagtgcgattgcagaatactgcgataatgacgtgtccttgagagctgtctctagattcaacaacatcgtcattgagggtggttaccaagtctgcatcactctataccgaccggatattccctcctacactagcgtaccagcaggcctggttagtcctgcacgaacggctaccaccgcatccgatattgcaaacgattttcagcgtttgtctctgaaccgagctccatccgtggcaccaggcgtgagtacttccaatgctctgttgagcacaccggttcgtacacccggattgcacatgcaaccgtacggaatgctgcctattctctactccatggccagtcctccctatctgtttgaccacatgccatcacggtcccatagtgccgcattttcaccaggcggctaccccatggtgagccctctcggacctcgaccaagcccctacacgccccgtgacttggtctcgcagcgtcagctccaacaatcgttcaaccggcgccagaatgcaactcgagtcaacaggtcaccctattatcagcagtccaacagccacaaccatgtcgatatcggtcgcattgaagaaggcaccgatgttcgaaccacaatcatgttacgcaacatacctaacaaggttgatcaagcgatgctaaagagaatcgtggacgaatctagctggggcaaatacgatttcatgtatcttcggattgacttcgcgaatgattgcaacgttggctatgctttcattaatttcgttgacccattggacatcgtcgattttgtgaacgcgaggggtaatcaacgctggaattgcttcaagagcgacaaggtcgctgagatctcttatgctacgatccaggggaaagattgtctcgtccagaagtttcgcaatagctcggttatgctggaggcaccacactatcggcccaaggcaagtttatgtctgaatatcaccaagtcagaggccgtcactaacattcgagcgcagttgtactacacggtgaacggaccacgccccgaagctgcaggcgaggaagaagcctttcccggtcctgacaaccagtctaagatgaaaagaagttgcgagaatgcggagcacgtcggactgtttactcccaatgcgggtcagcacttccgcgacgagcagcgtcgacgacgctcccagtacgaccgcggcacaagaatggccgagttcgaggagtttgattatggtgcagcattgcatcataacttctactctcctcaatga

SEQ ID NO: 7255 - protein, 730 aa, Muscodor strobelii
  misc_feature: SGI Peptide ID NO. 562176
  misc_feature (515)..(611): Pfam Id: PF04059 Pfam Desc: RNA recognition motif 2
  misc_feature (7)..(718): NCBI GI: 171685672 Blast Desc: protein product [Podospora anserina] gi|170942797|emb|CAP68450.1| protein product [Podospora anserina]
  misc_feature (7)..(726): NCBI GI: 145611330 Blast Desc: MGG_00470 [Magnaporthe grisea 70-15] gi|145018635|gb|EDK02914.1| MGG_00470 [Magnaporthe grisea 70-15]
  misc_feature (14)..(718): NCBI GI: 156064345 Blast Desc: SS1G_00180 [Sclerotinia sclerotiorum 1980] gi|154691042|gb|EDN90780.1| SS1G_00180 [Sclerotinia sclerotiorum 1980]
  misc_feature (13)..(718): NCBI GI: 154312152 Blast Desc: BC1G_06109 [Botryotinia fuckeliana B05.10] gi|150850072|gb|EDN25265.1| BC1G_06109 [Botryotinia fuckeliana B05.10]
  misc_feature (16)..(716): NCBI GI: 256725825 Blast Desc: NECHADRAFT_81930 [Nectria haematococca mpVI 77-13-4]
  misc_feature (22)..(730): NCBI GI: 116208148 Blast Desc: CHGG_03367 [Chaetomium globosum CBS 148.51] gi|88183964|gb|EAQ91432.1| CHGG_03367 [Chaetomium globosum CBS 148.51]
  misc_feature (22)..(728): NCBI GI: 46111457 Blast Desc: FG02610.1 [Gibberella zeae PH-1]
  misc_feature (518)..(721): NCBI GI: 261358412 Blast Desc: conserved [Verticillium albo-atrum VaMs.102]
  misc_feature (20)..(714): NCBI GI: 238842788 Blast Desc: conserved [Microsporum canis CBS 113480]
  misc_feature (26)..(726): NCBI GI: 159122335 Blast Desc: meiosis protein MEI2, [Aspergillus fumigatus A1163]
MNSNLSARDGHFNPTSPHSSSGAAESFKGTPETRLTVFSPEDGSSKSSKARQPLSIGSRESGPIRFAANTRSALELPNTFIRSNLHAERGDPFVSSTLAPPNRSTSQKLSPTASVFSPYPSPLTNISSNATIGQQTHGTTDNDQIHDQQPLTRAQQPSGPHSVLSTDTNLARCLIIADPGRRLGAVDVAQYISDLESTGVTIHGRRQICESDNRVFVRFVNIRDAIGVLSSIHAASDVQWMTSFITPREFSQAIEPGSGATTVHEGQIYLNVFATQVAVSMGRDQLELVLKDLLQEEGDLFAFKVDPTTGAEGSLFSAIAEYCDNDVSLRAVSRFNNIVIEGGYQVCITLYRPDIPSYTSVPAGLVSPARTATTASDIANDFQRLSLNRAPSVAPGVSTSNALLSTPVRTPGLHMQPYGMLPILYSMASPPYLFDHMPSRSHSAAFSPGGYPMVSPLGPRPSPYTPRDLVSQRQLQQSFNRRQNATRVNRSPYYQQSNSHNHVDIGRIEEGTDVRTTIMLRNIPNKVDQAMLKRIVDESSWGKYDFMYLRIDFANDCNVGYAFINFVDPLDIVDFVNARGNQRWNCFKSDKVAEISYATIQGKDCLVQKFRNSSVMLEAPHYRPKASLCLNITKSEAVTNIRAQLYYTVNGPRPEAAGEEEAFPGPDNQSKMKRSCENAEHVGLFTPNAGQHFRDEQRRRRSQYDRGTRMAEFEEFDYGAALHHNFYSPQ

SEQ ID NO: 7256 - DNA, 721 bp, Muscodor strobelii
  misc_feature: SGI EST ID NO. CUFF.17974.0
  misc_feature: Variant of the nucleotide sequence at SEQ ID NO 7254
ccacaaccatgtcgatatcggtcgcattgaagaaggcaccgatgttcgaaccacaatcatgttacgcaacatacctaacaaggttgatcaagcgatgctaaagagaatcgtggacgaatctagctggggcaaatacgatttcatgtatcttcggattgacttcgcgaatgattgcaacgttggctatgctttcattaatttcgttgacccattggacatcgtcgatgtaagccgaccagcaggaatatgttgatttgtgactgaccgtcccctagtttgtgaacgcgaggggtaatcaacgctggaattgcttcaagagcgacaaggtcgctgagatctcttatgctagtatgtacgcttgtgtcttctgggactcgttcttaatgctgacagtgtgaacagcgatccaggggaaagattgtctcgtccagaagtttcgcaatagctcggttatgctggaggcaccacactatcggcccaaggcaagtttatgtctgaatatcaccaagtcagaggccgtcactaacattcgagcgcagttgtactacacggtgaacggaccacgccccgaagctgcaggcgaggaagaagcctttcccggtcctgacaaccagtctaagatgaaaagaagttgcgagaatgcggagcacgtcggtaagcaagcgctcagagaatcccgaaagcaagtaatcaagctcactgataactaggactgtttact

SEQ ID NO: 7257 - DNA, 2622 bp, Muscodor strobelii
  misc_feature: SGI cDNA ID NO. 562177
  misc_feature: Encodes the peptide sequence at SEQ ID NO 7258
atgaagccctccgccatggccagactacggcctctcgcgtgggtgctgcccctggcgtatgcgattagtgtgcacgccgactcttccgccgacgctctcacctgcgagtcgcggaccgtcaactacatcatccacacattgccccagcaatgcctgaccacgagcccgactgcctccgtctctgtcaccgttcccgcttctgcgagtgacgtgaccacttcggtctctgctgcgactgtcacatcctctgttgctaccgaaccgcaagcccagccgagcgagcccgtccacgacgacgacgacacggatggagaggacctgagcaccggtgccttcatgtcctttgaagaatggaaggctatgatggtggctaagtcggggcccgaggtcctcgacgccagaccacgcagggcccgtcccgatgtccccggcgaaggcttcgacagcttgggggacgaaggcgagatctccttcgacttcgacgcctactcggacaggatctccgagatggcctcctccgcccgtccccccgaggccgagaaggaagtcggggagcaggtcgagaaggtcacctacgacgagggcttcacctactaccgcagcaaggacgccggcaccacctgcaaggagcgcttctcctactcttctttcgacgccggcgccactgtcaagaagacaagcccggccgcgaagaaccccaccgccatcctcgtcgagaacaaggacgcctacatgctcctcgagtgcggcagggagaacaagttcttcatcgtcgagctcagcgatgtcattctcgtcgacaccgtcgtgctcgccaacttcgagttcttctccagcaacacccgcgagtttagagtcagcatcagcgatcgctatcccgtcagcatgaacaaatggaaggtcttgggcactttcaccgctcggaactccagggacattcaggccttcctggttgagaacccccaggattgggctaggtacctccgcgtcgagatcctcagtcactacggaaacgaatactactgtcctatatctctacttcgtgtccacggcctgcggatgcttgactcctggaagcaaatagacccatccgatctcgaggctgacgaggacaacctcaaggccgtcgttgagaccccagaggagatgatagaagctcctgaagaagagattatcgaagccgccatagtggcggatgttatcgttcaaaactcctccgccaccacggagcaaagtccatggactccttactggcacaaatcttacctccacaatcaatgttcttccatgggcgtatgcatagcagcggacgctccgaaccttaacgtctctgcttatgataaggagacagtctccactactccagcagaaccacaatccacagtcaacgatcagacaacttctacgttgctaaacacttcttcaacggcaataacagcgaaacagaccacatcagcgtcgagtgagacggccagtgctgtctcttcagtatctacctcggctgagaagtccgctagctcaattgcaacaacggagcctccagcgtcatcgacaattagtccagcggtggtgtcaagcgacaagtcttccgctactactagttctactccaaatcaaatgaacccatcgactacacagaatacttctaagagcaggtcttctataccgacatcagtgaaaccaccatcttcacgatcatcctccaccaaatcctcatcaggcacgcagaccgtgcctcgcaacaagaccagtacggcaacctcggcgctatcccctacacctactatgcaagactctttcttcaaagctttgacaaagcgcctgcaggtcttggaaaccaatatgacgctctcgaaccagtatatcgagtctcagtcaaaattcctccaagaagcgctggccaagctcgaaaaacggcaagtagctaaagttgatcatttcctcgaacagctcaaccggacggtgcttggcgaactgcgcgaactccgaatgctatacgatcaggtttggcaatccaccgttatcgcacttgaatcgcaacgcgaacagcatgaacgtgaatttctggcgctgagctcccgcgttggtgtgttggcggatgaggtcgcgttccagaagcggatggcaatcatacagagtgtgttgctactcggttgcctagtacttgtgattttttctcgtggctttgctggcccggctttcgagtcttactacatgccatcgaggctcgcgtctcctgtcatgtctccggaaaataaaagccctttgagtaggccgatggtcaatggtattcggcaccagtcagaggcagggtctcgcgaatcgacaccagcgaggaaccaggatccatctctcatggacctacagagtgatgataaaggcatacttactccaagcagtgagagtgtatccggttctaagggagccggatcagactctacgagacggccgtcgacccctatcagaacggtgtccgacccgctgggtattgagttccaaccgcctacgccatccagtatggaggacatggcttacgattcggagccgaatttgacggctaatgactacttctcgtcttcgaatcagaaaccacttccaactttgcctgaagattcagattaa

SEQ ID NO: 7258 - protein, 873 aa, Muscodor strobelii
  misc_feature: SGI Peptide ID NO. 562177
  misc_feature (226)..(353): Pfam Id: PF07738 Pfam Desc: Sad1 / UNC-like C-terminal
  misc_feature (35)..(734): NCBI GI: 171685670 Blast Desc: protein product [Podospora anserina] gi|170942796|emb|CAP68449.1| protein product [Podospora anserina]
  misc_feature (35)..(728): NCBI GI: 116208146 Blast Desc: CHGG_03366 [Chaetomium globosum CBS 148.51] gi|88183963|gb|EAQ91431.1| CHGG_03366 [Chaetomium globosum CBS 148.51]
  misc_feature (22)..(727): NCBI GI: 85084048 Blast Desc: NCU00119 [Neurospora crassa OR74A] gi|28918331|gb|EAA28007.1| NCU00119 [Neurospora crassa OR74A]
  misc_feature (34)..(733): NCBI GI: 145611332 Blast Desc: MGG_00469 [Magnaporthe grisea 70-15] gi|145018636|gb|EDK02915.1| MGG_00469 [Magnaporthe grisea 70-15]
  misc_feature (34)..(732): NCBI GI: 46111459 Blast Desc: FG02611.1 [Gibberella zeae PH-1]
  misc_feature (34)..(727): NCBI GI: 156064607 Blast Desc: SS1G_00311 [Sclerotinia sclerotiorum 1980] gi|154691173|gb|EDN90911.1| SS1G_00311 [Sclerotinia sclerotiorum 1980]
  misc_feature (34)..(713): NCBI GI: 169612151 Blast Desc: SNOG_09192 [Phaeosphaeria nodorum SN15] gi|111062264|gb|EAT83384.1| SNOG_09192 [Phaeosphaeria nodorum SN15]
  misc_feature (53)..(782): NCBI GI: 255956003 Blast Desc: Pc21g17570 [Penicillium chrysogenum Wisconsin 54-1255] gi|211590465|emb|CAP96654.1| Pc21g17570 [Penicillium chrysogenum Wisconsin 54-1255]
  misc_feature (48)..(731): NCBI GI: 67523617 Blast Desc: AN2264.2 [Aspergillus nidulans FGSC A4] gi|40744681|gb|EAA63837.1| AN2264.2 [Aspergillus nidulans FGSC A4] gi|259487657|tpe|CBF86494.1| TPA: Sad1/UNC domain protein A4]
  misc_feature (17)..(713): NCBI GI: 189189230 Blast Desc: PTRG_00621 [Pyrenophora tritici-repentis Pt-1C-BFP] gi|187972560|gb|EDU40059.1| PTRG_00621 [Pyrenophora tritici-repentis Pt-1C-BFP]
MKPSAMARLRPLAWVLPLAYAISVHADSSADALTCESRTVNYIIHTLPQQCLTTSPTASVSVTVPASASDVTTSVSAATVTSSVATEPQAQPSEPVHDDDDTDGEDLSTGAFMSFEEWKAMMVAKSGPEVLDARPRRARPDVPGEGFDSLGDEGEISFDFDAYSDRISEMASSARPPEAEKEVGEQVEKVTYDEGFTYYRSKDAGTTCKERFSYSSFDAGATVKKTSPAAKNPTAILVENKDAYMLLECGRENKFFIVELSDVILVDTVVLANFEFFSSNTREFRVSISDRYPVSMNKWKVLGTFTARNSRDIQAFLVENPQDWARYLRVEILSHYGNEYYCPISLLRVHGLRMLDSWKQIDPSDLEADEDNLKAVVETPEEMIEAPEEEIIEAAIVADVIVQNSSATTEQSPWTPYWHKSYLHNQCSSMGVCIAADAPNLNVSAYDKETVSTTPAEPQSTVNDQTTSTLLNTSSTAITAKQTTSASSETASAVSSVSTSAEKSASSIATTEPPASSTISPAVVSSDKSSATTSSTPNQMNPSTTQNTSKSRSSIPTSVKPPSSRSSSTKSSSGTQTVPRNKTSTATSALSPTPTMQDSFFKALTKRLQVLETNMTLSNQYIESQSKFLQEALAKLEKRQVAKVDHFLEQLNRTVLGELRELRMLYDQVWQSTVIALESQREQHEREFLALSSRVGVLADEVAFQKRMAIIQSVLLLGCLVLVIFSRGFAGPAFESYYMPSRLASPVMSPENKSPLSRPMVNGIRHQSEAGSRESTPARNQDPSLMDLQSDDKGILTPSSESVSGSKGAGSDSTRRPSTPIRTVSDPLGIEFQPPTPSSMEDMAYDSEPNLTANDYFSSSNQKPLPTLPEDSD

SEQ ID NO: 7259 - DNA, 1254 bp, Muscodor strobelii
  misc_feature: SGI cDNA ID NO. 562178
  misc_feature: Encodes the peptide sequence at SEQ ID NO 7260
atggcatctgataaagtgtcaatcacgttcatgttccatagaaaggacatacggcctcctctttttgttgctggaagcttttcagatccgccatgggagccacacgagatgaatcactcaatggatcagcatggtgatttgatgttcacctactctgctctagtagacgcagatacggatattcaatacaagtttcgaattggtctgggagactggtgggcattagaccctaatgctgaaacagtaaccgacggccagggcaatatgaacaacatacttcacgctccttctcaaatagacaccctagaaagagatcaatctgaggttgcccatgatacggcggcaccatatccagctctttatgtgactacgctcggtgacgatactgcaaacagcgatgacgcaaatgaggagttgccaatgttcagtcacgaatgtttcctctcctcgcacgataacccggcagactacgggaatgcaatccaattcgcgccaaacgagcctgatgaatatgagccagatacttgggactataacaatcctcgccttgagcagtttcccgccgatcgcgattccatatttgcagcaatgcgtcgtctatccacatccatagaagccgatcccactgtggtagattcaagcatgttatctccagttttcagctcgacctcatggtccgatgcaagcagtccagctaagagacgagactctttgccgccgccgccagaggaacacgagatcctccaacaacccttgggcgttgtggcttctagactatcgttacaatccatcgcagaaggcgatgaggcaccgatcccagcgatgtccggatctcaggatgaaaatatccattccttacttcgacattccagtctaggcggaaaacggcatttctctttgagctctgtggaggatgatcttgacgagggtattgctatgaacgagcccttttctaccaagtgccaaccccaatcagttgacgcctcaaatcccatcgagagaggtaacgcacaacctgaaacattgcatacaacgaatgggatgactgacatgaccgggccgtcatgtgacgagcctgatgcacgccagactgacattcagaagcctttaagcagcaagaagtctgcttctctccgtaaacccgatgttaacgacaaaggcaactgggttaaaacctttctgcgcacagttttcgtggattggatgggagatatcgtctgctggctatgcggaagaagaagacaaagcgcatag

SEQ ID NO: 7260 - protein, 417 aa, Muscodor strobelii
  misc_feature: SGI Peptide ID NO. 562178
  misc_feature (3)..(271): NCBI GI: 256733168 Blast Desc: NECHADRAFT_92810 [Nectria haematococca mpVI 77-13-4]
  misc_feature (3)..(266): NCBI GI: 46125173 Blast Desc: FG06964.1 [Gibberella zeae PH-1]
  misc_feature (1)..(93): NCBI GI: 116207122 Blast Desc: CHGG_02854 [Chaetomium globosum CBS 148.51] gi|88183451|gb|EAQ90919.1| CHGG_02854 [Chaetomium globosum CBS 148.51]
  misc_feature (1)..(200): NCBI GI: 145602201 Blast Desc: MGG_05111 [Magnaporthe grisea 70-15] gi|145010633|gb|EDJ95289.1| MGG_05111 [Magnaporthe grisea 70-15]
  misc_feature (1)..(94): NCBI GI: 171686568 Blast Desc: protein product [Podospora anserina] gi|170943245|emb|CAP68898.1| protein product [Podospora anserina]
  misc_feature (1)..(94): NCBI GI: 85109808 Blast Desc: NCU06247 [Neurospora crassa OR74A] gi|28924749|gb|EAA33862.1| NCU06247 [Neurospora crassa OR74A]
  misc_feature (1)..(96): NCBI GI: 156047918 Blast Desc: SS1G_08690 [Sclerotinia sclerotiorum 1980] gi|154693087|gb|EDN92825.1| SS1G_08690 [Sclerotinia sclerotiorum 1980]
  misc_feature (7)..(94): NCBI GI: 169621261 Blast Desc: SNOG_13839 [Phaeosphaeria nodorum SN15] gi|160704213|gb|EAT78863.2| SNOG_13839 [Phaeosphaeria nodorum SN15]
  misc_feature (5)..(93): NCBI GI: 240107000 Blast Desc: CPC735_017900 [Coccidioides posadasii C735 delta SOWgp]
  misc_feature (9)..(95): NCBI GI: 189206684 Blast Desc: [Pyrenophora tritici-repentis Pt-1C-BFP] gi|187975769|gb|EDU42395.1| [Pyrenophora tritici-repentis Pt-1C-BFP]
MASDKVSITFMFHRKDIRPPLFVAGSFSDPPWEPHEMNHSMDQHGDLMFTYSALVDADTDIQYKFRIGLGDWWALDPNAETVTDGQGNMNNILHAPSQIDTLERDQSEVAHDTAAPYPALYVTTLGDDTANSDDANEELPMFSHECFLSSHDNPADYGNAIQFAPNEPDEYEPDTWDYNNPRLEQFPADRDSIFAAMRRLSTSIEADPTVVDSSMLSPVFSSTSWSDASSPAKRRDSLPPPPEEHEILQQPLGVVASRLSLQSIAEGDEAPIPAMSGSQDENIHSLLRHSSLGGKRHFSLSSVEDDLDEGIAMNEPFSTKCQPQSVDASNPIERGNAQPETLHTTNGMTDMTGPSCDEPDARQTDIQKPLSSKKSASLRKPDVNDKGNWVKTFLRTVFVDWMGDIVCWLCGRRRQSA

SEQ ID NO: 7261 - DNA, 1371 bp, Muscodor strobelii
  misc_feature: SGI cDNA ID NO. 562179
  misc_feature: Encodes the peptide sequence at SEQ ID NO 7262
atgtcggtgccaccgcaactcatccgcgtgaagcgcaaggcgacggaagaggcacctgtctcctaccttcgtgtccaagagagcaagcggcacagaagcgaggtctttgtctaccagcgccagcgtcacgaccaagatgcaacctttgcccagaccattcctattcaacaccagaggcccatcatccatacctcttctcccctccaacctaagaagcctcagcccaagccgcaacccgaacaacaagatcaacatgtcaagcaagatgctgcagcaacgaagcacgctatcgacggcagtgcagatggcaccatcccctccgatcccgcccatgagccccggaaattccacatgtcacgccaggatatcggtttaagctcatcctcatccgatctgcgacgtggcatcggctccagaaagcgcgccggtaccactctatttgtagagcgcagaatcaagcgcatctcctccaggactctccaaaagttccacgccgcctccaactccccaagtcctgcgctcccgcctgcgtcagtacaggttcaagtcacacaagacatggagctggacaggccagagcctcggaagctgaagaaaccgggcgtagcaaagcttgcgtccagagatagctctaccaagcgtcaactccccaagtccatgacagaccgttggaacgtagacatggacaagctcacagccgatatggaggcatacgcatttcagcagatagggctcaacatccaaaagtcccaagaggaagaccagaaacgtgagcgagcaagagccgagcaggaagaacatgagcaaagaagactcgatagcaccccttcgaagctcaaatttaaacccaaagctccggcaaaacggtacgctgagcgccaccccaaagaggcgcagggctctgcagacaatggggacaacggggacaagcagatggcagatgccggggccgctgccgagaatagcgacagcgatgatgattacatcatcgaaacctacgttcgcgtacccgccgctaccatgggcgaccacgtccctccccagagtgtcgggctcttggtatttgaccaggaacccgacatcgagtatttttacggcgcagatgtcgacagcgatgacgagtgggctgaggatgatgaggacgaaaacgccgagaactactacacggcagactaccccgatgaggaagtggcttcggacgatgagttcggccagaacccctatactttccggaacggcaatgcgtcagatctggaagagtatgacatggttgatgatgatagcgacaagctgtttgatagtgatgaagacgaggagggcggctttagaacccacattgggcgtagtgggctcaagagtaggcatctatag

SEQ ID NO: 7262 - protein, 456 aa, Muscodor strobelii
  misc_feature: SGI Peptide ID NO. 562179
  misc_feature (1)..(421): NCBI GI: 256732719 Blast Desc: NECHADRAFT_79198 [Nectria haematococca mpVI 77-13-4]
  misc_feature (1)..(422): NCBI GI: 46125175 Blast Desc: FG06965.1 [Gibberella zeae PH-1]
  misc_feature (1)..(421): NCBI GI: 85109810 Blast Desc: NCU06248 [Neurospora crassa OR74A] gi|28924750|gb|EAA33863.1| [Neurospora crassa OR74A]
  misc_feature (2)..(436): NCBI GI: 116207124 Blast Desc: CHGG_02855 [Chaetomium globosum CBS 148.51] gi|88183452|gb|EAQ90920.1| CHGG_02855 [Chaetomium globosum CBS 148.51]
  misc_feature (2)..(422): NCBI GI: 171686570 Blast Desc: protein product [Podospora anserina] gi|170943246|emb|CAP68899.1| protein product [Podospora anserina]
  misc_feature (1)..(416): NCBI GI: 156047916 Blast Desc: SS1G_08689 [Sclerotinia sclerotiorum 1980] gi|154693086|gb|EDN92824.1| SS1G_08689 [Sclerotinia sclerotiorum 1980]
  misc_feature (26)..(448): NCBI GI: 39940254 Blast Desc: MGG_05113 [Magnaporthe grisea 70-15] gi|145010631|gb|EDJ95287.1| MGG_05113 [Magnaporthe grisea 70-15]
  misc_feature (276)..(440): NCBI GI: 189206772 Blast Desc: conserved [Pyrenophora tritici-repentis Pt-1C-BFP] gi|187975813|gb|EDU42439.1| conserved [Pyrenophora tritici-repentis Pt-1C-BFP]
  misc_feature (83)..(423): NCBI GI: 242776838 Blast Desc: conserved [Talaromyces stipitatus ATCC 10500] gi|218722531|gb|EED21949.1| conserved [Talaromyces stipitatus ATCC 10500]
  misc_feature (253)..(439): NCBI GI: 169621333 Blast Desc: SNOG_13876 [Phaeosphaeria nodorum SN15] gi|111057780|gb|EAT78900.1| SNOG_13876 [Phaeosphaeria nodorum SN15]
MSVPPQLIRVKRKATEEAPVSYLRVQESKRHRSEVFVYQRQRHDQDATFAQTIPIQHQRPIIHTSSPLQPKKPQPKPQPEQQDQHVKQDAAATKHAIDGSADGTIPSDPAHEPRKFHMSRQDIGLSSSSSDLRRGIGSRKRAGTTLFVERRIKRISSRTLQKFHAASNSPSPALPPASVQVQVTQDMELDRPEPRKLKKPGVAKLASRDSSTKRQLPKSMTDRWNVDMDKLTADMEAYAFQQIGLNIQKSQEEDQKRERARAEQEEHEQRRLDSTPSKLKFKPKAPAKRYAERHPKEAQGSADNGDNGDKQMADAGAAAENSDSDDDYIIETYVRVPAATMGDHVPPQSVGLLVFDQEPDIEYFYGADVDSDDEWAEDDEDENAENYYTADYPDEEVASDDEFGQNPYTFRNGNASDLEEYDMVDDDSDKLFDSDEDEEGGFRTHIGRSGLKSRHL

SEQ ID NO: 7263 - DNA, 2176 bp, Muscodor strobelii
  misc_feature: SGI EST ID NO. CUFF.18040.2
  misc_feature: Variant of the nucleotide sequence at SEQ ID NO 7261
attttaagtcatgtcattgtggttcaattgcggatttactagatccagaggattacagattgccaagatatgttcaagagcatcaagcagtgacaactgttaaatatctgataagaacaggagatataatatacaatggagtaggtagggttgcaagcattgaatgccgagccgtctgatgaagagatgagatgacagcagaggtaagttccgagatgcggggcaggggagctagtgaacaggctagtgagggaccgtggtccctgcactggcagtgacccgcttgacggcgatgtaagtgcacccaatgtgctttctattccaggtaccgcaagggctcactagcgggagactgtgaaaccctgcaggtgataacctcatcgccgcccacagcacaagttgcaacaacccacctacctgggctacgttcagcgaagggagggtcatcgcaggcattgcgtctctgtctgtcgccgtagacacacaaagacgcctcaccggcgacgggtgcccgtcatgtcggtgccaccgcaactcatccgcgtgaagcgcaaggcgacggaagaggcacctgtctcctaccttcgtgtccaagagagcaagcggcacagaagcgaggtctttgtctaccagcgccagcgtcacgaccaagatgcaacctttgcccagaccattcctattcaacaccagaggcccatcatccatacctcttctcccctccaacctaagaagcctcagcccaagccgcaacccgaacaacaagatcaacatgtcaagcaagatgctgcagcaacgaagcacgctatcgacggcagtgcagatggcaccatcccctccgatcccgcccatgagccccggaaattccacatgtcacgccaggatatcggtttaagctcatcctcatccgatctgcgacgtggcatcggctccagaaagcgcgccggtaccactctatttgtagagcgcagaatcaagcgcatctcctccaggactctccaaaagttccacgccgcctccaactccccaagtcctgcgctcccgcctgcgtcagtacaggttcaagtcacacaagacatggagctggacaggccagagcctcggaagctgaagaaaccgggcgtagcaaagcttgcgtccagagatagctctaccaagcgtcaactccccaagtccatgacagaccgttggaacgtagacatggacaagctcacagccgatatggaggcatacgcatttcagcagatagggctcaacatccaaaagtcccaagaggaagaccagaaacgtgagcgagcaagagccgagcaggaagaacatgagcaaagaagactcgatagcaccccttcgaagctcaaatttaaacccaaagctccggcaaaacggtacgctgagcgccaccccaaagaggcgcagggctctgcagacaatggggacaacggggacaagcagatggcagatgccggggccgctgccgagaatagcgacagcgatgatgattacatcatcgaaacctacgttcgcgtacccgccgctaccatgggcgaccacgtccctccccagagtgtcgggctcttggtatttgaccaggaacccgacatcgagtatttttacggcgcagatgtcgacagcgatgacgagtgggctgaggatgatgaggacgaaaacgccgagaactactacacggcagactaccccgatgaggaagtggcttcggacgatgagttcggccagaacccctatactttccggaacggcaatgcgtcagatctggaagagtatgacatggttgatgatgatagcgacaagctgtttgatagtgatgaagacgaggagggcggctttagaacccacattgggcgtagtgggctcaagagtaggcatctatagacgtcttcactgggggtcctcgcgagagcacgaggagcgcaagcttgagctgaggcagctggccgtacaggaacttggttcatttgtctacagccccaggtacatgatgtgtaccccattattctaccctgtgtgatcagccacaacagatgatctgcatacagacattctgcaagtggacactagagctaaacaaagagaagagtttaaactcagccttgtaatgcttagcgtgatcgtgaatgctctgcatccaagggcactgtagaatataagagcatgtagtttc

SEQ ID NO: 7264 - DNA, 1377 bp, Muscodor strobelii
  misc_feature: SGI cDNA ID NO. 562180
  misc_feature: Elevated expression when VOC is produced
  misc_feature: Encodes the peptide sequence at SEQ ID NO 7265
atgtcaccacggatcaactcaaagaatgagcccatagatgacgtacagagctacaatatccctaccattgcaccagtttatccattctcgcctttggtttcgagtcagtgctctccgttctccaaagaatcgtccgaagatagagaactagctcctacttctgccatacttgtgaagctagagacaggcagcgagtgtagcgacttgcctagctctcgaagagagtcgctgaaacgtaaattcaacgacgaggacgataacgatgacaagtacgaggatgaagaggatgaagaggacgaagaggacaaagaggataacatcgaggacgacgatgaggatgacggcactcatgtcagcgccaaatcaatccaactgcctggtctccaaagtcttctaagctcaattagccccgaaaattctggttatgctcgtggggctgagacgttacgaactcctagctctagtcctgaaccgaacagcaactacgtcttctcgagatatcccagttcattcctgacggatgacccaatcacggagaagctcaactacctccgcagacaagacgaacctaagtacccgctaccatttcggcaaactcaagacagggagcggcgcgaaccactgccgttgctagaagggttgtgtgaacctcgtccagctattctcacagatagcataggcgggaagcctcctttcactcgcgtttacaactacgctcagccacagaccccgctgtcatataactatgtcagccgtccatgcctccaaagaccctcgccacctcgagagatggttaggaaaccgcgctccaagaagaaggagccacactgcaatctcaagtacttcgttgaggagacagactacatacgataccaaagaatagattttggacagggttggccaactgttcatcaattgttccacgacaagtatccgatgaaagatatcgtcaggaacccccaaggacttcaaggtgtaaactacagggagaacaaatatcttcctacgctggtgggcacgaccaacgagctagtatttatggacaacggacacgtaaaaccctgtgaggtcaagacacgacaacagaaggagaatgcgcatctatacacactcatttacctgtttccggagcgcgctattaattatccatggatcctaccgagggatcgtcaacgcgcgttagaactacacgaggaccgtcagagacagaaagctctcgctcgagacaaggcattggaacgtggaacttatgtcgagccaggccgattgaagccggggacctgcggctgctgcccaaagcaggatcggaaaaaagacattgccaaacgtattgtgcccttcagcaagaaacagaagctcgttatggccaagttatga

SEQ ID NO: 7265 - protein, 458 aa, Muscodor strobelii
  misc_feature: SGI Peptide ID NO. 562180
  misc_feature (277)..(403): NCBI GI: 261360307 Blast Desc: conserved [Verticillium albo-atrum VaMs.102]
  misc_feature (247)..(387): NCBI GI: 46125177 Blast Desc: FG06966.1 [Gibberella zeae PH-1]
  misc_feature (258)..(403): NCBI GI: 256733169 Blast Desc: NECHADRAFT_79199 [Nectria haematococca mpVI 77-13-4]
  misc_feature: Useful for introducing or modulating the production of volatile compounds
MSPRINSKNEPIDDVQSYNIPTIAPVYPFSPLVSSQCSPFSKESSEDRELAPTSAILVKLETGSECSDLPSSRRESLKRKFNDEDDNDDKYEDEEDEEDEEDKEDNIEDDDEDDGTHVSAKSIQLPGLQSLLSSISPENSGYARGAETLRTPSSSPEPNSNYVFSRYPSSFLTDDPITEKLNYLRRQDEPKYPLPFRQTQDRERREPLPLLEGLCEPRPAILTDSIGGKPPFTRVYNYAQPQTPLSYNYVSRPCLQRPSPPREMVRKPRSKKKEPHCNLKYFVEETDYIRYQRIDFGQGWPTVHQLFHDKYPMKDIVRNPQGLQGVNYRENKYLPTLVGTTNELVFMDNGHVKPCEVKTRQQKENAHLYTLIYLFPERAINYPWILPRDRQRALELHEDRQRQKALARDKALERGTYVEPGRLKPGTCGCCPKQDRKKDIAKRIVPFSKKQKLVMAKL

SEQ ID NO: 7266 - DNA, 6648 bp, Muscodor strobelii
  misc_feature: SGI EST ID NO. CUFF.18041.0
  misc_feature: Variant of the nucleotide sequence at SEQ ID NO 7264
gcacttaaaagaaacctggcagtcgtgggcgagagcagccccttgcgccatcaccttactccgtactcttgtgctcatcacctaggcagggtttctcatgtcgagagtagcctaccacaagctagactaaagaggcaccgttctgacgacttccaagacacattcctccctctcccgcggctcggggccatactaggttagggccgcagtgcagaaggccatattgtcatgtgcagactcggatctctataattgctcccccggtcaaagtgatatgctttttacgatcagagccgcctaacatctgtacctaggcctggagaagtggcttttgcgcggactctactgacacccttggtgtctgctcataaataaccacagtacactcgaaccaccagtttccacgaaacctagccctatgtgcttgaccttataactatattagatctccaagcccttactgcccatctcggtcactaattatttttctgcaatcccccagctcctggctgcattcccctctcacacgccatacttatataaacactgcgaggctgtttgtagacctactatttatctcgtaaaactattcattgcctaccttgatcattgcttgggtttgcggctaagatggcaatcagcggccaagtgggattggaaatgaagaggaccacacaacaaaatagtgtgaaacttccacacagagcacgtccaatatctcacaagtcaccgccaatacggccgaagagtgcaggagatagatctataccaaggaaaagcaccccgccgcaactttcagacatgtcaccacggatcaactcaaagaatgagcccatagatgacgtacagagctacaatatccctaccattgcaccagtttatccattctcgcctttggtttcgagtcagtgctctccgttctccaaagaatcgtccgaagatagagaactagctcctacttctgccatacttgtgaagctagagacaggcagcgagtgtagcgacttgcctagctctcgaagagagtcgctgaaacgtaaattcaacgacgaggacgataacgatgacaagtacgaggatgaagaggatgaagaggacgaagaggacaaagaggataacatcgaggacgacgatgaggatgacggcactcatgtcagcgccaaatcaatccaactgcctggtctccaaagtcttctaagctcaattagccccgaaaattctggttatgctcgtggggctgagacgttacgaactcctagctctagtcctgaaccgaacagcaactacgtcttctcgagatatcccagttcattcctgacggatgacccaatcacggagaagctcaactacctccgcagacaagacgaacctaagtacccgctaccatttcggcaaactcaagacagggagcggcgcgaaccactgccgttgctagaagggttgtgtgaacctcgtccagctattctcacagatagcataggcgggaagcctcctttcactcgcgtttacaactacgctcagccacagaccccgctgtcatataactatgtcagccgtccatgcctccaaagaccctcgccacctcgagagatggttaggaaaccgcgctccaagaagaaggagccacactgcaatctcaagtacttcgttgaggagacagactacatacgataccaaagaatagattttggacagggttggccaactgttcatcaattgttccacgacaagtatccgatgaaagatatcgtcaggaacccccaaggacttcaaggtgtaaactacagggagaacaaatatcttcctacgctggtgggcacgaccaacgagctagtatttatggacaacggacacgtaaaaccctgtgaggtcaagacacgacaacagaaggagaatgcgcatctatacacactcatttacctgtttccggagcgcgctattaattatccatggatcctaccgagggatcgtcaacgcgcgttagaactacacgaggaccgtcagagacagaaagctctcgctcgagacaaggcattggaacgtggaacttatgtcgagccaggccgattgaagccggggacctgcggctgctgcccaaagcaggatcggaaaaaagacattgccaaacgtattgtgcccttcagcaagaaacagaagctcgttatggccaagttatgatcatctgcttgaaatacgagcaagaagacttattgatcttcaaatcgggcaggagtcacagatatcttgccttgttttttttcccctgtctcgcacttggtcttcgttacccagcttcttttgatattgataccctttttttgttttattttgaaatgttttctcgctcccttttttttagtgtttgggatgaatcaatgagattattggactgatggatcaaaagataatggattatgagatgctatgcttggagtactgtaggactagaactgggttttgctgtggtgtttctgcgctgtatacgcttcaaatttgtgaaaaccgttatctactattctattctctacactacaccgactttctttatgactacactcttcttcttgcatctttccttcacctcatttttcagggttgatccttccattgctccataccgcctatgcggtacacagcgacataatgtatcatacctgcaagttgatattagtagggatatggggtggcagttttgttgcaaaaatcagtgcggcgaacaacaagctttcggaaggtaacgaagcctgccacacaaataaggagtattgcaattatgcctacggactacgaatgggacgagaactacggggacatgaactagacgagcattgggcatttacagcgagcggaatggtgattctcccttcatagtactcaaagaagaactctagaggcattttaagtcggttatctgtatttggcagcacgagaatactacattcacgtccacaatccacgagggatctaagctttcctgcccccaatgtgacactatgtgatgcgactctagcactcgtttagctgtccattcgacgcatgtacacttcagagaaggaattctgtgccccaaacttctcaccaagggaaacaagagaagaattcttgggcgaccgtaggacctcatgtaacccacccacatgtcttgatgcagcgacgggcatgctgcttgaaaaggaggcattgcagaatttcatgaaactgggactggggaaccaacagctactcggcaatacgtctgattcgtcacccgagcggttgggttaagctttaatgaaatgagtgtggcctcatcgctaggcaattccatgcaactgtacgctccctcatggctgcctgagtacatgtacgaggatatatatgtagtcaaaaccttacacggcaggaaaaagtgtggcagcgagacagtgtcggtgcgatgacatcggtctgcaacctgcaagcgagcgttgcagcgcgtgcgatcctagccatctaggtgagagaccgtggtatgacagaccacagactaaatgggacgaaaattgcttggcggtactttcaccaacatgcatgatgttggagtgtgactggattccttatcacatactgcccttgtttatttttggggtcgtccatttcacgctaaggtgaggatttgcgagactggaatgcggtcaagatcttcaatcagagatcaccagaaaaagatgagggtagcattgtggcctcggagggtgccaatggatcaaccccaagtccagagcttgttggcagtagagctgcagaaatgggttgccctgcacagggtcgcagcccaacggtcagtcgttgcataaatgacttggggagccaggaacaaacgaaaccaacagatagctccatctcccctctcggcacgctcggggggctccaattagcctggcccgagattgtttgcctcttctccgccccgagctccttgtcataggaaacaaaggaccatgcttcgagccgagatgacattcttctcagctttgatagccagtcccgacccgttccatgccctcggtatggcggcagtgtttctgattcagccacgcatcaaggtcgctcaaccaacaaatacgtttcaaaattatacccggttggacacagaagcgcgacataaggcaggtcaatccattctttcgggtttaccgcgcggttggcttctagctcccttttcttttatggcaaacttgcagaaactacatgctcttatattctacagtgcccttggatgcagagcattcacgatcacgctaagcattacaaggctgagtttaaactcttctctttgtttagctctagtgtccacttgcagaatgtctgtatgcagatcatctgttgtggctgatcacacagggtagaataatggggtacacatcatgtacctggggctgtagacaaatgaaccaagttcctgtacggccagctgcctcagctcaagcttgcgctcctcgtgctctcgcgaggacccccagtgaagacgtctatagatgcctactcttgagcccactacgcccaatgtgggttctaaagccgccctcctcgtcttcatcactatcaaacagcttgtcgctatcatcatcaaccatgtcatactcttccagatctgacgcattgccgttccggaaagtataggggttctggccgaactcatcgtccgaagccacttcctcatcggggtagtctgccgtgtagtagttctcggctaataactgtcagttagctgtggcgtatgcgatttgaggtagcttggaggtctacttaccgttttcgtcctcatcatcctcagcccactcgtcatcgctgtcgacatctgcgccgtaaaaatactcgatgtcgggttcctggtcaaataccaagagcccgacactctggggagggacgtggtcgcccatggtagcggcgggtacgcgaacgtaggtttcgatgatgtaatcatcatcgctgtcgctattctcggcagcggccccggcatctgccatctgcttgtccccgttgtccccattgtctgcagagccctgcgcctctttggggtggcgctcagcgtaccgttttgccggagctttgggtttaaatttgagcttcgaaggggtgctatcgagtcttctttgctcatgttcttcctgctcggctcttgctcgctcacgtttctggtcttcctcttgggacttttggatgttgagccctatctgctgaaatgcgtatgcctccatatcggctgtgagcttgtccatgtctacgttccaacggtctgtcatggacttggggagttgacgcttggtagagctatctctggacgcaagctttgctacgcccggtttcttcagcttccgaggctctggcctgtccagctccatgtcttgtgtgacttgaacctgtactgacgcaggcgggagcgcaggacttggggagttggaggcggcgtggaacttttggagagtcctggaggagatgcgcttgattctgcgctctacaaatagagtggtaccggcgcgctttctggagccgatgccacgtcgcagatcggatgaggatgagcttaaaccgatatcctggcgtgacatgtggaatttccggggctcatgggcgggatcggaggggatggtgccatctgcactgccgtcgatagcgtgcttcgttgctgcagcatcttgcttgacatgttgatcttgttgttcgggttgcggcttgggctgaggcttcttaggttggaggggagaagaggtatggatgatgggcctctggtgttgaataggaatggtctgggcaaaggttgcatcttggtcgtgacgctggcgctggtagacaaagacctcgcttctgtgccgcttgctctcttggacacctgtcacagcttcagtcagcctgtcacaaacaaagatgggctggggagacaggagagggcgtctcacgaaggtaggagacaggtgcctcttccgtcgccttgcgcttcacgcggatgagttgcggtggcaccgacatgacgggcacccgtcgccggtgaggcgtctttgtgtgtctacggcgacagacagagacgcaatgcctgcgatgaccctcccttcgctgaacgtagcccaggtaggtgggttgttgcaacttgtgctgtgggcggcgatgaggttatcacctgcagggtttcacagtctcccgctagtgagcccttgcggtacctggaatagaaagcacattgggtgcacttacatcgccgtcaagcgggtcactgccagtgcagggaccacggtccctcactagcctgttcactagctcccctgccccgcatctcggaacttacctctgctgtcatctcatctcttcatcagacggctcggcattcaatgcttgcaaccctacctactccattgtatattatatctcctgttcttatcagatatttaacagttgtcactgcttgatgctcttgaacatatcttggcaatctgtaatcctctggatctagtaaatccgcaattgaaccacaatgacatgacttaaaatcaacgaaccctcgggatgtcacgatatgttcccaagaggttggctctcatgagagaactcggagctggagtttcttcatttttgacttcgaaccgtgcaagttatttaaggtatctcgagtcaggtcttgcatttctgtaactg

SEQ ID NO: 7267 - DNA, 261 bp, Muscodor strobelii
  misc_feature: SGI cDNA ID NO. 562181
  misc_feature: Elevated expression when VOC is produced
  misc_feature: Encodes the peptide sequence at SEQ ID NO 7268
aaacgtcaccatgccggcaagactggtggcggtaatgcgaatgggcaaaacgctgctgcttgcgcgggtgcccagaacaacaagcgcgatgagattgaggtccgtcatcacgccggcaaaactggtggcaacaacaacgcaaacaatgcgaacaacgcaaacaacaatgctgctcaggcttgcaatgcgaaaagacaccatgcgggtaagaaaaacggcaataacaacaacaacgctgctgccaatgcggcttgcgcttaa

SEQ ID NO: 7268 - protein, 86 aa, Muscodor strobelii
  misc_feature: SGI Peptide ID NO. 562181
  misc_feature: Useful for introducing or modulating the production of volatile compounds
KRHHAGKTGGGNANGQNAAACAGAQNNKRDEIEVRHHAGKTGGNNNANNANNANNNAAQACNAKRHHAGKKNGNNNNNAAANAACA

SEQ ID NO: 7269 - DNA, 1413 bp, Muscodor strobelii
  misc_feature: SGI cDNA ID NO. 562182
  misc_feature: Reduced expression when VOC is produced
  misc_feature: Encodes the peptide sequence at SEQ ID NO 7270
atggcctccgccgaacagacacccatcccgagcgcccctacgcccttgccaccccgaaaattcaaagcttccgacttgcccatccccaaagccacgcgaacagcaatcgaatcccttgctcacagcttcaaaaagaagggtggttatgatacgatccgaaagcagatatgggagaagtttgagacgagcgagtacgaaaaacaggtcaccaagtctatccttgaggtagccgaacaggaggtcgagcgaaacccatcacaactcctcaccctcgaccgccgaaaggctgctgccctcatcgacggtgcccttgaccgctcgggcgtctaccagacggccgaggccctcctcgaccagctgatcgatgtcgaggccatcgaggccggcatgcgcgagctgcgcaaggccgagattggcgacgacaaggccgaggaagagcgcattcgaggcgccaagacagacgacgaatacgctgctgagtcctccaagaagctggctgagcgcgagaagctgcgccaggatatacgtgacaaagagaagcagatacacgaggaaaaactcaagattgagcgagaggagaggaaaaagcgagagcgtgagagggagcgtgaaatcgaagccgccgaagctaagcgcaaggaggaacgagacgcccgccgccgcgagcgtgagaagaaagaagacgagcggcagctggaaagggaaaaggagcgagaggaccgacggaaggctcgcgaccgggagcggcaacgcgataaggaaccagacagagacaggcataggtcgagatcaagatcacgacatcgagataggcgcgacaggagtccacggcgtgagagtcgggaacgacgccgacgtgaacgatcccctagagaagagcgagatcgcaccaaaacggaggatgtcaagaagaagcttaccaaggaggaccacgagagacttgaacgggaggcccttgctgatcttttacgagaaagcaagaaggataatagttctaagcctctcgagatggaggtcgatgaagatctcccaccgccaccgcctcggaggtcaaagccggcctccgccatacagcctatacgtcgcgatcccaccaagtcatcagatgccaagaagcctccgatacttaccaaaaccgaatcaaaagattcttctaaggatgttaaagtggctaaggagggcaaagatgtcttggacgtaaaattgtctaaagacactagagagtcgaaggagaccaaggatccactcgagcctagagaaattcgggaatccaaggacacgaagcacacaagggcaaaggatgatcggaaggctagtcccacgccattgcggcccgctcgcccggaagatctgacagaaaagataggagccggtcaaggcaccgatcagaccgccatggccgaagccggtcgc

SEQ ID NO: 7270 - protein, 471 aa, Muscodor strobelii
  misc_feature: SGI Peptide ID NO. 562182
  misc_feature (3)..(189): NCBI GI: 256731431 Blast Desc: NECHADRAFT_84876 [Nectria haematococca mpVI 77-13-4]
  misc_feature (1)..(192): NCBI GI: 39944036 Blast Desc: MGG_04029 [Magnaporthe grisea 70-15] gi|145014752|gb|EDJ99320.1| MGG_04029 [Magnaporthe grisea 70-15]
  misc_feature (10)..(189): NCBI GI: 46123463 Blast Desc: FG06109.1 [Gibberella zeae PH-1]
  misc_feature (8)..(157): NCBI GI: 116199333 Blast Desc: CHGG_07822 [Chaetomium globosum CBS 148.51] gi|88179101|gb|EAQ86569.1| CHGG_07822 [Chaetomium globosum CBS 148.51]
  misc_feature (5)..(157): NCBI GI: 85081565 Blast Desc: NCU01466 [Neurospora crassa OR74A] gi|28917819|gb|EAA27507.1| [Neurospora crassa OR74A] gi|38566831|emb|CAE76137.1| [Neurospora crassa]
  misc_feature (19)..(191): NCBI GI: 171692705 Blast Desc: protein product [Podospora anserina] gi|170946301|emb|CAP73102.1| protein product [Podospora anserina]
  misc_feature (15)..(216): NCBI GI: 156059156 Blast Desc: SS1G_03590 [Sclerotinia sclerotiorum 1980] gi|154701377|gb|EDO01116.1| SS1G_03590 [Sclerotinia sclerotiorum 1980]
  misc_feature (15)..(216): NCBI GI: 154304216 Blast Desc: BC1G_08378 [Botryotinia fuckeliana B05.10] gi|150854180|gb|EDN29372.1| BC1G_08378 [Botryotinia fuckeliana B05.10]
  misc_feature (19)..(186): NCBI GI: 115491739 Blast Desc: [Aspergillus terreus NIH2624] gi|114197357|gb|EAU39057.1| [Aspergillus terreus NIH2624]
  misc_feature (19)..(197): NCBI GI: 258570093 Blast Desc: [Uncinocarpus reesii 1704] gi|237904120|gb|EEP78521.1| [Uncinocarpus reesii 1704]
  misc_feature: Useful for introducing or modulating the production of volatile compounds
MASAEQTPIPSAPTPLPPRKFKASDLPIPKATRTAIESLAHSFKKKGGYDTIRKQIWEKFETSEYEKQVTKSILEVAEQEVERNPSQLLTLDRRKAAALIDGALDRSGVYQTAEALLDQLIDVEAIEAGMRELRKAEIGDDKAEEERIRGAKTDDEYAAESSKKLAEREKLRQDIRDKEKQIHEEKLKIEREERKKREREREREIEAAEAKRKEERDARRREREKKEDERQLEREKEREDRRKARDRERQRDKEPDRDRHRSRSRSRHRDRRDRSPRRESRERRRRERSPREERDRTKTEDVKKKLTKEDHERLEREALADLLRESKKDNSSKPLEMEVDEDLPPPPPRRSKPASAIQPIRRDPTKSSDAKKPPILTKTESKDSSKDVKVAKEGKDVLDVKLSKDTRESKETKDPLEPREIRESKDTKHTRAKDDRKASPTPLRPARPEDLTEKIGAGQGTDQTAMAEAGR

SEQ ID NO: 7271 - DNA, 2006 bp, Muscodor strobelii
  misc_feature: SGI EST ID NO. CUFF.18035.0
  misc_feature: Variant of the nucleotide sequence at SEQ ID NO 7269
cgacaaatcccatgttcagcctttcagttattcggaaatcccataaaacgtctatccgagggaaattttcgaatatggtcactgtaagtccagttgcaataaggtatggacatcgcagagtatattgtctcctcttttgatgtacatatgggagggtttgggtacagtgggacaggaaccttgtacaggcgccagacgcgatgctggggatctgcgattgcccatccatgcttgtcaattgcgatcaatcccaaattctaatttatttcccattgaatcatcctgctgtttgacatgccactcctgtgaccacaccactcaaactcctgtccttcaaatcacttttgtttgcgatttcatcgccatctcgtcttcaaatcgattttcaacgtgtcatttcaaattggcaacagcgcatgtgtatgagattgcgcacctatcatacgccaatcgcgcccccgttttaacccccttggtccaacctgcatagcacactgcgcatagctttcgtgagctgcggtcaggcctgatggccttaccgctcgtcaccatggcctccgccgaacagacacccatcccgagcgcccctacgcccttgccaccccgaaaattcaaagcttccgacttgcccatccccaaagccacgcgaacagcaatcgaatcccttgctcacagcttcaaaaagaagggtggttatgatacgatccgaaagcagatatgggagaagtttgagacgagcgagtacgaaaaacaggtcaccaagtctatccttgaggtagccgaacaggaggtcgagcgaaacccatcacaactcctcaccctcgaccgccgaaaggctgctgccctcatcgacggtgcccttgaccgctcgggcgtctaccagacggccgaggccctcctcgaccagctgatcgatgtcgaggccatcgaggccggcatgcgcgagctgcgcaaggccgagattggcgacgacaaggccgaggaagagcgcattcgaggcgccaagacagacgacgaatacgctgctgagtcctccaagaagctggctgagcgcgagaagctgcgccaggatatacgtgacaaagagaagcagatacacgaggaaaaactcaagattgagcgagaggagaggaaaaagcgagagcgtgagagggagcgtgaaatcgaagccgccgaagctaagcgcaaggaggaacgagacgcccgccgccgcgagcgtgagaagaaagaagacgagcggcagctggaaagggaaaaggagcgagaggaccgacggaaggctcgcgaccgggagcggcaacgcgataaggaaccagacagagacaggcataggtcgagatcaagatcacgacatcgagataggcgcgacaggagtccacggcgtgagagtcgggaacgacgccgacgtgaacgatcccctagagaagagcgagatcgcaccaaaacggaggatgtcaagaagaagcttaccaaggaggaccacgagagacttgaacgggaggcccttgctgatcttttacgagaaagcaagaaggataatagttctaagcctctcgagatggaggtcgatgaagatctcccaccgccaccgcctcggaggtcaaagccggcctccgccatacagcctatacgtcgcgatcccaccaagtcatcagatgccaagaagcctccgatacttaccaaaaccgaatcaaaagattcttctaaggatgttaaagtggctaaggagggcaaagatgtcttggacgtaaaattgtctaaagacactagagagtcgaaggagaccaaggatccactcgagcctagagaaattcgggaatccaaggacacgaagcacacaagggcaaaggatgatcggaaggctagtcccacgccattgcggcgtcatcgcgaaagatctcgtagtgccgagactgatcgcagacatcgcgaccgagctaaggagcgcagccgctcgcccggaagatctgacagaaaagataggagccggtcaaggcaccgatcag

SEQ ID NO: 7272 - DNA, 258 bp, Muscodor strobelii
  misc_feature: SGI cDNA ID NO. 562183
  misc_feature: Encodes the peptide sequence at SEQ ID NO 7273
atggtccacagagtcctcttctggggcggcttcggtgtcgctgtccgcgtctggcagctcggcctcgaaatgcggcccctcttcaaccgcggctccctctgggcctaccccgtcttcgctgccaccggcgcaagcttcggatactggctgcagggcgtggacgagcggcagaccgccatgttggctgagcgcaagcagaccatcctcgacaagcgcgccaggaaagctgaacgagatgccgccaaggccgaggcatga

SEQ ID NO: 7273 - protein, 85 aa, Muscodor strobelii
  misc_feature: SGI Peptide ID NO. 562183
  misc_feature (2)..(82): NCBI GI: 238841266 Blast Desc: NADH:ubiquinone oxidoreductase kD subunit [Microsporum canis CBS 113480]
  misc_feature (2)..(85): NCBI GI: 46123439 Blast Desc: FG06097.1 [Gibberella zeae PH-1]
  misc_feature (2)..(81): NCBI GI: 225682877 Blast Desc: NADH:ubiquinone oxidoreductase 10.4kD subunit [Paracoccidioides brasiliensis Pb03]
  misc_feature (2)..(81): NCBI GI: 226285389 Blast Desc: NADH2 dehydrogenase 14K chain [Paracoccidioides brasiliensis Pb01]
  misc_feature (2)..(81): NCBI GI: 226290326 Blast Desc: NADH:ubiquinone oxidoreductase 10.4kD subunit [Paracoccidioides brasiliensis Pb18]
  misc_feature (1)..(85): NCBI GI: 156059154 Blast Desc: SS1G_03589 [Sclerotinia sclerotiorum 1980] gi|154701376|gb|EDO01115.1| SS1G_03589 [Sclerotinia sclerotiorum 1980]
  misc_feature (2)..(85): NCBI GI: 261187808 Blast Desc: NADH-ubiquinone oxidoreductase 14 kDa subunit [Ajellomyces dermatitidis SLH14081] gi|239593535|gb|EEQ76116.1| NADH-ubiquinone oxidoreductase 14 kDa subunit [Ajellomyces 14 kDa
  misc_feature (2)..(85): NCBI GI: 154281085 Blast Desc: [Ajellomyces capsulatus NAm1] gi|150411534|gb|EDN06922.1| [Ajellomyces capsulatus NAm1] gi|225559603|gb|EEH07885.1| NADH-ubiquinone oxidoreductase kD
  misc_feature (1)..(84): NCBI GI: 85081569 Blast Desc: NADH:ubiquinone oxidoreductase 10.4kD subunit [Neurospora crassa OR74A] gi|28917820|gb|EAA27508.1| NADH:ubiquinone oxidoreductase 10.4kD subunit [Neurospora crassa
  misc_feature (1)..(80): NCBI GI: 261359010 Blast Desc: NADH2 dehydrogenase 14K chain [Verticillium albo-atrum VaMs.102]
MVHRVLFWGGFGVAVRVWQLGLEMRPLFNRGSLWAYPVFAATGASFGYWLQGVDERQTAMLAERKQTILDKRARKAERDAAKAEA

SEQ ID NO: 7274 - DNA, 2838 bp, Muscodor strobelii
  misc_feature: SGI EST ID NO. CUFF.18189.0
  misc_feature: Variant of the nucleotide sequence at SEQ ID NO 7272
gcttgccactggcttgaatggacgccagtattgcagctagcttcgctggtgcacgagccacccctgcgaccattggcggatcggcagcatctaggttaggtcctcacttttggcacttcaactcatccgtctgccgcacgtcgaccacactcgagctgttgcatcctccgctgataccgacgtccacccatttctcgacaactcgcgacctgcccgtcacctgggtcacttcattcctctcgccttcgaggcagctctcccctcacatccgccacaatggtccacagagtcctcttctggggcggcttcggtgtcgctgtccgcgtctggcagctcggcctcgaaatgcggcccctcttcaaccgcggctccctctgggcctaccccgtcttcgctgccaccggcgcaagcttcggatactggctgcagggcgtggacgagcggcagaccgccatgttggctgagcgcaagcagaccatcctcgacaagcgcgccaggaaagctgaacgagatgccgccaaggccgaggcatgattagggggtcaagactagagattatatcaccttgtacatgagaaaaaactacctagagaggatgctgggcaacggagcctggcatgatgagacaccatcgactacggcatatagaggccaattgttcaaataacagttctttttttgtccggcagtctcgttttgacgactcttcatgagactactcatgaacgttaagttccgaatgaggacctgtcttaagacttgtttctatcatcgcagagactaacattgtttgtctacttacggataggattgacgttatatcttgataaagccatgagtattcaactccttattttaataacgagcaaatgttctttggagactttggatgggcgattccctcctaaattgcttttttcttccaagctacacatctctattcctagcctatgataggtgatattgatagtgacctgatttgaaacgctgagagtctcttatcttgcatctgccatgtcgttgagctactacttccgggtgcaatgatctttggttgaaatcacttaatggtcgattcgctgcccaatggttcttcctcgctcatcttccactgctcatcttccaattccatctccttggcagggtgaagtcgacctcatggcacgcagtgagggctccactcctagttggaatcctcaagtttgcgcagtaagaacgacaccgatgtcgcatcaacatcggcaacgtctgtgatgatcgtcgtgaggtacttgctagatgtcgtgtcgtacagcagcctgaatgccgcactggtgctcaactcggggtcgatctcgttatacgtgagagaatctgtcgatactctctccgtgatgttgatcgattccgacagtacgaagacttgtttgcctagatcatgggctgcgattgcaacgtcgctagtaccagctcggccatatagagcaccgttgctgaatacggcttcggcaccaagtaacacccagtccgcacgctccaattgccaccgtaggccgctgaagtcgccactatatgaaacctctactccctccgtcaacaaggtcctggtaagagtctggcctctcgggtcaaacgggtcgtcgacaacgatgacactgaacttcttgccggccaccgaatgggcatgaagcagggtcctctcgaccaagctattccgcccatacactaggatactatctccatctgtgatgcctgcagcggccttgctgatgatctcgatgtccgccatcgtaatgcgctcctggatgaacgtgtctatgctggcgcatagctgcttctttgcgtcggcttcggcgacgtcggggtcgattttgctcacttgcagcttcagccagcgaatggcattccccatcgaaaagcacatcgggcggcaagcgctcaagtactcgatctgtgggttaagaacgtgaggggtgagatgtcgagcaagggtgttgcccgctggtgtgatatacgcatcgataacctagctagtatgtgagtagatctggccaagaagtactcgcacgttgcgctcaccttcttgaaggcgaggagcgtggcctgtaacctgatgatgctgtcgtcgatctcaaaagtagacatctgctgccccagagccaagatggtggggttaacgtccttgtcggcgtgagtgtatggcaacctcttggccatagagagatgactgaagcattctggtatgatgatctttggctcggctggggcggcgggtgcttttgacactggcgcacgccctgatgcgccagcgccggcggcttgggctccatccggctttccttttgccttgttggccttgccgtccggaactggaggccctgaagtcgtaggcgcagaggctgccgcaggctgggcgacatctttggcctgtttcgcttgagctctccgggcctgcttctctgccttggcttgtgccttcagttgtgcgttggtgagcttgggggcggccggcggagcagcattctcgccattcgtggtctgcgatgcgtctgcgggagttgtctgagtgtttttctgaggtttcgcgtccgacggagcaccgtcggcggcggttgacatggtcacgggcagccgtgtgccgtgagagcaggagggtaagatcttcctttcgcgtgcagatgtctcaaatgagaggatggaggggctaactcaatgtgtggacgacgtggtaagtagcctggcgcgattctcgatgcgtaggataataaatgctggagtcggccagagaatcgtatgaagccgtttttctagaggatgcaccgtaactctggtatttttggacgttgtactaggtagttg

SEQ ID NO: 7275 - DNA, 1362 bp, Muscodor strobelii
  misc_feature: SGI cDNA ID NO. 562184
  misc_feature: Encodes the peptide sequence at SEQ ID NO 7276
atgtcaaccgccgccgacggtgctccgtcggacgcgaaacctcagaaaaacactcagacaactcccgcagacgcatcgcagaccacgaatggcgagaatgctgctccgccggccgcccccaagctcaccaacgcacaactgaaggcacaagccaaggcagagaagcaggcccggagagctcaagcgaaacaggccaaagatgtcgcccagcctgcggcagcctctgcgcctacgacttcagggcctccagttccggacggcaaggccaacaaggcaaaaggaaagccggatggagcccaagccgccggcgctggcgcatcagggcgtgcgccagtgtcaaaagcacccgccgccccagccgagccaaagatcatcataccagaatgcttcagtcatctctctatggccaagaggttgccatacactcacgccgacaaggacgttaaccccaccatcttggctctggggcagcagatgtctacttttgagatcgacgacagcatcatcaggttacaggccacgctcctcgccttcaagaaggttatcgatgcgtatatcacaccagcgggcaacacccttgctcgacatctcacccctcacgttcttaacccacagatcgagtacttgagcgcttgccgcccgatgtgcttttcgatggggaatgccattcgctggctgaagctgcaagtgagcaaaatcgaccccgacgtcgccgaagccgacgcaaagaagcagctatgcgccagcatagacacgttcatccaggagcgcattacgatggcggacatcgagatcatcagcaaggccgctgcaggcatcacagatggagatagtatcctagtgtatgggcggaatagcttggtcgagaggaccctgcttcatgcccattcggtggccggcaagaagttcagtgtcatcgttgtcgacgacccgtttgacccgagaggccagactcttaccaggaccttgttgacggagggagtagaggtttcatatagtggcgacttcagcggcctacggtggcaattggagcgtgcggactgggtgttacttggtgccgaagccgtattcagcaacggtgctctatatggccgagctggtactagcgacgttgcaatcgcagcccatgatctaggcaaacaagtcttcgtactgtcggaatcgatcaacatcacggagagagtatcgacagattctctcacgtataacgagatcgaccccgagttgagcaccagtgcggcattcaggctgctgtacgacacgacatctagcaagtacctcacgacgatcatcacagacgttgccgatgttgatgcgacatcggtgtcgttcttactgcgcaaacttgaggattccaactag

SEQ ID NO: 7276 - protein, 453 aa, Muscodor strobelii
  misc_feature: SGI Peptide ID NO. 562184
  misc_feature (163)..(439): Pfam Id: PF01008 Pfam Desc: Initiation factor 2 subunit family
  misc_feature (173)..(407): Pfam Id: PF01008 Pfam Desc: Initiation factor 2 subunit family
  misc_feature (1)..(451): NCBI GI: 46123437 Blast Desc: FG06096.1 [Gibberella zeae PH-1]
  misc_feature (126)..(451): NCBI GI: 261359009 Blast Desc: translation initiation factor eIF-2B subunit delta [Verticillium albo-atrum VaMs.102]
  misc_feature (135)..(451): NCBI GI: 256731033 Blast Desc: NECHADRAFT_63657 [Nectria haematococca mpVI 77-13-4]
  misc_feature (1)..(451): NCBI GI: 116199337 Blast Desc: CHGG_07824 [Chaetomium globosum CBS 148.51] gi|88179103|gb|EAQ86571.1| CHGG_07824 [Chaetomium globosum CBS 148.51]
  misc_feature (97)..(451): NCBI GI: 85081573 Blast Desc: NCU01468 [Neurospora crassa OR74A] gi|28917821|gb|EAA27509.1| [Neurospora crassa OR74A] gi|38566833|emb|CAE76139.1| related to translation initiation
  misc_feature (88)..(451): NCBI GI: 171692701 Blast Desc: protein product [Podospora anserina] gi|170946299|emb|CAP73100.1| protein product [Podospora anserina]
  misc_feature (72)..(453): NCBI GI: 39944032 Blast Desc: MGG_04027 [Magnaporthe grisea 70-15] gi|145014750|gb|EDJ99318.1| MGG_04027 [Magnaporthe grisea 70-15]
  misc_feature (2)..(452): NCBI GI: 154304220 Blast Desc: BC1G_08380 [Botryotinia fuckeliana B05.10] gi|150854182|gb|EDN29374.1| BC1G_08380 [Botryotinia fuckeliana B05.10]
  misc_feature (61)..(452): NCBI GI: 156059152 Blast Desc: SS1G_03588 [Sclerotinia sclerotiorum 1980] gi|154701375|gb|EDO01114.1| SS1G_03588 [Sclerotinia sclerotiorum 1980]
  misc_feature (25)..(447): NCBI GI: 189199818 Blast Desc: translation initiation factor eIF-2B subunit delta [Pyrenophora tritici-repentis Pt-1C-BFP] gi|187983345|gb|EDU48833.1| translation initiation factor eIF-2B
MSTAADGAPSDAKPQKNTQTTPADASQTTNGENAAPPAAPKLTNAQLKAQAKAEKQARRAQAKQAKDVAQPAAASAPTTSGPPVPDGKANKAKGKPDGAQAAGAGASGRAPVSKAPAAPAEPKIIIPECFSHLSMAKRLPYTHADKDVNPTILALGQQMSTFEIDDSIIRLQATLLAFKKVIDAYITPAGNTLARHLTPHVLNPQIEYLSACRPMCFSMGNAIRWLKLQVSKIDPDVAEADAKKQLCASIDTFIQERITMADIEIISKAAAGITDGDSILVYGRNSLVERTLLHAHSVAGKKFSVIVVDDPFDPRGQTLTRTLLTEGVEVSYSGDFSGLRWQLERADWVLLGAEAVFSNGALYGRAGTSDVAIAAHDLGKQVFVLSESINITERVSTDSLTYNEIDPELSTSAAFRLLYDTTSSKYLTTIITDVADVDATSVSFLLRKLEDSN

SEQ ID NO: 7277 - DNA, 2881 bp, Muscodor strobelii
  misc_feature: SGI EST ID NO. CUFF.18190.1
  misc_feature: Variant of the nucleotide sequence at SEQ ID NO 7275
caactacctagtacaacgtccaaaaataccagagttacggtgcatcctctagaaaaacggcttcatacgattctctggccgactccagcatttattatcctacgcatcgagaatcgcgccaggctacttaccacgtcgtccacacattgagttagcccctccatcctctcatttgagacatctgcacgcgaaaggaagatcttaccctcctgctctcacggcacacggctgcccgtgaccatgtcaaccgccgccgacggtgctccgtcggacgcgaaacctcagaaaaacactcagacaactcccgcagacgcatcgcagaccacgaatggcgagaatgctgctccgccggccgcccccaagctcaccaacgcacaactgaaggcacaagccaaggcagagaagcaggcccggagagctcaagcgaaacaggccaaagatgtcgcccagcctgcggcagcctctgcgcctacgacttcagggcctccagttccggacggcaaggccaacaaggcaaaaggaaagccggatggagcccaagccgccggcgctggcgcatcagggcgtgcgccagtgtcaaaagcacccgccgccccagccgagccaaagatcatcataccagaatgcttcagtcatctctctatggccaagaggttgccatacactcacgccgacaaggacgttaaccccaccatcttggctctggggcagcagatgtctacttttgagatcgacgacagcatcatcaggttacaggccacgctcctcgccttcaagaaggttatcgatgcgtatatcacaccagcgggcaacacccttgctcgacatctcacccctcacgttcttaacccacagatcgagtacttgagcgcttgccgcccgatgtgcttttcgatggggaatgccattcgctggctgaagctgcaagtgagcaaaatcgaccccgacgtcgccgaagccgacgcaaagaagcagctatgcgccagcatagacacgttcatccaggagcgcattacgatggcggacatcgagatcatcagcaaggccgctgcaggcatcacagatggagatagtatcctagtgtatgggcggaatagcttggtcgagaggaccctgcttcatgcccattcggtggccggcaagaagttcagtgtcatcgttgtcgacgacccgtttgacccgagaggccagactcttaccaggaccttgttgacggagggagtagaggtttcatatagtggcgacttcagcggcctacggtggcaattggagcgtgcggactgggtgttacttggtgccgaagccgtattcagcaacggtgctctatatggccgagctggtactagcgacgttgcaatcgcagcccatgatctaggcaaacaagtcttcgtactgtcggaatcgatcaacatcacggagagagtatcgacagattctctcacgtataacgagatcgaccccgagttgagcaccagtgcggcattcaggctgctgtacgacacgacatctagcaagtacctcacgacgatcatcacagacgttgccgatgttgatgcgacatcggtgtcgttcttactgcgcaaacttgaggattccaactaggagtggagccctcactgcgtgccatgaggtcgacttcaccctgccaaggagatggaattggaagatgagcagtggaagatgagcgaggaagaaccattgggcagcgaatcgaccattaagtgatttcaaccaaagatcattgcacccggaagtagtagctcaacgacatggcagatgcaagataagagactctcagcgtttcaaatcaggtcactatcaatatcacctatcataggctaggaatagagatgtgtagcttggaagaaaaaagcaatttaggagggaatcgcccatccaaagtctccaaagaacatttgctcgttattaaaataaggagttgaatactcatggctttatcaagatataacgtcaatcctatccgtaagtagacaaacaatgttagtctctgcgatgatagaaacaagtcttaagacaggtcctcattcggaacttaacgttcatgagtagtctcatgaagagtcgtcaaaacgagactgccggacaaaaaaagaactgttatttgaacaattggcctctatatgccgtagtcgatggtgtctcatcatgccaggctccgttgcccagcatcctctctaggtagttttttctcatgtacaaggtgatataatctctagtcttgaccccctaatcatgcctcggccttggcggcatctcgttcagctttcctggcgcgcttgtcgaggatggtctgcttgcgctcagccaacatggcggtctgccgctcgtccacgccctgcagccagtatccgaagcttgcgccggtggcagcgaagacggggtaggcccagagggagccgcggttgaagaggggccgcatttcgaggccgagctgccagacgcggacagcgacacctggagaaccttgttagtgatagccttgagcagccagagcggcattggagctgtagaaggacgttgggtgttgtatgtagagctggagagtcgtaccgaagccgccccagaagaggactctgtggaccattgtggcggatgtgaggggagagctgcctcgaaggcgagaggaatgaagtgacccaggtgacgggcaggtcgcgagttgtcgagaaatgggtggacgtcggtatcagcggaggatgcaacagctcgagtgtggtcgacgtgcggcagacggatgagttgaagtgccaaaagtgaggacctaacctagatgctgccgatccgccaatggtcgcaggggtggctcgtgcaccagcgaagctagctgcaatactggcgtccattcaagccagtggcaagc

SEQ ID NO: 7278 - DNA, 510 bp, Muscodor strobelii
  misc_feature: SGI cDNA ID NO. 562185
  misc_feature: Encodes the peptide sequence at SEQ ID NO 7279
atgaatgcgcttcgttatgctttaccctacctggggacggtgacagcatgcaacgtggaggctctcatggctacacctgtacagctctcttttcctctgccttatgggatggaaacaaagatacacatgcgcttgaaggtccaacccaaggccatcctcctctttctcacaaccgtcgctgctgaggattcgggcaaaccagctccaatgggctctttcgtttattcgctgccagataaatacaacaccagccaaccattggcaaccaccatctactcagctgaagcaacgctggagtttactaccaggctcgccaagattctggccaagaagactcagatgccggtatacgtgggtaattccatcagttttgccaacacggggttgggtggcaccatggaggaggagatggaggctttcaagcaggtcactgcagttgccctggacaagctgcagccgatcatccagagagtgaatgcacaacccaacggcacaacggatacagaataa

SEQ ID NO: 7279 - protein, 169 aa, Muscodor strobelii
  misc_feature: SGI Peptide ID NO. 562185
  misc_feature (23)..(164): NCBI GI: 85103203 Blast Desc: NCU03691 [Neurospora crassa OR74A] gi|16944561|emb|CAD11348.1| [Neurospora crassa] gi|28923013|gb|EAA32231.1| conserved [Neurospora crassa OR74A]
  misc_feature (23)..(153): NCBI GI: 256728505 Blast Desc: NECHADRAFT_50928 [Nectria haematococca mpVI 77-13-4]
  misc_feature (22)..(152): NCBI GI: 46109946 Blast Desc: FG01855.1 [Gibberella zeae PH-1]
  misc_feature (26)..(152): NCBI GI: 156051204 Blast Desc: SS1G_07009 [Sclerotinia sclerotiorum 1980] gi|154704787|gb|EDO04526.1| SS1G_07009 [Sclerotinia sclerotiorum 1980]
  misc_feature (29)..(167): NCBI GI: 171692371 Blast Desc: protein product [Podospora anserina] gi|170946134|emb|CAP72935.1| protein product [Podospora anserina]
  misc_feature (27)..(152): NCBI GI: 154299222 Blast Desc: BC1G_11789 [Botryotinia fuckeliana B05.10] gi|150857492|gb|EDN32684.1| BC1G_11789 [Botryotinia fuckeliana B05.10]
  misc_feature (19)..(156): NCBI GI: 261360886 Blast Desc: conserved [Verticillium albo-atrum VaMs.102]
  misc_feature (28)..(143): NCBI GI: 39957965 Blast Desc: MGG_09216 [Magnaporthe grisea 70-15] gi|145013346|gb|EDJ97987.1| MGG_09216 [Magnaporthe grisea 70-15]
  misc_feature (26)..(152): NCBI GI: 189208810 Blast Desc: conserved [Pyrenophora tritici-repentis Pt-1C-BFP] gi|187976831|gb|EDU43457.1| conserved [Pyrenophora tritici-repentis Pt-1C-BFP]
  misc_feature (26)..(152): NCBI GI: 169599014 Blast Desc: SNOG_02320 [Phaeosphaeria nodorum SN15] gi|111069412|gb|EAT90532.1| SNOG_02320 [Phaeosphaeria nodorum SN15]
MNALRYALPYLGTVTACNVEALMATPVQLSFPLPYGMETKIHMRLKVQPKAILLFLTTVAAEDSGKPAPMGSFVYSLPDKYNTSQPLATTIYSAEATLEFTTRLAKILAKKTQMPVYVGNSISFANTGLGGTMEEEMEAFKQVTAVALDKLQPIIQRVNAQPNGTTDTE

SEQ ID NO: 7280 - DNA, 1133 bp, Muscodor strobelii
  misc_feature: SGI EST ID NO. CUFF.18038.0
  misc_feature: Variant of the nucleotide sequence at SEQ ID NO 7278
gttggttgctttctcttcaatctgcatgcactgattacatgtcatgtcatccatcttggaccaactccagatgttgccgttctgaataagagaacacacgcatttcagttaaaacgcctccagacctcacctgcattcaacattatgaatgcgcttcgttatgctttaccctacctggggacggtgacagcatgcaacgtggaggctctcatggctacacctgtacagctctcttttcctctgccttatgggatggaaacaaagatacacatgcgcttgaaggtccaacccaaggccatcctcctctttctcacaaccgtcgctgctgaggattcgggcaaaccagctccaatgggctctttcgtttattcgctgccagataaatacaacaccagccaaccattggcaaccaccatctactcagctgaagcaacgctggagtttactaccaggctcgccaagattctggccaagaagactcagatgccggtatacgtgggtaattccatcagttttgccaacacggggttgggtggcaccatggaggaggagatggaggctttcaagcaggtcactgcagttgccctggacaagctgcagccgatcatccagagagtgaatgcacaacccaacggcacaacggatacagaataaataaaggcataacactatttcttcttcgtgcgtggccacgtgttttctctcccttatgcttatacaagtatggctgaagatgaattttgtgatcagtattgacaatatttagctagtgggggtttgtgcaactctgaacaactcttgaaaactactatcttgtgtttattatatattcagtcgtccaaaattcgaggccacaatagatgagatacttgttgggaaattgtagagacctacctttggtagggatgtaggtacgtgagtgtttgctaaggctgacatttcgatattatattgtctcagagctttgcgccaaatgacatgcgtcttggagagttccggttacggagcatcatgggcactgatacaggatgttgacttgaaataaaaagatcgggttgcaatcatataattaattccctagcagtaaagtagacgctgcttggctattactgctgtgggaggtaaaaattgaa

SEQ ID NO: 7281 - DNA, 1329 bp, Muscodor strobelii
  misc_feature: SGI cDNA ID NO. 562186
  misc_feature: Encodes the peptide sequence at SEQ ID NO 7282
atggcagaagaatgggccggagttgaggcatcgatggaggaccccgaagagacaaatgtgatttactgttctctagactcattcagtcgatatgccaagacagcccatttcaactgcacacatcttcgccgacaggctttctatgctttgccccaagcacactggcagatgctcgctgggcccccctttcactatcttgatactctgaaccgtgtagacgctgcaatcgagggcaatgccgaccttgctcgcagcattgtcaaatgcggtctacactcttttggtatggtggatgcaaacaatgaacctgtgatgccggaagactggatcggagttgcaaaggtcaatgacttggacaaggcccgcagcacaattcggcaattctaccgtgattggtctgccgaaggtagcatagagagggacgcgtgctatggtccagtcttccgagctcttgagaaagaaagagccccaaagatgatgaatgctatgctgaagcagcaaagagatctccaggatgtcacagaagtacaaccgctgacacgcaagattgcgcccctcaaagttcttgttcccggtgcaggacttggccgtctcgtattcgatctctgtcgtcttggatatgatgccgagggtaatgagatctcataccatcagcttcttgcttcatcatacattttgaactcctgtaaggaagcaggtcagcacaccatctatccctggatacattccttctccaaccatcggacccgcgagactcaattcaagagctacaaggtccctgatatccatccagcaacaacccttgcagctaccgaaggcaaaggatcgatgcagatgtgcgctgcagactttctatgtctgtacggagacgatgagcaccaagacacctatgatgcggtcgcagctatattcttcatcgacacggcacccaacctaattcgctatcttgaagtcatcaggagatgtcttaagcccggcggcattctcataaatgtcggccccttgctttggcattgggaaaaccacgtaccgggacactctggctacgatggagatgataaccacgacgagaataattcgctaggaatcggagatccgggcaatttcgagctcacagaagatgaagttctcgcactggtcacgaacatgggtttcacaattgagcatttcgagtctggcatagaggcaccttacatacaagatcctcagagtatgctacacatggaatatcgtgccagtcactggatagcacgaaagctggacaccaggatccaggttacccaagataacacccagcaggagacgaatatggtgccaacggagcagtaa

SEQ ID NO: 7282 - protein, 442 aa, Muscodor strobelii
  misc_feature: SGI Peptide ID NO. 562186
  misc_feature (107)..(421): Pfam Id: PF07942 Pfam Desc: N2227-like protein
  misc_feature (290)..(329): Pfam Id: PF08242 Pfam Desc: Methyltransferase domain
  misc_feature (187)..(421): Pfam Id: PF07942 Pfam Desc: N2227-like protein
  misc_feature (107)..(153): Pfam Id: PF07942 Pfam Desc: N2227-like protein
  misc_feature (5)..(419): NCBI GI: 46109948 Blast Desc: FG01856.1 [Gibberella zeae PH-1]
  misc_feature (5)..(419): NCBI GI: 256728678 Blast Desc: [Nectria haematococca mpVI 77-13-4]
  misc_feature (5)..(419): NCBI GI: 116198319 Blast Desc: CHGG_07315 [Chaetomium globosum CBS 148.51] gi|88178594|gb|EAQ86062.1| CHGG_07315 [Chaetomium globosum CBS 148.51]
  misc_feature (3)..(419): NCBI GI: 39957975 Blast Desc: MGG_09217 [Magnaporthe grisea 70-15] gi|145013345|gb|EDJ97986.1| MGG_09217 [Magnaporthe grisea 70-15]
  misc_feature (12)..(419): NCBI GI: 261360895 Blast Desc: conserved [Verticillium albo-atrum VaMs.102]
  misc_feature (5)..(419): NCBI GI: 156037646 Blast Desc: SS1G_12537 [Sclerotinia sclerotiorum 1980] gi|154697945|gb|EDN97683.1| SS1G_12537 [Sclerotinia sclerotiorum 1980]
  misc_feature (5)..(421): NCBI GI: 154316307 Blast Desc: BC1G_03739 [Botryotinia fuckeliana B05.10] gi|150846525|gb|EDN21718.1| BC1G_03739 [Botryotinia fuckeliana B05.10]
  misc_feature (5)..(420): NCBI GI: 67517173 Blast Desc: AN0865.2 [Aspergillus nidulans FGSC A4] gi|40746539|gb|EAA65695.1| AN0865.2 [Aspergillus nidulans FGSC A4] gi|259488850|tpe|CBF88632.1| TPA: conserved [Aspergillus FGSC
  misc_feature (3)..(419): NCBI GI: 121700933 Blast Desc: conserved [Aspergillus clavatus NRRL 1] gi|119396874|gb|EAW07305.1| conserved [Aspergillus clavatus NRRL 1]
  misc_feature (5)..(419): NCBI GI: 119494872 Blast Desc: NFIA_010210 [Neosartorya fischeri NRRL 181] gi|119412399|gb|EAW22340.1| conserved [Neosartorya fischeri NRRL 181]
MAEEWAGVEASMEDPEETNVIYCSLDSFSRYAKTAHFNCTHLRRQAFYALPQAHWQMLAGPPFHYLDTLNRVDAAIEGNADLARSIVKCGLHSFGMVDANNEPVMPEDWIGVAKVNDLDKARSTIRQFYRDWSAEGSIERDACYGPVFRALEKERAPKMMNAMLKQQRDLQDVTEVQPLTRKIAPLKVLVPGAGLGRLVFDLCRLGYDAEGNEISYHQLLASSYILNSCKEAGQHTIYPWIHSFSNHRTRETQFKSYKVPDIHPATTLAATEGKGSMQMCAADFLCLYGDDEHQDTYDAVAAIFFIDTAPNLIRYLEVIRRCLKPGGILINVGPLLWHWENHVPGHSGYDGDDNHDENNSLGIGDPGNFELTEDEVLALVTNMGFTIEHFESGIEAPYIQDPQSMLHMEYRASHWIARKLDTRIQVTQDNTQQETNMVPTEQ

SEQ ID NO: 7283 - DNA, 3213 bp, Muscodor strobelii
  misc_feature: SGI EST ID NO. CUFF.18106.0
  misc_feature: Variant of the nucleotide sequence at SEQ ID NO 7281
ctccaaaccagacagaacgaccaatcaaagatgccttccgaggcttgattcttgaatacataaagcttcacaattcctcgatttctcactaccggaaatgacccagtttcacatcctgtttgaaatggtcaaattccctaaattcataccatgatatccagcacatagcaaactgcccctccttcaccccatctcctcatctcccctctcgtcgtccttgttgtcagacatctctcaccactgctggcagataattggccctcatagcatcttctgctacaaccctttaattctaaatcatatattacttaagatcgtgatcactggttaactcacaacaatagctctgtaatctctgagccaaaacaatggcagaagaatgggccggagttgaggcatcgatggaggaccccgaagagacaaatgtgatttactgttctctagactcattcagtcgatatgccaagacagcccatttcaactgcacacatcttcgccgacaggctttctatgctttgccccaagcacactggcagatgctcgctgggcccccctttcactatcttgatactctgaaccgtgtagacgctgcaatcgagggcaatgccgaccttgctcgcagcattgtcaaatgcggtctacactcttttggtatggtggatgcaaacaatgaacctgtgatgccggaagactggatcggagttgcaaaggtcaatgacttggacaaggcccgcagcacaattcggcaattctaccgtgattggtctgccgaaggtagcatagagagggacgcgtgctatggtccagtcttccgagctcttgagaaagaaagagccccaaagatgatgaatgctatgctgaagcagcaaagagatctccaggatgtcacagaagtacaaccgctgacacgcaagattgcgcccctcaaagttcttgttcccggtgcaggacttggccgtctcgtattcgatctctgtcgtcttggatatgatgccgagggtaatgagatctcataccatcagcttcttgcttcatcatacattttgaactcctgtaaggaagcaggtcagcacaccatctatccctggatacattccttctccaaccatcggacccgcgagactcaattcaagagctacaaggtccctgatatccatccagcaacaacccttgcagctaccgaaggcaaaggatcgatgcagatgtgcgctgcagactttctatgtctgtacggagacgatgagcaccaagacacctatgatgcggtcgcagctatattcttcatcgacacggcacccaacctaattcgctatcttgaagtcatcaggagatgtcttaagcccggcggcattctcataaatgtcggccccttgctttggcattgggaaaaccacgtaccgggacactctggctacgatggagatgataaccacgacgagaataattcgctaggaatcggagatccgggcaatttcgagctcacagaagatgaagttctcgcactggtcacgaacatgggtttcacaattgagcatttcgagtctggcatagaggcaccttacatacaagatcctcagagtatgctacacatggaatatcgtgccagtcactggatagcacgaaagctggacaccaggatccaggttacccaagataacacccagcaggagacgaatatggtgccaacggagcagtaaggctgatttgtccagatgactgaatatatgtgccaaatgcatatctccgggaaggtgattatctactccggaaatgtgagctatgggcacaggtttgtagaaagtatcgattcgtgtactgttacatagcggtaaatattagactgaaagcacatagtccaacaaataatgtttagcgctcgctcgtatttcatatcatatcagacaattagtacgaggataccaagcaacaattcatacgaattgcagcatgataatgcatattcatacatgtcttacagtagatctaagccctgtttctcttatctatagcttaggctcaggttcgccagcctgaatcaactgtcctctgttccacagcgcacccccatcaatttctatagtggcagcgttgacatgacttccagcacgacttgctaaatacaccacgatgccagcaatatcttccggtcgacccagtctcctggctgggttggattgagcatgtgcctccagaccacccgtcatctcgagtaagcccgtcgccattttcgtagggaagaacccagggcagatagagttgacgagtatatgtctcgggcccaactcaaccgccaaatttctccctaggtgattcacagcggccttagaggcggagtatccaaacgtagcctgtttccccaagcttcccacgccaagtgcggctgtggacgcagtgatgataacccttgacggatcctcaaccgaggccttcttctccaacatgggagcgaacttctgaacactgtaaaacacagacttgacatttaggtccatgactttggagaaagcggactcgggatgtttatcgaaggattcaccccatgtcgcgccggcgttcgcaaagaggatatctacgtggtcggtgtgtttggagacctgctggacgagagactcgatgcctgcgacggttgcgctgtcggctgggcaggatatggcctgagcaccgggctggaggttggggagtgcgtttagctgtgcgacggcttgttcgcaggctttggctttgcgggatgtgatgaagactttggagcatcctgcttggaggaacgctgaagcggcattcaggccaagaccccgagactaggaaattgaggatcagcaattgcagttccaagcggagcgactgtcttgacagtatccgaatgttatggaaacgaagttgtcttaaaaacggctgaggaatacagtgaaatactcacaccaccagtcacaaccgcaactttgcccttgagggagaagagcgacgggaagtcgtggagagatgtttcgtcagccatcgtgatatagcgagattctctgccttaagaacagtcaattgcaataagagaaagacttcgaacaggacacaatgttctatgcggtttctgtaagagaaagaaaataccctactcgacagattcttaataagtcatctcatcgaattcccaagatgctgttgcaaggatccgaagcaagatagcgtcggattcgccgctggcaagctccggggtatagc

SEQ ID NO: 7284 - DNA, 873 bp, Muscodor strobelii
  misc_feature: SGI cDNA ID NO. 562187
  misc_feature: Encodes the peptide sequence at SEQ ID NO 7285
atggctgacgaaacatctctccacgacttcccgtcgctcttctccctcaagggcaaagttgcggttgtgactggtggttctcggggtcttggcctgaatgccgcttcagcgttcctccaagcaggatgctccaaagtcttcatcacatcccgcaaagccaaagcctgcgaacaagccgtcgcacagctaaacgcactccccaacctccagcccggtgctcaggccatatcctgcccagccgacagcgcaaccgtcgcaggcatcgagtctctcgtccagcaggtctccaaacacaccgaccacgtagatatcctctttgcgaacgccggcgcgacatggggtgaatccttcgataaacatcccgagtccgctttctccaaagtcatggacctaaatgtcaagtctgtgttttacagtgttcagaagttcgctcccatgttggagaagaaggcctcggttgaggatccgtcaagggttatcatcactgcgtccacagccgcacttggcgtgggaagcttggggaaacaggctacgtttggatactccgcctctaaggccgctgtgaatcacctagggagaaatttggcggttgagttgggcccgagacatatactcgtcaactctatctgccctgggttcttccctacgaaaatggcgacgggcttactcgagatgacgggtggtctggaggcacatgctcaatccaacccagccaggagactgggtcgaccggaagatattgctggcatcgtggtgtatttagcaagtcgtgctggaagtcatgtcaacgctgccactatagaaattgatgggggtgcgctgtggaacagaggacagttgattcaggctggcgaacctgagcctaagctatag

SEQ ID NO: 7285 - protein, 290 aa, Muscodor strobelii
  misc_feature: SGI Peptide ID NO. 562187
  misc_feature (19)..(200): Pfam Id: PF00106 Pfam Desc: short chain dehydrogenase
  misc_feature (19)..(138): Pfam Id: PF00106 Pfam Desc: short chain dehydrogenase
  misc_feature (4)..(283): NCBI GI: 46109950 Blast Desc: FG01857.1 [Gibberella zeae PH-1]
  misc_feature (4)..(283): NCBI GI: 256728504 Blast Desc: [Nectria haematococca mpVI 77-13-4]
  misc_feature (1)..(280): NCBI GI: 85103212 Blast Desc: NCU03693 [Neurospora crassa OR74A] gi|11595574|emb|CAC18176.1| NADPH-dependent beta-ketoacyl reductase (rhlG) [Neurospora crassa] gi|28923015|gb|EAA32233.1|
  misc_feature (4)..(280): NCBI GI: 171694189 Blast Desc: protein product [Podospora anserina] gi|170947043|emb|CAP73848.1| protein product [Podospora anserina]
  misc_feature (1)..(281): NCBI GI: 39957986 Blast Desc: MGG_09218 [Magnaporthe grisea 70-15] gi|145013344|gb|EDJ97985.1| MGG_09218 [Magnaporthe grisea 70-15]
  misc_feature (4)..(280): NCBI GI: 116198317 Blast Desc: CHGG_07314 [Chaetomium globosum CBS 148.51] gi|88178593|gb|EAQ86061.1| CHGG_07314 [Chaetomium globosum CBS 148.51]
  misc_feature (3)..(280): NCBI GI: 119495016 Blast Desc: oxidoreductase, short-chain dehydrogenase/reductase family [Neosartorya fischeri NRRL 181] gi|119412466|gb|EAW22407.1| oxidoreductase, short-chain family
  misc_feature (4)..(273): NCBI GI: 119186213 Blast Desc: 3-oxoacyl-acyl-carrier-protein reductase [Coccidioides immitis RS]
  misc_feature (4)..(273): NCBI GI: 240108654 Blast Desc: rhamnolipids biosynthesis 3-oxoacyl-[acyl-carrier-protein] reductase, [Coccidioides posadasii C735 delta SOWgp]
  misc_feature (4)..(273): NCBI GI: 258563024 Blast Desc: conserved [Uncinocarpus reesii 1704] gi|237907764|gb|EEP82165.1| conserved [Uncinocarpus reesii 1704]
  misc_feature (14)..(272): SWISSPROT Homolog: EC 1.1.1.100 3-oxoacyl-[acyl-carrier-protein] reductase
MADETSLHDFPSLFSLKGKVAVVTGGSRGLGLNAASAFLQAGCSKVFITSRKAKACEQAVAQLNALPNLQPGAQAISCPADSATVAGIESLVQQVSKHTDHVDILFANAGATWGESFDKHPESAFSKVMDLNVKSVFYSVQKFAPMLEKKASVEDPSRVIITASTAALGVGSLGKQATFGYSASKAAVNHLGRNLAVELGPRHILVNSICPGFFPTKMATGLLEMTGGLEAHAQSNPARRLGRPEDIAGIVVYLASRAGSHVNAATIEIDGGALWNRGQLIQAGEPEPKL

SEQ ID NO: 7286 - DNA, 2563 bp, Muscodor strobelii
  misc_feature: SGI EST ID NO. CUFF.18107.1
  misc_feature: Variant of the nucleotide sequence at SEQ ID NO 7284
cttgggaattcgatgagatgacttattaagaatctgtcgagtagggtattttctttctcttacagaaaccgcatagaacattgtgtcctgttcgaagtctttctcttattgcaattgactgttcttaaggcagagaatctcgctatatcacgatggctgacgaaacatctctccacgacttcccgtcgctcttctccctcaagggcaaagttgcggttgtgactggtggttctcggggtcttggcctgaatgccgcttcagcgttcctccaagcaggatgctccaaagtcttcatcacatcccgcaaagccaaagcctgcgaacaagccgtcgcacagctaaacgcactccccaacctccagcccggtgctcaggccatatcctgcccagccgacagcgcaaccgtcgcaggcatcgagtctctcgtccagcaggtctccaaacacaccgaccacgtagatatcctctttgcgaacgccggcgcgacatggggtgaatccttcgataaacatcccgagtccgctttctccaaagtcatggacctaaatgtcaagtctgtgttttacagtgttcagaagttcgctcccatgttggagaagaaggcctcggttgaggatccgtcaagggttatcatcactgcgtccacagccgcacttggcgtgggaagcttggggaaacaggctacgtttggatactccgcctctaaggccgctgtgaatcacctagggagaaatttggcggttgagttgggcccgagacatatactcgtcaactctatctgccctgggttcttccctacgaaaatggcgacgggcttactcgagatgacgggtggtctggaggcacatgctcaatccaacccagccaggagactgggtcgaccggaagatattgctggcatcgtggtgtatttagcaagtcgtgctggaagtcatgtcaacgctgccactatagaaattgatgggggtgcgctgtggaacagaggacagttgattcaggctggcgaacctgagcctaagctatagataagagaaacagggcttagatctactgtaagacatgtatgaatatgcattatcatgctgcaattcgtatgaattgttgcttggtatcctcgtactaattgtctgatatgatatgaaatacgagcgagcgctaaacattatttgttggactatgtgctttcagtctaatatttaccgctatgtaacagtacacgaatcgatactttctacaaacctgtgcccatagctcacatttccggagtagataatcaccttcccggagatatgcatttggcacatatattcagtcatctggacaaatcagccttactgctccgttggcaccatattcgtctcctgctgggtgttatcttgggtaacctggatcctggtgtccagctttcgtgctatccagtgactggcacgatattccatgtgtagcatactctgaggatcttgtatgtaaggtgcctctatgccagactcgaaatgctcaattgtgaaacccatgttcgtgaccagtgcgagaacttcatcttctgtgagctcgaaattgcccggatctccgattcctagcgaattattctcgtcgtggttatcatctccatcgtagccagagtgtcccggtacgtggttttcccaatgccaaagcaaggggccgacatttatgagaatgccgccgggcttaagacatctcctgatgacttcaagatagcgaattaggttgggtgccgtgtcgatgaagaatatagctgcgaccgcatcataggtgtcttggtgctcatcgtctccgtacagacatagaaagtctgcagcgcacatctgcatcgatcctttgccttcggtagctgcaagggttgttgctggatggatatcagggaccttgtagctcttgaattgagtctcgcgggtccgatggttggagaaggaatgtatccagggatagatggtgtgctgacctgcttccttacaggagttcaaaatgtatgatgaagcaagaagctgatggtatgagatctcattaccctcggcatcatatccaagacgacagagatcgaatacgagacggccaagtcctgcaccgggaacaagaactttgaggggcgcaatcttgcgtgtcagcggttgtacttctgtgacatcctggagatctctttgctgcttcagcatagcattcatcatctttggggctctttctttctcaagagctcggaagactggaccatagcacgcgtccctctctatgctaccttcggcagaccaatcacggtagaattgccgaattgtgctgcgggccttgtccaagtcattgacctttgcaactccgatccagtcttccggcatcacaggttcattgtttgcatccaccataccaaaagagtgtagaccgcatttgacaatgctgcgagcaaggtcggcattgccctcgattgcagcgtctacacggttcagagtatcaagatagtgaaaggggggcccagcgagcatctgccagtgtgcttggggcaaagcatagaaagcctgtcggcgaagatgtgtgcagttgaaatgggctgtct

SEQ ID NO: 7287 - DNA, 1926 bp, Muscodor strobelii
  misc_feature: SGI cDNA ID NO. 562188
  misc_feature: Encodes the peptide sequence at SEQ ID NO 7288
atgatggaggactccatcgacaaccagcctgatggcagatcacggagcaattcggtcagctcgacagacagcgggtacccaagcgctcctgtttatgaagtaccgagccgcaagatcgttgcaattgaacacccttgtatcgtcatgaatcttgataacgggctaaagagttttggctccaggccgaatttccgaaagctggtagatgatacaaaagaccctcaagcgctcccactgtggtttcgccccaacaacccaacgtccaaacccatagtatctcaccatgccgctacaaacaacatcctactcagaatcaccgtgcccaaaaggacgggtaggaagcgaaagcgtggcactgatgacccattccttggcgacaccgacatctcagactccggacctgcagccaagcatatcgttggctccgtagcacgtaaggaccaccccaagactattctccggaagcttcaggacaattccgaaaggcatcacgttgaggcagtcggaatgattcgagatagtcaccgatacagagggttggctgacttccaatttgcccctaaacccgaatcattcattaagcaagttggcgaccacctgctgccactagattgtaaagctctaccaacattccccgtgacgatttccctcgctaattttatggcagtgtccaagttacgcgagttcaagattgacgaaggtgtaaagactggtctgggtgtcgagttgataccaccgcctcatttcacagacaaagtcataggtttcaactacaactacgaacagaacccaggaattgtagagcgcggtgttgacgaagatggcgagacacggctagtgaatcgccaagggcgaagtgttctgtcctatggctatttcattcatcatgactcgtttccagcccctgtgcggcccaaagatcgacgtgatggcaatgctcgtgaccgagttccggacggcctgatgaaacagctgcaccgtttgatggagcaacgtccaatttggacgcgtcgctcaatcatcaacaatgtgaacggcgtttacgcggagtctcttctcaaactggccctgcagttagtaggatatcaattcaggggaggacctttccgcgacgctattgtcaagtacggtattgatcctcgaaccgatcccaagtaccgaaaataccagaccgtagcgttcaaaatgtcgaagaacatgatgggcgaaaccaagcttccatggcaaactattagaaggggccaggtcaatagtctcaataataccggcgaccgcaacagtcatatatgggacgggaggaacttttccgtgcagggcaagctctggcaaatttgcgacataaccgatccatttgtagtcgacttgcttgagaaggctgaagtccgtcccgagtgcgacgtggctgattccgggtggtttcatccaggtctatggctcaagatcaagacagttatgaaggctaagatgatagccattatgaagggcagattgggatccgaagacgacgatcctcagaaggaaggctatgtctacaattctctcttgcggactcgattagcgctttaccctgatgagactggcaaacctggtggcatcactctcgaagctctccttcgtcctctgtctgagttgaacactaatcctcacaaaaacaatcgccgccctcaggcccctacagctcgaggccggggaagaggccgcgcgcactggaataccccgcgagattattcccgtacaccaggtgatatcgatgatgacgacgaatctttcattcccgaaaaagatgaaggagacaatactgaacctatacagacagagtccactaccaactgggagaatatggtggacagtgatgttgaagatgacgatgaagaagacgagggtgaggatattggcgaagatgaagatatgacaatggataattga

SEQ ID NO: 7288 - protein, 641 aa, Muscodor strobelii
  misc_feature: SGI Peptide ID NO. 562188
  misc_feature (28)..(502): NCBI GI: 116198169 Blast Desc: CHGG_07240 [Chaetomium globosum CBS 148.51] gi|88178519|gb|EAQ85987.1| CHGG_07240 [Chaetomium globosum CBS 148.51]
  misc_feature (29)..(502): NCBI GI: 12718482 Blast Desc: conserved [Neurospora crassa]
  misc_feature (29)..(502): NCBI GI: 85101608 Blast Desc: NCU03787 [Neurospora crassa OR74A] gi|28922717|gb|EAA31940.1| [Neurospora crassa OR74A]
  misc_feature (21)..(502): NCBI GI: 46123035 Blast Desc: FG05895.1 [Gibberella zeae PH-1]
  misc_feature (19)..(502): NCBI GI: 39944016 Blast Desc: MGG_04019 [Magnaporthe grisea 70-15] gi|145014741|gb|EDJ99309.1| MGG_04019 [Magnaporthe grisea 70-15]
  misc_feature (28)..(502): NCBI GI: 256731134 Blast Desc: NECHADRAFT_101721 [Nectria haematococca mpVI 77-13-4]
  misc_feature (29)..(420): NCBI GI: 171694159 Blast Desc: protein product [Podospora anserina] gi|170947028|emb|CAP73832.1| protein product [Podospora anserina]
  misc_feature (28)..(501): NCBI GI: 156050565 Blast Desc: SS1G_07870 [Sclerotinia sclerotiorum 1980] gi|154692270|gb|EDN92008.1| SS1G_07870 [Sclerotinia sclerotiorum 1980]
  misc_feature (29)..(537): NCBI GI: 242791427 Blast Desc: RNA polymerase III transcription factor subunit, [Talaromyces stipitatus ATCC 10500] gi|218718343|gb|EED17763.1| RNA polymerase III transcription factor subunit, [Talaromyces
  misc_feature (25)..(497): NCBI GI: 145233555 Blast Desc: An02g10220 [Aspergillus niger] gi|134057082|emb|CAK44370.1| protein product [Aspergillus niger]
MMEDSIDNQPDGRSRSNSVSSTDSGYPSAPVYEVPSRKIVAIEHPCIVMNLDNGLKSFGSRPNFRKLVDDTKDPQALPLWFRPNNPTSKPIVSHHAATNNILLRITVPKRTGRKRKRGTDDPFLGDTDISDSGPAAKHIVGSVARKDHPKTILRKLQDNSERHHVEAVGMIRDSHRYRGLADFQFAPKPESFIKQVGDHLLPLDCKALPTFPVTISLANFMAVSKLREFKIDEGVKTGLGVELIPPPHFTDKVIGFNYNYEQNPGIVERGVDEDGETRLVNRQGRSVLSYGYFIHHDSFPAPVRPKDRRDGNARDRVPDGLMKQLHRLMEQRPIWTRRSIINNVNGVYAESLLKLALQLVGYQFRGGPFRDAIVKYGIDPRTDPKYRKYQTVAFKMSKNMMGETKLPWQTIRRGQVNSLNNTGDRNSHIWDGRNFSVQGKLWQICDITDPFVVDLLEKAEVRPECDVADSGWFHPGLWLKIKTVMKAKMIAIMKGRLGSEDDDPQKEGYVYNSLLRTRLALYPDETGKPGGITLEALLRPLSELNTNPHKNNRRPQAPTARGRGRGRAHWNTPRDYSRTPGDIDDDDESFIPEKDEGDNTEPIQTESTTNWENMVDSDVEDDDEEDEGEDIGEDEDMTMDN

SEQ ID NO: 7289 - DNA, 2606 bp, Muscodor strobelii
  misc_feature: SGI EST ID NO. CUFF.18064.1
  misc_feature: Variant of the nucleotide sequence at SEQ ID NO 7287
cagaaacaacccttagaggtaggagatctagggttggcgacctgggtctgcgggattcataccttacctgatgtgtccaccaacatctccccactggacgaggacaatagcgggcagccgcgccagccaagcaagcacacttcaaccaaggccaatcagtactcatgccggcatcccagatccatcttcgacgaaaggcacacaagtcttgattagttgctttcaagttatctcggctgctaagacttggaagagaggaaaaaaaaaccatgagcagtcctgagcctctaacacccagaaaaaccatacaggcgtatcagaacaccaccatcctagtataagaacgtggtcagtcaatgctcactcttcgcttgggcaacacaacaaggtaccagtgattgacaaatatgtcataattttggtgtatttgtgctctatcgcatgctggtagaggcaagctacctagaagtagatcacacaatccttaatgttgtcgcaatgatggaggactccatcgacaaccagcctgatggcagatcacggagcaattcggtcagctcgacagacagcgggtacccaagcgctcctgtttatgaagtaccgagccgcaagatcgttgcaattgaacacccttgtatcgtcatgaatcttgataacgggctaaagagttttggctccaggccgaatttccgaaagctggtagatgatacaaaagaccctcaagcgctcccactgtggtttcgccccaacaacccaacgtccaaacccatagtatctcaccatgccgctacaaacaacatcctactcagaatcaccgtgcccaaaaggacgggtaggaagcgaaagcgtggcactgatgacccattccttggcgacaccgacatctcagactccggacctgcagccaagcatatcgttggctccgtagcacgtaaggaccaccccaagactattctccggaagcttcaggacaattccgaaaggcatcacgttgaggcagtcggaatgattcgagatagtcaccgatacagagggttggctgacttccaatttgcccctaaacccgaatcattcattaagcaagttggcgaccacctgctgccactagatttgtccaagttacgcgagttcaagattgacgaaggtgtaaagactggtctgggtgtcgagttgataccaccgcctcatttcacagacaaagtcataggtttcaactacaactacgaacagaacccaggaattgtagagcgcggtgttgacgaagatggcgagacacggctagtgaatcgccaagggcgaagtgttctgtcctatggctatttcattcatcatgactcgtttccagcccctgtgcggcccaaagatcgacgtgatggcaatgctcgtgaccgagttccggacggcctgatgaaacagctgcaccgtttgatggagcaacgtccaatttggacgcgtcgctcaatcatcaacaatgtgaacggcgtttacgcggagtctcttctcaaactggccctgcagttagtaggatatcaattcaggggaggacctttccgcgacgctattgtcaagtacggtattgatcctcgaaccgatcccaagtaccgaaaataccagaccgtagcgttcaaaatgtcgaagaacatgatgggcgaaaccaagcttccatggcaaactattagaaggggccaggtcaatagtctcaataataccggcgaccgcaacagtcatatatgggacgggaggaacttttccgtgcagggcaagctctggcaaatttgcgacataaccgatccatttgtagtcgacttgcttgagaaggctgaagtccgtcccgagtgcgacgtggctgattccgggtggtttcatccaggtctatggctcaagatcaagacagttatgaaggctaagatgatagccattatgaagggcagattgggatccgaagacgacgatcctcagaaggaaggctatgtctacaattctctcttgcggactcgattagcgctttaccctgatgagactggcaaacctggtggcatcactctcgaagctctccttcgtcctctgtctgagttgaacactaatcctcacaaaaacaatcgccgccctcaggcccctacagctcgaggccggggaagaggccgcgcgcactggaataccccgcgagattattcccgtacaccaggtgatatcgatgatgacgacgaatctttcattcccgaaaaagatgaaggagacaatactgaacctatacagacagagtccactaccaactgggagaatatggtggacagtgatgttgaagatgacgatgaagaagacgagggtgaggatattggcgaagatgaagatatgacaatggataattgagctgatgacatggatgaagtctaggcttaagtagcaatattgattgtaatggcaatctcacgggctggttggtttctgaggacatgtcttgtaacagtgaaatactcatgacaactgataccctgcagcaaggtgtgggatacggtcaccgcacagtcgcagttgaccgggtttagtaaatgctcttccttgtcttgagcatctatagagccgtaaatgatgaaaacctacctaca

SEQ ID NO: 7290 - DNA, 963 bp, Muscodor strobelii
  misc_feature: SGI cDNA ID NO. 562189
  misc_feature: Encodes the peptide sequence at SEQ ID NO 7291
atgaaacagctgcaccgtttgatggagcaacgtccaatttggacgcgtcgctcaatcatcaacaatgtgaacggcgtttacgcggagtctcttctcaaactggccctgcagttagtaggatatcaattcaggggaggacctttccgcgacgctattgtcaagtacggtattgatcctcgaaccgatcccaagtaccgaaaataccagaccgtagcgttcaaaatgtcgaagaacatgatgggcgaaaccaagcttccatggcaaactattagaaggggccaggtcaatagtctcaataataccggcgaccgcaacagtcatatatgggacgggaggaacttttccgtgcagggcaagctctggcaaatttgcgacataaccgatccatttgtagtcgacttgcttgagaaggctgaagtccgtcccgagtgcgacgtggctgattccgggtggtttcatccaggtctatggctcaagatcaagacagttatgaaggctaagatgatagccattatgaagggcagattgggatccgaagacgacgatcctcagaaggaaggctatgtctacaattctctcttgcggactcgattagcgctttaccctgatgagactggcaaacctggtggcatcactctcgaagctctccttcgtcctctgtctgagttgaacactaatcctcacaaaaacaatcgccgccctcaggcccctacagctcgaggccggggaagaggccgcgcgcactggaataccccgcgagattattcccgtacaccaggtgatatcgatgatgacgacgaatctttcattcccgaaaaagatgaaggagacaatactgaacctatacagacagagtccactaccaactgggagaatatggtggacagtgatgttgaagatgacgatgaagaagacgagggtgaggatattggcgaagatgaagatatgacaatggataattga

SEQ ID NO: 7291 - protein, 320 aa, Muscodor strobelii
  misc_feature: SGI Peptide ID NO. 562189
  misc_feature (1)..(181): NCBI GI: 12718482 Blast Desc: conserved [Neurospora crassa]
  misc_feature (1)..(181): NCBI GI: 85101608 Blast Desc: NCU03787 [Neurospora crassa OR74A] gi|28922717|gb|EAA31940.1| [Neurospora crassa OR74A]
  misc_feature (3)..(181): NCBI GI: 39944016 Blast Desc: MGG_04019 [Magnaporthe grisea 70-15] gi|145014741|gb|EDJ99309.1| MGG_04019 [Magnaporthe grisea 70-15]
  misc_feature (1)..(181): NCBI GI: 116198169 Blast Desc: CHGG_07240 [Chaetomium globosum CBS 148.51] gi|88178519|gb|EAQ85987.1| CHGG_07240 [Chaetomium globosum CBS 148.51]
  misc_feature (1)..(181): NCBI GI: 256731134 Blast Desc: NECHADRAFT_101721 [Nectria haematococca mpVI 77-13-4]
  misc_feature (1)..(181): NCBI GI: 46123035 Blast Desc: FG05895.1 [Gibberella zeae PH-1]
  misc_feature (1)..(180): NCBI GI: 156050565 Blast Desc: SS1G_07870 [Sclerotinia sclerotiorum 1980] gi|154692270|gb|EDN92008.1| SS1G_07870 [Sclerotinia sclerotiorum 1980]
  misc_feature (4)..(180): NCBI GI: 154308757 Blast Desc: BC1G_07801 [Botryotinia fuckeliana B05.10] gi|150852752|gb|EDN27944.1| BC1G_07801 [Botryotinia fuckeliana B05.10]
  misc_feature (1)..(216): NCBI GI: 242791427 Blast Desc: RNA polymerase III transcription factor subunit, [Talaromyces stipitatus ATCC 10500] gi|218718343|gb|EED17763.1| RNA polymerase III transcription factor subunit, [Talaromyces
  misc_feature (7)..(181): NCBI GI: 238502885 Blast Desc: RNA polymerase III transcription factor subunit, [Aspergillus flavus NRRL3357] gi|220691486|gb|EED47834.1| RNA polymerase III transcription factor subunit, [Aspergillus flavus
MKQLHRLMEQRPIWTRRSIINNVNGVYAESLLKLALQLVGYQFRGGPFRDAIVKYGIDPRTDPKYRKYQTVAFKMSKNMMGETKLPWQTIRRGQVNSLNNTGDRNSHIWDGRNFSVQGKLWQICDITDPFVVDLLEKAEVRPECDVADSGWFHPGLWLKIKTVMKAKMIAIMKGRLGSEDDDPQKEGYVYNSLLRTRLALYPDETGKPGGITLEALLRPLSELNTNPHKNNRRPQAPTARGRGRGRAHWNTPRDYSRTPGDIDDDDESFIPEKDEGDNTEPIQTESTTNWENMVDSDVEDDDEEDEGEDIGEDEDMTMDN

SEQ ID NO: 7292 - DNA, 2606 bp, Muscodor strobelii; identical to SEQ ID NO: 7289
  misc_feature: SGI EST ID NO. CUFF.18064.1
  misc_feature: Variant of the nucleotide sequence at SEQ ID NO 7290

SEQ ID NO: 7293 - DNA, 1965 bp, Muscodor strobelii
  misc_feature: SGI cDNA ID NO. 562190
  misc_feature: Encodes the peptide sequence at SEQ ID NO 7294
atgacctacagtatgaagcgcttcagccagagggtcctgtcgcggggcaagagtgacagcaaatcgtccaagaagaacaaggatgggaaggacggcaccgcctcgccatccggcgcttctcgcgagacccaatctccgaatctaacaccgacgtcgtccacctcgacgctcaacaatgacccgagaatgaagccactgcccccgaacagcaccggcgccgttggtggagacgcagcacagggccagggcagccctgccgggggtgcagccggcggtgacaggttcggcgccatgggagctcaaccacagaacggatctggcacaccatcgagactcggcgcgctaccccccacggtcgtcatatcccccagtgctcctcacgtcccgccctcctgggcgctgccgagaccatgcctcacgatctggctcctcccaaggccggccagaaggtcgctggtcttcgaccgtcttcatcagacgcccaaggatgtgcccgagggactgcgcacccccaagcgccagcactcttcgcgcttcgatgtgtctccgcatcctcatcgcgagctggagaagatacctggcttccacgaggtgccgcctaaccgccggcaggagctcttcatgcagaagatcgaccaatgcaatgtcatctttgactttaacgacgccagtggtgacatgaaatccaaggagatcaagcgtctggctctgcacgagctgctcgactacgtcgccaacaaccgacaggtcatcaccgagcccatgtacccacgagtggtggagatgttcgccaagaacctatttcgccccatccctccgcccatgaaccctcagggcgaagccttcgatcccgaggaagacgagccggttctcgaggtcgcatggccgcatatccaagtggtctacgagttcttccttcgattcatagagagccaggattttaacactaacattgccaaagcctacattgatcacagctttgtgcttcaactcctcgaattgttcgactcggaagacccacgcgagagagacttcttgaagacaaccctgcatcgcatttatggaaagttcctcaaccttcgctctttcattcggcgatccatcaacaatgtcttcttccaatttacgtacgagacggagagattcaatggagtggcagagttgctcgagattctaggctcgatcatcaacggttttgccctcccgctaaaggaagagcacaaactgttcttgactagggtgcttctccccctccataaagtcaagagcttgagcatgtaccatcctcagctcgcttactgcatcgtccaatttctcgaaaaggatgcctcgttgactgaggatgttgtgcttggtcttttgcggtactggcccaaggtcaacagtaccaaagaagtcatgtatctcaatgaagtcgaagacatcttcgaggtcatggatccggctgaatttgccaaggtgcaagagccccttttccatcagctcgccaagtccgtggccagccctcacttccaagttgcggagcgagcattgtatttctggaataacgagtatttttgcaatctggtgagcgacaacgtggagatcattctacccatcatgtttgcccctctgtacgaaaactccaagggtcattggaacagaacaattcacggcatggtgtacaatgcaatgaagctattcatggagataaacccgcagttgtttgacgactgttcccacgattataacgagcagcaaaacaacgcgcctgcgcgccaagctcttcgagacaggaagtgggcagccattacggaccaagcaagcaagaagtccaacggtgctgcagggacggcttcgtcggactccgttactgacgataatcaaaaaaggcttgactcgctcaagctacaggatggcgatcgtagggatcgtcgccctcatgagagacaaagctcacagggctcctcgagaagccaaagatga

SEQ ID NO: 7294 - protein, 654 aa, Muscodor strobelii
  misc_feature: SGI Peptide ID NO. 562190
  misc_feature (191)..(602): Pfam Id: PF01603 Pfam Desc: Protein phosphatase 2A regulatory B subunit (B56 family)
  misc_feature (5)..(654): NCBI GI: 145607143 Blast Desc: conserved [Magnaporthe grisea 70-15] gi|145014742|gb|EDJ99310.1| conserved [Magnaporthe grisea 70-15]
  misc_feature (4)..(610): NCBI GI: 261355509 Blast Desc: serine/threonine-protein phosphatase 2A [Verticillium albo-atrum VaMs.102]
  misc_feature (5)..(646): NCBI GI: 156050561 Blast Desc: conserved [Sclerotinia sclerotiorum 1980] gi|154692268|gb|EDN92006.1| conserved [Sclerotinia sclerotiorum 1980]
  misc_feature (5)..(654): NCBI GI: 171694157 Blast Desc: protein product [Podospora anserina] gi|170947027|emb|CAP73831.1| protein product [Podospora anserina]
  misc_feature (5)..(653): NCBI GI: 12718483 Blast Desc: related to B56-delta regulatory subunit of protein phosphatase 2A [Neurospora crassa]
  misc_feature (5)..(653): NCBI GI: 46123033 Blast Desc: FG05894.1 [Gibberella zeae PH-1]
  misc_feature (5)..(650): NCBI GI: 169615563 Blast Desc: SNOG_10940 [Phaeosphaeria nodorum SN15] gi|160702989|gb|EAT81439.2| SNOG_10940 [Phaeosphaeria nodorum SN15]
  misc_feature (5)..(653): NCBI GI: 85101317 Blast Desc: serine/threonine protein phosphatase 2A [Neurospora crassa OR74A] gi|28922671|gb|EAA31896.1| serine/threonine protein phosphatase 2A [Neurospora crassa OR74A]
  misc_feature (5)..(632): NCBI GI: 212534884 Blast Desc: protein phosphatase regulatory subunit (Ssc1), [Penicillium marneffei ATCC 18224] gi|210069997|gb|EEA24087.1| protein phosphatase regulatory subunit (Ssc1), [Penicillium ATCC
  misc_feature (5)..(651): NCBI GI: 189209784 Blast Desc: serine/threonine protein phosphatase 2A [Pyrenophora tritici-repentis Pt-1C-BFP] gi|187977317|gb|EDU43943.1| serine/threonine protein phosphatase 2A [Pyrenophora Pt-1C-BFP]
MTYSMKRFSQRVLSRGKSDSKSSKKNKDGKDGTASPSGASRETQSPNLTPTSSTSTLNNDPRMKPLPPNSTGAVGGDAAQGQGSPAGGAAGGDRFGAMGAQPQNGSGTPSRLGALPPTVVISPSAPHVPPSWALPRPCLTIWLLPRPARRSLVFDRLHQTPKDVPEGLRTPKRQHSSRFDVSPHPHRELEKIPGFHEVPPNRRQELFMQKIDQCNVIFDFNDASGDMKSKEIKRLALHELLDYVANNRQVITEPMYPRVVEMFAKNLFRPIPPPMNPQGEAFDPEEDEPVLEVAWPHIQVVYEFFLRFIESQDFNTNIAKAYIDHSFVLQLLELFDSEDPRERDFLKTTLHRIYGKFLNLRSFIRRSINNVFFQFTYETERFNGVAELLEILGSIINGFALPLKEEHKLFLTRVLLPLHKVKSLSMYHPQLAYCIVQFLEKDASLTEDVVLGLLRYWPKVNSTKEVMYLNEVEDIFEVMDPAEFAKVQEPLFHQLAKSVASPHFQVAERALYFWNNEYFCNLVSDNVEIILPIMFAPLYENSKGHWNRTIHGMVYNAMKLFMEINPQLFDDCSHDYNEQQNNAPARQALRDRKWAAITDQASKKSNGAAGTASSDSVTDDNQKRLDSLKLQDGDRRDRRPHERQSSQGSSRSQR

SEQ ID NO: 7295 - DNA, 4587 bp, Muscodor strobelii
  misc_feature: SGI EST ID NO. CUFF.18051.0
  misc_feature: Variant of the nucleotide sequence at SEQ ID NO 7293
aaggtcgctggtcttcgaccgtcttcatcagacgcccaaggatgtgcccgagggactgcgcacccccaagcgccagcactcttcgcgcttcgatgtgtctccgcatcctcatcgcgagctggagaagatacctggcttccacgaggtgccgcctaaccgccggcaggagctcttcatgcagaagatcgaccaatgcaatgtcatctttgactttaacgacgccagtggtgacatgaaatccaaggagatcaagcgtctggctctgcacgagctgctcgactacgtcgccaacaaccgacaggtcatcaccgagcccatgtacccacgagtggtggagatgttcgccaagaacctatttcgccccatccctccgcccatgaaccctcagggcgaagccttcgatcccgaggaagacgagccggttctcgaggtcgcatggccgcatatccaagtggtctacgagttcttccttcgattcatagagagccaggattttaacactaacattgccaaagcctacattgatcacagctttgtgcttcaactcctcgaattgttcgactcggaagacccacgcgagagagacttcttgaagacaaccctgcatcgcatttatggaaagttcctcaaccttcgctctttcattcggcgatccatcaacaatgtcttcttccaatttacgtacgagacggagagattcaatggagtggcagagttgctcgagattctaggctcgatcatcaacggttttgccctcccgctaaaggaagagcacaaactgttcttgactagggtgcttctccccctccataaagtcaagagcttgagcatgtaccatcctcagctcgcttactgcatcgtccaatttctcgaaaaggatgcctcgttgactgaggatgttgtgcttggtcttttgcggtactggcccaaggtcaacagtaccaaagaagtcatgtatctcaatgaagtcgaagacatcttcgaggtcatggatccggctgaatttgccaaggtgcaagagccccttttccatcagctcgccaagtccgtggccagccctcacttccaagttgcggagcgagcattgtatttctggaataacgagtatttttgcaatctggtgagcgacaacgtggagatcattctacccatcatgtttgcccctctgtacgaaaactccaagggtcattggaacagaacaattcacggcatggtgtacaatgcaatgaagctattcatggagataaacccgcagttgtttgacgactgttcccacgattataacgagcagcaaaacaacgcgcctgcgcgccaagctcttcgagacaggaagtgggcagccattacggaccaagcaagcaagaagtccaacggtgctgcagggacggcttcgtcggactccgttactgacgataatcaaaaaaggcttgactcgctcaagctacaggatggcgatcgtagggatcgtcgccctcatgagagacaaagctcacagggctcctcgagaagccaaagatgatacccgtcccgttatactactcaaatcctaatccagggacgctaatctatcttcgtttgcgtttccatgataggcctttcagcatcgtcaactcgggatacatgaacccgtcgtatttctacttccaactcacattaatttgcagcctgcaaagcctatcaacttacggtctgtgttcacactacgcccgcggcccactaacgccagccgcaacatatgacccttctctgtgcttgcacagcacatacgattctcacattgaaatgaccaattggtctgttactgtcgcatccccttgtatccacacttagcagtagtggatcattgccctcgcctcctgcaattaggaggtttgtcgacgtctacgcgtttcccgtacatacttgacgaaaaatccagacttcttttgatgttggtcacccactgggtggttagatcttcaatattgggtggatggccgcccacttcactcgaaatgatagctgtagaacgatgagtcgattgttctcatgacaaggaatgaaagggagtccgatagggaaccagatagggggagtttcagaggaggcgatatctgggagacgcacagatcaaatcgtgcgcgcttctgccaggtcttgtatcgagtctgtccatggcagaattagactttgttgccatgtgactagacacggaaagagaggcgcaaaagggggaatcccactgggcaacgggggttgaatggcatgatttttctacgttgtcaatggccagtaagcccgctcttgatagacagttgcttttcctcagtctcctccatgtttagtagattgcacatcctcctgttgtttgcaaagcttggctaccatggaaactcctctgccctgttgcgtaaaagtactgtgaaaagaccaagcaaacttgtcaacaaatgacgtaggtttttgaagaatatattatctatactccagtgagctggtagcctcattgaccattgcatcataagcacgacttaaagtgtgagagtacccaagttcttcgcgcttagaactagacagcatgataaagcgacggagcttcagcttgtattcctcatcatatggtggtgatgacaccatgcgctcgattttcacgtacaaatacaccttttccttcctgtactacctgacgcatgctggagtgagtttgtattagtttactttgtacacactctccaagtccacaatctcgtctactcctctctaacatatccaagcgcttggcccatcttgaccttctgccctttctccacggcccaagcaaacccgcctttagcaccggggttttccgcaacgggtgcttcaaagaccaacacaatcgtacttcccagcttgaacccacccatctcatcgccacggcgtagcgcatggcctccaagcacggcactggcatcagcgtacgtggcttccgcgaagccactatacggctctcccctcgcggcagcctcttccgccgctctgtcggcggcggtatcagtcaagagtgaattcgtccgcaactccttatcgaagttcaccatgatggaaccgacgttcgtcgcgcccacggggacataactgaagaaaccccatctccagcgacccagcagaacgattcgctcattcagcgtgaataagccaggcatcgtccgctgtaagtacggactgacggagtacaactcccctgcgaaatgccgccttcgctcgacgacccagttagcgggggagtgaaaccggtggtaatcccccggtgcgagatacactacggcgtagtatagtgatgtcttgttatcggggctcagcatgtcgtaccatgctttttcacccagtgccaattccgccctgacttctgagacggcgccgggggacgaaggacgtgcggtttggtcctggatcttgaggttggtgtgtgattcatctggaccacctgataggaggtccgggagtgagtacgatattccgtttacgcgagcgaattcttcgtccccttgaaccatctgttcgtcgccttttgcttttgccgcctttgcgcgttcagagtcgagggtcgcggagctctggctggatatactgggtgtgggtgtatttttgcccagcaacgcatcgatggtatatgtcatgcccttgacctgctcaatgtcatttccctctatcttgccaaattgcaatacccttccatctgctggtgataggagggcgttcggatcagagtcgaggggtcgcacaccgggcttcaatgtgcggtaaaagaatgctgcgaggttgggatagacgcggatgtctggttcggacacctcgtccatgttcacgccgaagatgaaggcgtatagcttgaaacccggtgatcgcaggtagtagggtatattgatctcgttgaatctgccccataaccgcgacatggccttgaggggcagggtagacatgatctggacctgccagggcccgtcggggcgcacgcgtggccgcttcttggggcgcggtccatcttcttctgcttctcgctctagccgttctttctctctcgcttgggttttgtagaattgtaccaagcccagaaagcctatgccgagggtgacggggatgggataccagtggatttttgtgtctttcagagattggcgtaggcgtgagcggaaaggatcttggtttgaggatgatgcgctgaattggcgtgtggatgggtggcggacgagggttcgagggtgccgacagagacatcgcggttcgatcgaggttgttggacgaactcgagcgcgtgcgagcgccgctgagcgagtcgccattttggtcgcgccgtggacgaatgaaaaagtaataggggagaagttactgaaggcacggcgaggcttggttatagcatatcaagcatctagctgcggcctcgtccacaatggtgatgatggagggcggcgagagaggatctacatggatggaaattgagcttggattggggcagctgagaatgacgcagtggttctcgactatcacttcttttgtacatacaatcgattgtcggcaccagctcgtttcagctctctccacatatgctcctcttggcaaaagctgatacag

SEQ ID NO: 7296 - DNA, 1569 bp, Muscodor strobelii
  misc_feature: SGI cDNA ID NO. 562191
  misc_feature: Reduced expression when VOC is produced
  misc_feature: Encodes the peptide sequence at SEQ ID NO 7297
atggcgactcgctcagcggcgctcgcacgcgctcgagttcgtccaacaacctcgatcgaaccgcgatgtctctgtcggcaccctcgaaccctcgtccgccacccatccacacgccaattcagcgcatcatcctcaaaccaagatcctttccgctcacgcctacgccaatctctgaaagacacaaaaatccactggtatcccatccccgtcaccctcggcataggctttctgggcttggtacaattctacaaaacccaagcgagagagaaagaacggctagagcgagaagcagaagaagatggaccgcgccccaagaagcggccacgcgtgcgccccgacgggccctggcaggtccagatcatgtctaccctgcccctcaaggccatgtcgcggttatggggcagattcaacgagatcaatataccctactacctgcgatcaccgggtttcaagctatacgccttcatcttcggcgtgaacatggacgaggtgtccgaaccagacatccgcgtctatcccaacctcgcagcattcttttaccgcacattgaagcccggtgtgcgacccctcgactctgatccgaacgccctcctatcaccagcagatggaagggtattgcaatttggcaagatagagggaaatgacattgagcaggtcaagggcatgacatataccatcgatgcgttgctgggcaaaaatacacccacacccagtatatccagccagagctccgcgaccctcgactctgaacgcgcaaaggcggcaaaagcaaaaggcgacgaacagatggttcaaggggacgaagaattcgctcgcgtaaacggaatatcgtactcactcccggacctcctatcaggtggtccagatgaatcacacaccaacctcaagatccaggaccaaaccgcacgtccttcgtcccccggcgccgtctcagaagtcagggcggaattggcactgggtgaaaaagcatggtacgacatgctgagccccgataacaagacatcactatactacgccgtagtgtatctcgcaccgggggattaccaccggtttcactcccccgctaactgggtcgtcgagcgaaggcggcatttcgcaggggagttgtactccgtcagtccgtacttacagcggacgatgcctggcttattcacgctgaatgagcgaatcgttctgctgggtcgctggagatggggtttcttcagttatgtccccgtgggcgcgacgaacgtcggttccatcatggtgaacttcgataaggagttgcggacgaattcactcttgactgataccgccgccgacagagcggcggaagaggctgccgcgaggggagagccgtatagtggcttcgcggaagccacgtacgctgatgccagtgccgtgcttggaggccatgcgctacgccgtggcgatgagatgggtgggttcaagctgggaagtacgattgtgttggtctttgaagcacccgttgcggaaaaccccggtgctaaaggcgggtttgcttgggccgtggagaaagggcagaaggtcaagatgggccaagcgcttggatatgttagagaggagtag

SEQ ID NO: 7297 - protein, 522 aa, Muscodor strobelii
  misc_feature: SGI Peptide ID NO. 562191
  misc_feature (175)..(518): Pfam Id: PF02666 Pfam Desc: Phosphatidylserine decarboxylase
  misc_feature (175)..(231): Pfam Id: PF02666 Pfam Desc: Phosphatidylserine decarboxylase
  misc_feature (337)..(420): Pfam Id: PF02666 Pfam Desc: Phosphatidylserine decarboxylase
  misc_feature (466)..(518): Pfam Id: PF02666 Pfam Desc: Phosphatidylserine decarboxylase
  misc_feature (38)..(519): NCBI GI: 171694193 Blast Desc: protein product [Podospora anserina] gi|170947045|emb|CAP73850.1| protein product [Podospora anserina]
  misc_feature (22)..(521): NCBI GI: 46109966 Blast Desc: FG01865.1 [Gibberella zeae PH-1]
  misc_feature (38)..(522): NCBI GI: 39957927 Blast Desc: MGG_09213 [Magnaporthe grisea 70-15] gi|145013349|gb|EDJ97990.1| MGG_09213 [Magnaporthe grisea 70-15]
  misc_feature (4)..(522): NCBI GI: 261360905 Blast Desc: phosphatidylserine decarboxylase proenzyme [Verticillium albo-atrum VaMs.102]
  misc_feature (1)..(519): NCBI GI: 85103222 Blast Desc: phosphatidylserine decarboxylase proenzyme 1, mitochondrial precursor [Neurospora crassa OR74A] gi|11595576|emb|CAC18178.1| related to phosphatidylserine 1 1,
  misc_feature (17)..(520): NCBI GI: 240108687 Blast Desc: phosphatidylserine decarboxylase, [Coccidioides posadasii C735 delta SOWgp]
  misc_feature (17)..(520): NCBI GI: 119186125 Blast Desc: CIMG_03110 [Coccidioides immitis RS]
  misc_feature (44)..(521): NCBI GI: 225561426 Blast Desc: phosphatidylserine decarboxylase proenzyme [Ajellomyces capsulatus G186AR]
  misc_feature (39)..(521): NCBI GI: 261191408 Blast Desc: phosphatidylserine decarboxylase proenzyme [Ajellomyces dermatitidis SLH14081] gi|239589878|gb|EEQ72521.1| phosphatidylserine decarboxylase proenzyme [Ajellomyces SLH14081]
  misc_feature (25)..(521): NCBI GI: 226278716 Blast Desc: phosphatidylserine decarboxylase proenzyme [Paracoccidioides brasiliensis Pb01]
  misc_feature (116)..(519): SWISSPROT Homolog: EC 4.1.1.65 Phosphatidylserine decarboxylase
  misc_feature: Useful for introducing or modulating the production of volatile compounds
MATRSAALARARVRPTTSIEPRCLCRHPRTLVRHPSTRQFSASSSNQDPFRSRLRQSLKDTKIHWYPIPVTLGIGFLGLVQFYKTQAREKERLEREAEEDGPRPKKRPRVRPDGPWQVQIMSTLPLKAMSRLWGRFNEINIPYYLRSPGFKLYAFIFGVNMDEVSEPDIRVYPNLAAFFYRTLKPGVRPLDSDPNALLSPADGRVLQFGKIEGNDIEQVKGMTYTIDALLGKNTPTPSISSQSSATLDSERAKAAKAKGDEQMVQGDEEFARVNGISYSLPDLLSGGPDESHTNLKIQDQTARPSSPGAVSEVRAELALGEKAWYDMLSPDNKTSLYYAVVYLAPGDYHRFHSPANWVVERRRHFAGELYSVSPYLQRTMPGLFTLNERIVLLGRWRWGFFSYVPVGATNVGSIMVNFDKELRTNSLLTDTAADRAAEEAAARGEPYSGFAEATYADASAVLGGHALRRGDEMGGFKLGSTIVLVFEAPVAENPGAKGGFAWAVEKGQKVKMGQALGYVREE

SEQ ID NO: 7298 - DNA, 2397 bp, Muscodor strobelii
  misc_feature: SGI cDNA ID NO. 562192
  misc_feature: Reduced expression when VOC is produced
  misc_feature: Encodes the peptide sequence at SEQ ID NO 7299
atggcttccccggcgaccgacgaggtggttgctgaccctgagtccttcacattacaaatcgtctctccttctgccggcgtgccgcagcctctctcgtttgagggtcttcccacctctaccaccgtccagcagctgaaggagaagatacgagaccatctcgactcaaaacctcccggcacccagcaacgtctcatccaccagggccatctgttgcgagatgcccaaaccatgagggatgttttcggcaccaacctgcgcaccaacaatcaccagacagtccacctggccctccgccctgccgaagacgctgctcccgcgccgattgctccgggtacacagcctattcctctaccgcccgcccaagcgcaacgaccaggccaacttcaccctcgccctcatcctcatccaccaccgcaagcccagttttatgtccctgtaaatggcaatgcggctcctcgtcccggccacctccaccagcatgcccaattccaaccccaccagtttcctgccgggcctacacctcagctacaccacccccagatatactacggtatgccgggtggtcccgtgccgggccctaattatcatacggctgccttaacgcagcccggcctggtgcaccaacaacaagcggatttgcagcagaggaatctccagtccatgaccaacagagtgctggagaatcagtggcaccagcaactacttgcattgcagcagaggaatatagaagctattcaagcagccggcaggttggcccagcaggcccaacttcatcttgcagagcaacatcgtctcgcacaccaaaatcatctggctgctcagaaccccccagcaaaccaagctcctcctcagcatccgcatccggcccctcaagtgcagccgccctcggggcaaccggccatggcgcaggtacccggccggacgccggatcctccacgcgcggtgactatggaaggccttggcccagacggacagagatggcgtgtcaccgtgaacgattccgtcgctctggactgggcccgcagaacaggtagattagggagcccggccaattctgggccatctggccaatcggctccgacaccccggccgcaatccgtaccaaacgctggatccgcgcctttgccagactccgaagtacagaacatcataagagcagcggatgccggatctgcgacgcgcatcatgaccgatgccatgcgcaggatagccagcagctcctcgatacccaacctcgacctcgccaatcacgcgggtcagcagcctatccgtcctggagtgactacaactcctgttccctcacatttcacaggtgcttcggttcaaccagaaggagtcgcaagccaagctaccacgacacctgaagtatatatcctgtcttcgcctagtggacccaggggccttcttatgaacggaggctcagggatgtactatacgccgccagcacgcttgatatctcagcctaccggtctacccatccctcccagatccaccgcagctgcttcaggaagcagcgtgcaagctcagtatgggctacctcctacaatcatccagaggactcttgcacagggcaatcaaacctaccccctccaaccaactcgtacacagccaggcgaccaggctcaggcgcaaccgcagcaggggatggatctaccggttccagtgcagccccatgcgagacgcgcaaacaacccacagattcgagctgtccagatcgctcaggtgtggccacatgtatggatgatcgttaggttggctctattcatctggtggtttacttcacctacatcgagttggtcacgatggcttacagtggtctcggtcgcagtcgtgctgtttattatgaacacaggtttgctcaatccacttgccgagcaagtctgggtcccgctgcgacgacacttggagaatctgatacccctagctgccgagcatcgggaggctcgtcgcgccattattgggcaggatggtcaaggtcccgctggcaatggccccggccctacagaggcgagagaacctggcccagctgaagtcgctgccagacttgcacagcagcgccgtcgtgataacacaaactggttagttaatactgcacgcagacttgaacgtgccggtatactttttcttgcaagtctcgccccaggcctagcagagaggcatatcgcccagattgaggcggaagcgagagccgaacgtcagcgccaggaagaagctgaggcagctgctgcggctgcccgggaagcggcacagaatgccgagagcaatgagacgagtgatgcatcctctactaatgcgggagctttacacaatcctgctctatcatctacgggcgcggaacaggctgaacgagacgcgaatgggcccgaagaagcccaggaaccgctcattgctctgtaa

SEQ ID NO: 7299 - protein, 798 aa, Muscodor strobelii
  misc_feature: SGI Peptide ID NO. 562192
  misc_feature (39)..(100): Pfam Id: PF00240 Pfam Desc: Ubiquitin family
  misc_feature (12)..(798): NCBI GI: 261360906 Blast Desc: conserved [Verticillium albo-atrum VaMs.102]
  misc_feature (313)..(724): NCBI GI: 116198315 Blast Desc: CHGG_07313 [Chaetomium globosum CBS 148.51] gi|88178592|gb|EAQ86060.1| CHGG_07313 [Chaetomium globosum CBS 148.51]
  misc_feature (307)..(722): NCBI GI: 156051210 Blast Desc: SS1G_07012 [Sclerotinia sclerotiorum 1980] gi|154704790|gb|EDO04529.1| SS1G_07012 [Sclerotinia sclerotiorum 1980]
  misc_feature (352)..(724): NCBI GI: 164426820 Blast Desc: NCU03694 [Neurospora crassa OR74A] gi|16944563|emb|CAD11350.1| [Neurospora crassa] gi|157071491|gb|EAA32234.2| [Neurospora crassa OR74A]
  misc_feature (307)..(722): NCBI GI: 154299228 Blast Desc: BC1G_11792 [Botryotinia fuckeliana B05.10] gi|150857495|gb|EDN32687.1| BC1G_11792 [Botryotinia fuckeliana B05.10]
  misc_feature (452)..(724): NCBI GI: 145605527 Blast Desc: [Magnaporthe grisea 70-15] gi|145013348|gb|EDJ97989.1| [Magnaporthe grisea 70-15]
  misc_feature (572)..(724): NCBI GI: 171694191 Blast Desc: protein product [Podospora anserina] gi|170947044|emb|CAP73849.1| protein product [Podospora anserina]
  misc_feature (572)..(724): NCBI GI: 46109964 Blast Desc: FG01864.1 [Gibberella zeae PH-1]
  misc_feature (5)..(100): NCBI GI: 156051210 Blast Desc: SS1G_07012 [Sclerotinia sclerotiorum 1980] gi|154704790|gb|EDO04529.1| SS1G_07012 [Sclerotinia sclerotiorum 1980]
  misc_feature (11)..(103): NCBI GI: 256728498 Blast Desc: NECHADRAFT_50799 [Nectria haematococca mpVI 77-13-4]
  misc_feature: Useful for introducing or modulating the production of volatile compounds
MASPATDEVVADPESFTLQIVSPSAGVPQPLSFEGLPTSTTVQQLKEKIRDHLDSKPPGTQQRLIHQGHLLRDAQTMRDVFGTNLRTNNHQTVHLALRPAEDAAPAPIAPGTQPIPLPPAQAQRPGQLHPRPHPHPPPQAQFYVPVNGNAAPRPGHLHQHAQFQPHQFPAGPTPQLHHPQIYYGMPGGPVPGPNYHTAALTQPGLVHQQQADLQQRNLQSMTNRVLENQWHQQLLALQQRNIEAIQAAGRLAQQAQLHLAEQHRLAHQNHLAAQNPPANQAPPQHPHPAPQVQPPSGQPAMAQVPGRTPDPPRAVTMEGLGPDGQRWRVTVNDSVALDWARRTGRLGSPANSGPSGQSAPTPRPQSVPNAGSAPLPDSEVQNIIRAADAGSATRIMTDAMRRIASSSSIPNLDLANHAGQQPIRPGVTTTPVPSHFTGASVQPEGVASQATTTPEVYILSSPSGPRGLLMNGGSGMYYTPPARLISQPTGLPIPPRSTAAASGSSVQAQYGLPPTIIQRTLAQGNQTYPLQPTRTQPGDQAQAQPQQGMDLPVPVQPHARRANNPQIRAVQIAQVWPHVWMIVRLALFIWWFTSPTSSWSRWLTVVSVAVVLFIMNTGLLNPLAEQVWVPLRRHLENLIPLAAEHREARRAIIGQDGQGPAGNGPGPTEAREPGPAEVAARLAQQRRRDNTNWLVNTARRLERAGILFLASLAPGLAERHIAQIEAEARAERQRQEEAEAAAAAAREAAQNAESNETSDASSTNAGALHNPALSSTGAEQAERDANGPEEAQEPLIAL

SEQ ID NO: 7300 - DNA, 3133 bp, Muscodor strobelii
  misc_feature: SGI EST ID NO. CUFF.18057.0
  misc_feature: Variant of the nucleotide sequence at SEQ ID NO 7298
tgggaaggtacagctgttatcaacaacatgcagccatggtttgatgtcaccaggatgactgcctcattgccgacatctttcttcttcctccatcttacctgacctatgctgtgtttgtttcctaggccattggttgccgccacacacatggtactgactgtcctttgatgcacccttctctcctttagtgacctgtatcatgcattttcccggcgagtgaagcacgccgcttgacttacaaaccgccggagccgcgtagctgtgcctgccatgtgagccacattcgcaaagtgcgccgatcgttctttcttctgaacctatctgtcgccgttgggagcgacaattttgactctttctgcttggacctccctctttgatcctgtccagaccaacatcgccaactcaccatggcttccccggcgaccgacgaggtggttgctgaccctgagtccttcacattacaaatcgtctctccttctgccggcgtgccgcagcctctctcgtttgagggtcttcccacctctaccaccgtccagcagctgaaggagaagatacgagaccatctcgactcaaaacctcccggcacccagcaacgtctcatccaccagggccatctgttgcgagatgcccaaaccatgagggatgttttcggcaccaacctgcgcaccaacaatcaccagacagtccacctggccctccgccctgccgaagacgctgctcccgcgccgattgctccgggtacacagcctattcctctaccgcccgcccaagcgcaacgaccaggccaacttcaccctcgccctcatcctcatccaccaccgcaagcccagttttatgtccctgtaaatggcaatgcggctcctcgtcccggccacctccaccagcatgcccaattccaaccccaccagtttcctgccgggcctacacctcagctacaccacccccagatatactacggtatgccgggtggtcccgtgccgggccctaattatcatacggctgccttaacgcagcccggcctggtgcaccaacaacaagcggatttgcagcagaggaatctccagtccatgaccaacagagtgctggagaatcagtggcaccagcaactacttgcattgcagcagaggaatatagaagctattcaagcagccggcaggttggcccagcaggcccaacttcatcttgcagagcaacatcgtctcgcacaccaaaatcatctggctgctcagaaccccccagcaaaccaagctcctcctcagcatccgcatccggcccctcaagtgcagccgccctcggggcaaccggccatggcgcaggtacccggccggacgccggatcctccacgcgcggtgactatggaaggccttggcccagacggacagagatggcgtgtcaccgtgaacgattccgtcgctctggactgggcccgcagaacaggtagattagggagcccggccaattctgggccatctggccaatcggctccgacaccccggccgcaatccgtaccaaacgctggatccgcgcctttgccagactccgaagtacagaacatcataagagcagcggatgccggatctgcgacgcgcatcatgaccgatgccatgcgcaggatagccagcagctcctcgatacccaacctcgacctcgccaatcacgcgggtcagcagcctatccgtcctggagtgactacaactcctgttccctcacatttcacaggtgcttcggttcaaccagaaggagtcgcaagccaagctaccacgacacctgaagtatatatcctgtcttcgcctagtggacccaggggccttcttatgaacggaggctcagggatgtactatacgccgccagcacgcttgatatctcagcctaccggtctacccatccctcccagatccaccgcagctgcttcaggaagcagcgtgcaagctcagtatgggctacctcctacaatcatccagaggactcttgcacagggcaatcaaacctaccccctccaaccaactcgtacacagccaggcgaccaggctcaggcgcaaccgcagcaggggatggatctaccggttccagtgcagccccatgcgagacgcgcaaacaacccacagattcgagctgtccagatcgctcaggtgtggccacatgtatggatgatcgttaggttggctctattcatctggtggtttacttcacctacatcgagttggtcacgatggcttacagtggtctcggtcgcagtcgtgctgtttattatgaacacaggtttgctcaatccacttgccgagcaagtctgggtcccgctgcgacgacacttggagaatctgatacccctagctgccgagcatcgggaggctcgtcgcgccattattgggcaggatggtcaaggtcccgctggcaatggccccggccctacagaggcgagagaacctggcccagctgaagtcgctgccagacttgcacagcagcgccgtcgtgataacacaaactggttagttaatactgcacgcagacttgaacgtgccggtatactttttcttgcaagtctcgccccaggcctagcagagaggcatatcgcccagattgaggcggaagcgagagccgaacgtcagcgccaggaagaagctgaggcagctgctgcggctgcccgggaagcggcacagaatgccgagagcaatgagacgagtgatgcatcctctactaatgcgggagctttacacaatcctgctctatcatctacgggcgcggaacaggctgaacgagacgcgaatgggcccgaagaagcccaggaaccgctcattgctctgtaaggggaggaaatgaaggtcatcgactgagaaattagatgccgtagcataggacgttgggacgattagaacacgatcatgacatgtatgagtatgcaaatgcaaccaatatctcggctgagattgaaaccgcttgacgtggaaagcaaagggtgacttgggcttagtaaggcgggaagtacgttgctctactgcacagatgaggagtgaagcttggtcttaacagaaagggaaagtcctgacagttgtccaagtaatcaagaagaatgcggattcaaccctcacgaaggctgcgtgacaggtatgctatatgacccaagtgtgagtgcggg

SEQ ID NO: 7301 - DNA, 1536 bp, Muscodor strobelii
  misc_feature: SGI cDNA ID NO. 562193
  misc_feature: Encodes the peptide sequence at SEQ ID NO 7302
atggaagtactcaagcggccagcagtgttggcaccaacattattggttttgtacatactgtatcgaatcatttttgtccgttccaaacgacctaaccttccaatcgttggtgcgaagcccggggaatggttccccttcatgagagcaggacttcgaaatgttcgtggtatgcgacaagcctatgaaaatgactacataaaaaaccatcgggatcatgccgtcattttccctttctttggaggcctcgagtttgtggtgttgccggcgaaagaacttcaatggcttgtcgaccaacccgagtcagatatcagtctacaccatcagttgactctgcaactacaacttccctatactatacctgatgatcgcctgtatcacaaccctcaccatgtacccttgatctcgagtaccttgactcgagagatgtacaacctcataccagatctttgtgaggaaactcaaattgccgtcagtcagttctggggtaccgacgcagagaattttcaagagctatctgtctacgattcgatgcagaaagtcatcggtcagatcactaatcgcatatttgttggagctccgctgtgtcgagatatggacctcctgaaggcatgcatggacttctcgcaatcagtatcgctgtcatcgactctactcaagattttcccctccgtcataaggccagtcgtggcaccgcttatacttaggaaaaataggagagcggtcaaggaagcaggcgttatcttgaaacccgagatcgccgagcggttgcgtcgattcgatgagcgagaaaagatctccggcgacaaaccgatcgacgagccgaacgacttcctacagtggtgtatcagacaaggcaaatcaactggggacccgtggtcgtgggatcctgaaacactcgttggtcgtgtgttactacttgctctggcttcgatacatacttccacctttaccatatcatccttattgtttgacttgcttgcggggccgccagaagatatagaggaactaagagcagaagtctcgatcgccctcgcggagaatggaggggtgtggagtaaaaaggttctcagcgcaaccccaaaactcgagagcgcgttccgagaatcccaacgactgaactcgttcgccgcgatcagcacgagtcggatggtgatgaacccccaaggcgtaacaactccttccggcgttaagattccgtataagtcgcttgtatgtacaccgtcatactcgattcttcatgatgaaagaacatacgaggaaccatgggctttcaagcccttccgtttcgtaggaacgaatgaaggggagaaagctaaatcattcgcgaccacgagtgccgactggccggcctttggacatgggcgaaactcgtgccccgggcgattcttcgcttctgctgaactcagattattgatggggtatctcttgttaaattatgactttgagatgataaatacgagacccgagaatttgtggattggtatggcaaggatacctaatcctaaggaatcgataaaagtgcgaaggagaaaatga

SEQ ID NO: 7302 - protein, 511 aa, Muscodor strobelii
  misc_feature: SGI Peptide ID NO. 562193
  misc_feature (40)..(509): Pfam Id: PF00067 Pfam Desc: Cytochrome P450
  misc_feature (217)..(509): Pfam Id: PF00067 Pfam Desc: Cytochrome P450
  misc_feature (2)..(509): NCBI GI: 46139535 Blast Desc: FG11282.1 [Gibberella zeae PH-1]
  misc_feature (14)..(511): NCBI GI: 121711948 Blast Desc: cytochrome P450 [Aspergillus clavatus NRRL 1] gi|119401741|gb|EAW12163.1| cytochrome P450 [Aspergillus clavatus NRRL 1]
  misc_feature (14)..(506): NCBI GI: 238845012 Blast Desc: cytochrome P450 [Microsporum canis CBS 113480]
  misc_feature (2)..(511): NCBI GI: 212538421 Blast Desc: cytochrome P450, [Penicillium marneffei ATCC 18224] gi|210069108|gb|EEA23199.1| cytochrome P450, [Penicillium marneffei ATCC 18224]
  misc_feature (1)..(511): NCBI GI: 145609640 Blast Desc: MGG_03104 [Magnaporthe grisea 70-15] gi|149210871|ref|XP_001522810.1| MGCH7_ch7g908 [Magnaporthe grisea 70-15] gi|86196863|gb|EAQ71501.1| MGCH7_ch7g908 grisea
  misc_feature (2)..(511): NCBI GI: 242765002 Blast Desc: cytochrome P450, [Talaromyces stipitatus ATCC 10500] gi|218724082|gb|EED23499.1| cytochrome P450, [Talaromyces stipitatus ATCC 10500]
  misc_feature (1)..(510): NCBI GI: 116200530 Blast Desc: CHGG_10810 [Chaetomium globosum CBS 148.51] gi|88175524|gb|EAQ82992.1| CHGG_10810 [Chaetomium globosum CBS 148.51]
  misc_feature (33)..(511): NCBI GI: 145602880 Blast Desc: MGG_13768 [Magnaporthe grisea 70-15] gi|145011241|gb|EDJ95897.1| MGG_13768 [Magnaporthe grisea 70-15]
  misc_feature (41)..(510): NCBI GI: 242811722 Blast Desc: cytochrome P450, [Talaromyces stipitatus ATCC 10500] gi|218714147|gb|EED13570.1| cytochrome P450, [Talaromyces stipitatus ATCC 10500]
  misc_feature (85)..(511): NCBI GI: 39974563 Blast Desc: MGG_00572 [Magnaporthe grisea 70-15] gi|145018527|gb|EDK02806.1| MGG_00572 [Magnaporthe grisea 70-15]
  misc_feature (133)..(510): SWISSPROT Homolog: EC 1.14.13.78 Ent-kaurene oxidase
MEVLKRPAVLAPTLLVLYILYRIIFVRSKRPNLPIVGAKPGEWFPFMRAGLRNVRGMRQAYENDYIKNHRDHAVIFPFFGGLEFVVLPAKELQWLVDQPESDISLHHQLTLQLQLPYTIPDDRLYHNPHHVPLISSTLTREMYNLIPDLCEETQIAVSQFWGTDAENFQELSVYDSMQKVIGQITNRIFVGAPLCRDMDLLKACMDFSQSVSLSSTLLKIFPSVIRPVVAPLILRKNRRAVKEAGVILKPEIAERLRRFDEREKISGDKPIDEPNDFLQWCIRQGKSTGDPWSWDPETLVGRVLLLALASIHTSTFTISSLLFDLLAGPPEDIEELRAEVSIALAENGGVWSKKVLSATPKLESAFRESQRLNSFAAISTSRMVMNPQGVTTPSGVKIPYKSLVCTPSYSILHDERTYEEPWAFKPFRFVGTNEGEKAKSFATTSADWPAFGHGRNSCPGRFFASAELRLLMGYLLLNYDFEMINTRPENLWIGMARIPNPKESIKVRRRK

SEQ ID NO: 7303 - DNA, 3014 bp, Muscodor strobelii
  misc_feature: SGI EST ID NO. CUFF.18247.0
  misc_feature: Variant of the nucleotide sequence at SEQ ID NO 7301
tcagccacgacagaactgttgcagaatgcgtcacatccatcctaacgtcatatggatccttgccgttgatccagctgcacagtcctagctcctgccccatcccatcccacccacctacggcatcactccgagtgccgactacagcgttcgactgttatttgtgaaagttatgcgaatgcgaccttaggtacccgtttactagtagtcttggctgaggaagctactattgactgccgaagcgagaggacctagaggctaggaggatccatgcccttgcaactcgacaatttcattatcatctacggtgggaacgtaggcttgccaccgcatactacccaagctcgactgccgagctccagatatactcactatcgagcgttgatccaactctaaagccggcgttcgcgtccaggaaaaggctgtgttctcgaaggcttattgatacgaatctcaaatctaggctgtatttccccaattaggtgcgtgttatctctgaccatcaccatacccttctttccgcctctccccgcttgattggcgggctcgtttaagatcctgcgagcggcacagctcttatagtagtcatagcagcatcatatcaccagattcggtatacattctaggccagatgtgctccacgaccacctgcataatctcacgagcacatgtctagagctagatcaagaccttgtgtcgccctgtttttatttccgcgccacatctgcataagccatccataagcctaccagtctacgtgtcaataattcgtgaaaactagtttgtcttggattctattggaatatatgcaggcacggatcgtgcagtgtactttggattctcgatggatttgagtaatcactcctccagcggatcaccatgatgtgacaagactttatttatctgctaaatcttgagatgatctacggtgttaggatcatggatggcctgtgagcaaagtaacagtcaatattagtgtagtcggccgactgtggtattatcacaaatgtcggccccggcccatagacccgtgcaaggaaccatgactccgacaaatcatgaagctcgtataggacctagataaggagagatgaattgatataggaaaggcagatcgtcatatgacgagatgcgctgacttatatagtcctaacataagtcgtcaaaagtttgcgccgcaattgttaatggttctcggatgctgctttttttcaagagagcaatacgctttagagacgatggaagtactcaagcggccagcagtgttggcaccaacattattggttttgtacatactgtatcgaatcatttttgtccgttccaaacgacctaaccttccaatcgttggtgcgaagcccggggaatggttccccttcatgagagcaggacttcgaaatgttcgtggtatgcgacaagcctatgaaaatgactacagtaaggtcgccatcataccctcattacgctattcgccacatagaatcaatctcttggggatgagacttatcacgggaacttttcgtacactcgcgaccaagaacgtgcacagactaacaccaagaacgtgcagtaaaaaaccatcgggatcatgccgtcattttccctttctttggaggcctcgagtttgtggtgttgccggcgaaagaacttcaatggcttgtcgaccaacccgagtcagatatcagtctacaccatcagttgactctgcaactacaacttccctatactatacctgatgatcgcctgtatcacaaccctcaccatgtacccttgatctcgagtaccttgactcgagagatgtacaacctcataccagatctttgtgaggaaactcaaattgccgtcagtcagttctggggtaccgacgcagagaattttcaagagctatctgtctacgattcgatgcagaaagtcatcggtcagatcactaatcgcatatttgttggagctccgctgtgtcgagatatggacctcctgaaggcatgcatggacttctcgcaatcagtatcgctgtcatcgactctactcaagattttcccctccgtcataaggccagtcgtggcaccgcttatacttaggaaaaataggagagcggtcaaggaagcaggcgttatcttgaaacccgagatcgccgagcggttgcgtcgattcgatgagcgagaaaagatctccggcgacaaaccgatcgacgagccgaacgacttcctacagtggtgtatcagacaaggcaaatcaactggggacccgtggtcgtgggatcctgaaacactcgttggtcgtgtgttactacttgctctggcttcgatacatacttccacctttaccatatcatccttattgtttgacttgcttgcggggccgccagaagatatagaggaactaagagcagaagtctcgatcgccctcgcggagaatggaggggtgtggagtaaaaaggttctcagcgcaaccccaaaactcgagagcgcgttccgagaatcccaacgactgaactcgttcgccgcgatcagcacgagtcggatggtgatgaacccccaaggcgtaacaactccttccggcgttaagattccgtataagtcgcttgtatgtacaccgtcatactcgattcttcatgatgaaagaacatacgaggaaccatgggctttcaagcccttccgtttcgtaggaacgaatgaaggggagaaagctaaatcattcgcgaccacgagtgccgactggccggcctttggacatgggcgaaactcgtgccccgggcgattcttcgcttctgctgaactcagattattgatggggtatctcttgttaaattatgactttgagatgataaatacgagacccgagaatttgtggattggtatggcaaggatacctaatcctaaggaatcgataaaagtgcgaaggagaaaatgatatacaaccgccgggggggatggagtttatgttttgagtgccgtcgcactgaaaaacgtcgttaaatagagagccacccaatgactataccaagtacaaacataaaattt

SEQ ID NO: 7304 - DNA, 2121 bp, Muscodor strobelii
  misc_feature: SGI cDNA ID NO. 562194
  misc_feature: Encodes the peptide sequence at SEQ ID NO 7305
atgtcgaccgccgtcaagagagcctgcgatgcgtgccatcgccgcaaggtcaaatgcgatggaatcaacccctgccgcaactgcgcctccgcccagctgggctgcacgtacaacgccattccgcagaagaagggccccaagggatcgcgagccaaggtcattagcgaactgcgcgaaacgcagcggcagacaagcctatccgccaaggtccagagtcgattgaacggtctgcaaagcccaccatgcagcgctccctcgctcgcgcccacgcctggccttctggcccccgagatgatcaaggagggcatcgaattcttcttcgccaacatgtaccccatcatgcctgtgctgcatcgccagcgactcgagcagcagtgcacgtatatggagcagaacccagacacatactgtctgatcacttcgctgtgcgcttttatgatgtttcagccgggcatgagcctcccgagcaacgacccaatgctggagcatattcccggagcccacattgtatcgggaacgcttctgatggaagaagccatccgcgtgcgaaagcgatccgactacctcgacacgcccactctgaacagcctatgcacgagctacttcctcttctgctcctactacgccctcgagatgcacgacaaggcctggttttatctgcgcgaggctacgacaatggctcacttgtttggcctgactcaagaagagaagtatatacaatacgacaatgtcgaggcgtcacgcagacgccgcctttattggcttctatacgttaccgaaagggcatatgcgctgcagcgtggtcgacccctgactttgcaggctacaattaaccctcccacgatgagcgacgacccgtcagatccattggcccaccaactgactggctttctcatgttggtcaacatgttccgcccatttgacgatatgttcatcactctctggaacaagacccgaggcgaatgctcgtcctcgtatctcggcgtgctgcgaaaacaatttgcggagctgaacccaagcttcatgaacggacaggaatacgaccagcgactcatccagcagtggttgaagacggcagtctggcatctcaccatgcaaaatggctgtgtgccccagaatggccaggatcagctccactaccagatggacatgacccgcgaactggtctccatgacgtcgcaattccagacccaaagcaccgagcttttgggtgtgcctctggttgcaaagctcctcgaaatttcatgcaccctgaccgaagtccttgccatgcagcccgcttcccctgatccgtttgtcccaggtcctcgggaacacctgaactcgcttctacacatgctatcctgtgttcgcaacggagaccaccatttcctcccgcttgtgttggacaaggtccatgatatcctgcctcgcctcgcgaatcctatgcttcagcgggctcccgagaatgcttgcctcctgaacaccgaccttttcgacgggtttggtaatgctggaatggctcaaccaccgatcatgaccgacttcaagacggaaccatacacccctggcggtatgcccagcctccatgatattcctgcagcggactcatccagctcgaataatggctcggatatgaaatcgcccttcgccatgggcagctctcctgcgatgatgtctcctcatggggaataccccacgaataccgagtataactcgatgcccgagatggtcatgaactcgatgggtcagccgcagcaatcgcagcaaccgcaacacggccatcaaatgcacaatatgacgcaacagagcatgagtcaaggtcaccccatgaatagtcagatgtcagtcgatatgcaatccagtctatcacctggaatcaattcatcatctagctttgtcagcatcaaccaacctcagactccatcctataaccagccagcccagaacatgatgcacagctatcgtccaccaccacaacgcgccaatagctttatcatccaccagcaccaggccccccagattccgagaacagtgggtgactttcactcactgcaacgtgccaataccgaaaacacgtcaataagctcgataggtttgcgccacatgcaacctgaaatggacttcagtagtctgccttga

SEQ ID NO: 7305 - protein, 706 aa, Muscodor strobelii
  misc_feature: SGI Peptide ID NO. 562194
  misc_feature (7)..(45): Pfam Id: PF00172 Pfam Desc: Fungal Zn(2)-Cys(6) binuclear cluster domain
  misc_feature (188)..(289): Pfam Id: PF04082 Pfam Desc: Fungal specific transcription factor domain
  misc_feature (2)..(558): NCBI GI: 154293183 Blast Desc: BC1G_14575 [Botryotinia fuckeliana B05.10] gi|150845615|gb|EDN20808.1| BC1G_14575 [Botryotinia fuckeliana B05.10]
  misc_feature (1)..(684): NCBI GI: 85089723 Blast Desc: NCU07788 [Neurospora crassa OR74A] gi|12718353|emb|CAC28588.1| related to transcription activator amyR [Neurospora crassa] gi|28919399|gb|EAA28843.1| conserved
  misc_feature (1)..(690): NCBI GI: 145615049 Blast Desc: MGG_05343 [Magnaporthe grisea 70-15] gi|145021971|gb|EDK05991.1| MGG_05343 [Magnaporthe grisea 70-15]
  misc_feature (1)..(683): NCBI GI: 261360864 Blast Desc: C6 zinc finger protein [Verticillium albo-atrum VaMs.102]
  misc_feature (1)..(704): NCBI GI: 171692465 Blast Desc: protein product [Podospora anserina] gi|170946181|emb|CAP72982.1| protein product [Podospora anserina]
  misc_feature (2)..(705): NCBI GI: 116198417 Blast Desc: CHGG_07364 [Chaetomium globosum CBS 148.51] gi|88178643|gb|EAQ86111.1| CHGG_07364 [Chaetomium globosum CBS 148.51]
  misc_feature (4)..(615): NCBI GI: 256728771 Blast Desc: NECHADRAFT_22260 [Nectria haematococca mpVI 77-13-4]
  misc_feature (2)..(576): NCBI GI: 46110403 Blast Desc: FG02083.1 [Gibberella zeae PH-1] gi|117572657|gb|ABK40522.1| C6 zinc finger protein [Gibberella zeae]
  misc_feature (19)..(475): NCBI GI: 189201956 Blast Desc: C6 zinc finger domain containing protein [Pyrenophora tritici-repentis Pt-1C-BFP] gi|187984413|gb|EDU49901.1| C6 zinc finger domain containing protein [Pyrenophora tritici-repentis
  misc_feature (5)..(478): NCBI GI: 159123498 Blast Desc: C6 finger domain protein, [Aspergillus fumigatus A1163]
MSTAVKRACDACHRRKVKCDGINPCRNCASAQLGCTYNAIPQKKGPKGSRAKVISELRETQRQTSLSAKVQSRLNGLQSPPCSAPSLAPTPGLLAPEMIKEGIEFFFANMYPIMPVLHRQRLEQQCTYMEQNPDTYCLITSLCAFMMFQPGMSLPSNDPMLEHIPGAHIVSGTLLMEEAIRVRKRSDYLDTPTLNSLCTSYFLFCSYYALEMHDKAWFYLREATTMAHLFGLTQEEKYIQYDNVEASRRRRLYWLLYVTERAYALQRGRPLTLQATINPPTMSDDPSDPLAHQLTGFLMLVNMFRPFDDMFITLWNKTRGECSSSYLGVLRKQFAELNPSFMNGQEYDQRLIQQWLKTAVWHLTMQNGCVPQNGQDQLHYQMDMTRELVSMTSQFQTQSTELLGVPLVAKLLEISCTLTEVLAMQPASPDPFVPGPREHLNSLLHMLSCVRNGDHHFLPLVLDKVHDILPRLANPMLQRAPENACLLNTDLFDGFGNAGMAQPPIMTDFKTEPYTPGGMPSLHDIPAADSSSSNNGSDMKSPFAMGSSPAMMSPHGEYPTNTEYNSMPEMVMNSMGQPQQSQQPQHGHQMHNMTQQSMSQGHPMNSQMSVDMQSSLSPGINSSSSFVSINQPQTPSYNQPAQNMMHSYRPPPQRANSFIIHQHQAPQIPRTVGDFHSLQRANTENTSISSIGLRHMQPEMDFSSLP

SEQ ID NO: 7306 - DNA, 3009 bp, Muscodor strobelii
  misc_feature: SGI EST ID NO. CUFF.18401.1
  misc_feature: Variant of the nucleotide sequence at SEQ ID NO 7304
tcgcccttcccacacttctatcgtctgctcagctgttgttctgcacgccggcctttccatcgtcggatgccattcactctctttcagcacttgaccgcgcatccaattccagcattcgactagccagacaagacaattgccattgggatctatcgctatcgcactcgcacctgcatcacgtcccctgctcgagatctggctgcaccaccccacgttttccaatgcccaacgtctctccgcatcaccctcgacaacgggccgattaacaccacaaccgagaaaaactacaccccttccggatcccattcgacatcgacgtccgaccgacgcaccgatctggtctctctaaagacggtatcaccgcctgttcactcgcgacacaccaacatcgacgacttcgagcagtcgcactggcattcatgatgtcgaccgccgtcaagagagcctgcgatgcgtgccatcgccgcaaggtcaaatgcgatggaatcaacccctgccgcaactgcgcctccgcccagctgggctgcacgtacaacgccattccgcagaagaagggccccaagggatcgcgagccaaggtcattagcgaactgcgcgaaacgcagcggcagacaagcctatccgccaaggtccagagtcgattgaacggtctgcaaagcccaccatgcagcgctccctcgctcgcgcccacgcctggccttctggcccccgagatgatcaaggagggcatcgaattcttcttcgccaacatgtaccccatcatgcctgtgctgcatcgccagcgactcgagcagcagtgcacgtatatggagcagaacccagacacatactgtctgatcacttcgctgtgcgcttttatgatgtttcagccgggcatgagcctcccgagcaacgacccaatgctggagcatattcccggagcccacattgtatcgggaacgcttctgatggaagaagccatccgcgtgcgaaagcgatccgactacctcgacacgcccactctgaacagcctatgcacgagctacttcctcttctgctcctactacgccctcgagatgcacgacaaggcctggttttatctgcgcgaggctacgacaatggctcacttgtttggcctgactcaagaagagaagtatatacaatacgacaatgtcgaggcgtcacgcagacgccgcctttattggcttctatacgttaccgaaagggcatatgcgctgcagcgtggtcgacccctgactttgcaggctacaattaaccctcccacgatgagcgacgacccgtcagatccattggcccaccaactgactggctttctcatgttggtcaacatgttccgcccatttgacgatatgttcatcactctctggaacaagacccgaggcgaatgctcgtcctcgtatctcggcgtgctgcgaaaacaatttgcggagctgaacccaagcttcatgaacggacaggaatacgaccagcgactcatccagcagtggttgaagacggcagtctggcatctcaccatgcaaaatggctgtgtgccccagaatggccaggatcagctccactaccagatggacatgacccgcgaactggtctccatgacgtcgcaattccagacccaaagcaccgagcttttgggtgtgcctctggttgcaaagctcctcgaaatttcatgcaccctgaccgaagtccttgccatgcagcccgcttcccctgatccgtttgtcccaggtcctcgggaacacctgaactcgcttctacacatgctatcctgtgttcgcaacggagaccaccatttcctcccgcttgtgttggacaaggtccatgatatcctgcctcgcctcgcgaatcctatgcttcagcgggctcccgagaatgcttgcctcctgaacaccgaccttttcgacgggtttggtaatgctggaatggctcaaccaccgatcatgaccgacttcaagacggaaccatacacccctggcggtatgcccagcctccatgatattcctgcagcggactcatccagctcgaataatggctcggatatgaaatcgcccttcgccatgggcagctctcctgcgatgatgtctcctcatggggaataccccacgaataccgagtataactcgatgcccgagatggtcatgaactcgatgggtcagccgcagcaatcgcagcaaccgcaacacggccatcaaatgcacaatatgacgcaacagagcatgagtcaaggtcaccccatgaatagtcagatgtcagtcgatatgcaatccagtctatcacctggaatcaattcatcatctagctttgtcagcatcaaccaacctcagactccatcctataaccagccagcccagaacatgatgcacagctatcgtccaccaccacaacgcgccaatagctttatcatccaccagcaccaggccccccagattccgagaacagtgggtgactttcactcactgcaacgtgccaataccgaaaacacgtcaataagctcgataggtttgcgccacatgcaacctgaaatggacttcagtagtctgccttgatggcgttaacatcagcatatagccatgtgctttaaaagctttcggataaaagtcttcagcactatatatacgttatctgatttctggacttgtcccagcattagcaacggcctccgaggaaaaggtggaacgaaacgccggacttgccggcgttcattgttgatttaaagtaattacgtttaaggccactggcgcaaatggatggtgaaatggactataaggagcccaattggatagttgtatcatgatcctgtcacaaattttcagcgtttcgcatggtatggagtcttggataggtctcaaccctggttaagagaagcaatgtttctacgttatatacgtgatcagcattggatataaataagtattgggaatatggtaggaagccatgagcactggaaatacaaggctctgtatagttaggaatcaattttagactacatagttaagaaagatgaaccatatt

SEQ ID NO: 7307 - DNA, 837 bp, Muscodor strobelii
  misc_feature: SGI cDNA ID NO. 562195
  misc_feature: Encodes the peptide sequence at SEQ ID NO 7308
atgagggtgcctgctgctctaacgttactgctctgccttgtccattctgtccttcctctcccggcgcacatcgatacacgacagtcttggactgtgggatggtggtcttcggagctgcagcagtatggctgccggcctgttatctttgtctttgctaaggctacgtgggagcccgggaatcttggcaacacgatcggtccaacattgtctgatgggctcaagtcagtttttggagtgaagaatgtcgcgacacagggcgtcgactattatggatttatcataggcaattattatcctgggggagcgcccccgtgggcgatatttgatatgcaggctttgctgactggcgccgcggcttgttcggactccaaaatcgtggtggcgggatatagccaaggagcagcaatagtccaccgagctatcgagggcctgggcgcagatatcaaaaatcgcatcgcgggagtcgttaccttcggagatacacagacgctacaagacgggggtcgtatcgcgggctttccactaaaccgcactctcatcatctgcaacatcggtgatataatctgtacaggcacattgtacccgatattcccataccactgggactacgtcaaatgggtgccgacggcgactcttttcctcgcgcagaagatactgcaggcaaatgccgtggacccgtggcctaatggctcttttgtctggaactcgacgggctatggaggcataagctcgaggcttgccgctttgaaggcaaatttgggaaattctgcgccgaagagcctcggagtcccaacttcgaagctgcccttgccgccatctaggcgtttatcgacgtag

SEQ ID NO: 7308 - protein, 278 aa, Muscodor strobelii
  misc_feature: SGI Peptide ID NO. 562195
  misc_feature (42)..(219): Pfam Id: PF01083 Pfam Desc: Cutinase
  misc_feature (10)..(218): NCBI GI: 71001184 Blast Desc: cutinase [Aspergillus fumigatus Af293] gi|74675656|sp|Q4X1N0.1|CUTI1_ASPFU RecName: Full= cutinase 1; AltName: Full=Cutin hydrolase 1; Flags: Precursor cutinase,
  misc_feature (24)..(223): NCBI GI: 261357783 Blast Desc: cutinase-2 [Verticillium albo-atrum VaMs.102]
  misc_feature (10)..(218): NCBI GI: 119480811 Blast Desc: cutinase, [Neosartorya fischeri NRRL 181] gi|119408588|gb|EAW18537.1| cutinase, [Neosartorya fischeri NRRL 181]
  misc_feature (33)..(218): NCBI GI: 169624696 Blast Desc: SNOG_15608 [Phaeosphaeria nodorum SN15] gi|111055863|gb|EAT76983.1| SNOG_15608 [Phaeosphaeria nodorum SN15]
  misc_feature (10)..(218): NCBI GI: 46138239 Blast Desc: FG10634.1 [Gibberella zeae PH-1]
  misc_feature (41)..(223): NCBI GI: 189198862 Blast Desc: cutinase precursor [Pyrenophora tritici-repentis Pt-1C-BFP] gi|187982867|gb|EDU48355.1| cutinase precursor [Pyrenophora tritici-repentis Pt-1C-BFP]
  misc_feature (21)..(218): NCBI GI: 121698952 Blast Desc: cutinase, [Aspergillus clavatus NRRL 1] gi|119395999|gb|EAW06431.1| cutinase, [Aspergillus clavatus NRRL 1]
  misc_feature (21)..(218): NCBI GI: 67901108 Blast Desc: AN7541.2 [Aspergillus nidulans FGSC A4] gi|40742931|gb|EAA62121.1| AN7541.2 [Aspergillus nidulans FGSC A4] gi|259483860|tpe|CBF79598.1| TPA: Cutinase [Aspergillus FGSC
  misc_feature (1)..(203): NCBI GI: 145610993 Blast Desc: MGG_00734 [Magnaporthe grisea 70-15] gi|145018334|gb|EDK02613.1| MGG_00734 [Magnaporthe grisea 70-15]
  misc_feature (21)..(218): NCBI GI: 95025947 Blast Desc: cutinase [Emericella nidulans]
  misc_feature (24)..(218): SWISSPROT Homolog: EC 3.1.1.74 Cutinase
MRVPAALTLLLCLVHSVLPLPAHIDTRQSWTVGWWSSELQQYGCRPVIFVFAKATWEPGNLGNTIGPTLSDGLKSVFGVKNVATQGVDYYGFIIGNYYPGGAPPWAIFDMQALLTGAAACSDSKIVVAGYSQGAAIVHRAIEGLGADIKNRIAGVVTFGDTQTLQDGGRIAGFPLNRTLIICNIGDIICTGTLYPIFPYHWDYVKWVPTATLFLAQKILQANAVDPWPNGSFVWNSTGYGGISSRLAALKANLGNSAPKSLGVPTSKLPLPPSRRLST

SEQ ID NO: 7309 - DNA, 1311 bp, Muscodor strobelii
  misc_feature: SGI cDNA ID NO. 562196
  misc_feature: Encodes the peptide sequence at SEQ ID NO 7310
atggctgacgaaatacccacgattcaaatcttaggcaagaagaactacttcgagcagcatctcgtctcccttcccaatgccctcccatatccggccctagggccctcttctctcagacttcgcacctctgtgctaagtctcacggtcaataacttcacatatgcagcaatgggatcgctcccagggtgggactggtgggacattcacccgctcccagcttccacccccgaggagttcaaagactcttccaaatacggccgaatgaatgcctggggctacgcagaagtcctcgagtccacagttccagaaatccctaaggggagtcacgtttggggctacgtgccaatgggcactctggcacaggatctgactattaaattccaccctaataaaaatatcaaggaccaaatttttgtcacaaatgattatagacaacatgtcatgccgatttacaacaggtacttcgtgtatcaaccttcctcaggaatcaaggatgaaatcgcgcggaagacagacgcagtggcctatgattctctagtcaaagttatgcacgcaacttcattcttactcacgcgcttcgtcttctcgtcgaacgagtcccgtgtcgtaccgggacacccagtcgtgccgggaggcctagggcaagacgaatcagccgagtggacagctcaggacgcagacctaagcaatgccacggtcctcgtcttcgccccaggctctaaagtcggtctggcattcgcaaggctcctacgcacgcgcaaagatttcgatcccaaggagacccgtccgcctcgcatcatcggtgttagtagcgaggcttccagaccctttgtagaagcctcaggtgaatatgacgccgtaacaaccaccaactccaaccctacagccgtgctcaaggatctaggccacaaggaaggaaatcgcgtcgtaatcttcgacttcggcggaaggaaagggtcgggaccgagctgggcgatgcaactcctgcccacgaacccaaccctccaatttgtcggtgtcggcctcgagatcaaggatccgagcgcggcactcccaggtgctgatggccagaagccgcctttcaagttcacgcaagtcaatgctgatgatatgcggcgacgcgctatcgctaagattggcgaggagcagtactggaaagaggatgaagaatcttggcaggcgattcgaaagaatgggattaaggggtttaatgtggagttcgctgatggtatgaaggctgtgattgagggttgggatagattggcgaagggcgaggtattgcctagtaaggggctggcattcaagttgtag

SEQ ID NO: 7310 - protein, 436 aa, Muscodor strobelii
  misc_feature: SGI Peptide ID NO. 562196
  misc_feature (6)..(436): NCBI GI: 239612136 Blast Desc: conserved [Ajellomyces dermatitidis ER-3]
  misc_feature (6)..(436): NCBI GI: 261202228 Blast Desc: conserved [Ajellomyces dermatitidis SLH14081] gi|239590425|gb|EEQ73006.1| conserved [Ajellomyces dermatitidis SLH14081]
  misc_feature (4)..(436): NCBI GI: 171681048 Blast Desc: protein product [Podospora anserina] gi|170940482|emb|CAP65710.1| protein product [Podospora anserina]
  misc_feature (7)..(436): NCBI GI: 67902982 Blast Desc: AN8478.2 [Aspergillus nidulans FGSC A4] gi|40747944|gb|EAA67100.1| AN8478.2 [Aspergillus nidulans FGSC A4] gi|259484424|tpe|CBF80632.1| TPA: conserved [Aspergillus FGSC
  misc_feature (7)..(436): NCBI GI: 159128638 Blast Desc: conserved [Aspergillus fumigatus A1163]
  misc_feature (7)..(436): NCBI GI: 146322716 Blast Desc: conserved [Aspergillus fumigatus Af293] gi|129556767|gb|EAL87186.2| conserved [Aspergillus fumigatus Af293]
  misc_feature (8)..(436): NCBI GI: 119485264 Blast Desc: NFIA_099010 [Neosartorya fischeri NRRL 181] gi|119410320|gb|EAW20267.1| conserved [Neosartorya fischeri NRRL 181]
  misc_feature (7)..(436): NCBI GI: 121719566 Blast Desc: conserved [Aspergillus clavatus NRRL 1] gi|119404680|gb|EAW15056.1| conserved [Aspergillus clavatus NRRL 1]
  misc_feature (8)..(436): NCBI GI: 169780430 Blast Desc: [Aspergillus oryzae RIB40] gi|83773419|dbj|BAE63546.1| protein product [Aspergillus oryzae]
  misc_feature (8)..(436): NCBI GI: 238505422 Blast Desc: conserved [Aspergillus flavus NRRL3357] gi|220690054|gb|EED46404.1| conserved [Aspergillus flavus NRRL3357]
MADEIPTIQILGKKNYFEQHLVSLPNALPYPALGPSSLRLRTSVLSLTVNNFTYAAMGSLPGWDWWDIHPLPASTPEEFKDSSKYGRMNAWGYAEVLESTVPEIPKGSHVWGYVPMGTLAQDLTIKFHPNKNIKDQIFVTNDYRQHVMPIYNRYFVYQPSSGIKDEIARKTDAVAYDSLVKVMHATSFLLTRFVFSSNESRVVPGHPVVPGGLGQDESAEWTAQDADLSNATVLVFAPGSKVGLAFARLLRTRKDFDPKETRPPRIIGVSSEASRPFVEASGEYDAVTTTNSNPTAVLKDLGHKEGNRVVIFDFGGRKGSGPSWAMQLLPTNPTLQFVGVGLEIKDPSAALPGADGQKPPFKFTQVNADDMRRRAIAKIGEEQYWKEDEESWQAIRKNGIKGFNVEFADGMKAVIEGWDRLAKGEVLPSKGLAFKL

SEQ ID NO: 7311 - DNA, 3120 bp, Muscodor strobelii
  misc_feature: SGI cDNA ID NO. 562197
  misc_feature: Encodes the peptide sequence at SEQ ID NO 7312
atggaggagagtacggcgcgtccatctggccttcggccaccctcgaaaacatcctcatttgccacttccacaaacaatggtctccaggagatcaccgactcccaaaccaatgcccgatctcagtatagcaccatgaacggcccccagaaacgcaccgtccctccacccggcacgcaacctgctccgaaacggagaccgttagtagagcgtgctggcgactttccaggtcgacctgcgtcctccatatcttatgtcaggccgccctctaggagtcagggtacctctttgagagatttgagccagtcgactacttcgaacagcaattccaagattgcgggcccgcgacaacatccgagcactaactatgcggctagtgttggaattggcgcccgtcccccttcccgatctcatatgcgaactcggtctggcacgagtactgggacggttcggccccaagtcgtcaagagcccgaggaaggatgtacaggacaacaatggtacagtggccccgtcctctgttgctcacgtttgtgtccccaggagtaaaattcctaagcacaagatccttcgaaaatacagctcaatgcaagctctgggcgggagcgattcaacttatacaccattaccaaaggagagagaagtctctatctgccaaaagtttaactcgttgtcacttagcctagatgcgacaaaaaagccagaaaatcaagcggttttcaaggtcgaagacagtccctcgagtgttgcgaaaccgccctccacaccagtgcgtgtttccgaaaagcacgcattacctgaatgcgaagagaaagcagtggccaatctgaaccaagtggtccccatgactccatcttcaaagcagatgatggacaatcttcacaaatcttgcagcgctctgcgtgaagcagctatgactcctcaagtagcgagaaccacctcgcctattaaaccgccgtttctatctaaagattctaacctgaccgggtatctagtaaacgacattgacgaacgggttggacgactagatacggatctaagaaaggtcatggagttcatggcggaaaccgagcgcagcaaccatactttcaagggaaaagcatcggaactgcgagaagaatgcgaaaagctagacacggagaacagaaggcttaagtatcagctcgaagacgcacatcgttcgataaggagcttgaacattgatctagacgacaaagagcaacaaaacgagcgagcccgtaaaatcacgagcgaagatcacaaacttgagctaagccgtctagaggcggaatgcaaacgaagactagaagagctcgagctgcagatcgtcacactaaaggaaaagcatgacgctcagtctagacgtgatgctacagataacgaattacgaatcgacaagctgttgcatgacaacagcaatctggcacgagagaaggataccttactgcgggagatcgagaagctgtcgcgggacgtcgagcaactacgaagcagctgcgatgaaggcagtgggcgcatcaaggacctcgaactggattgcaccaagctgcgtgaggttcaagagcgtcagaaacaaaatcacctggaggatgtcaaaaaatggtctaacgaagtgagagaaaaggaaacccaaattgaatcacttcaggatgtgagaaaatctctccaggccgagaaaatcgagttcgagcggcaacttgaacgcaaggaatcgagaatccaggaactcgaaagaagggccaaagacactcaagaagaactcgccgagaagaagggcgatctcggacgtcgcatcaacgaaactcaaatggaatcagattctcgcaaacggaggatcgaagcattggaagatgaattgaacaagaaagaggcggaaatggagaagaccaagttggacgcaacgaagaaaattgcgtcagaaacagccgtcctaagagagaaactcacgaaggaagaggagaagcgtttcgtcttgtttgagaaatatcaagagctcaaaggcaatattcgcgtcatgtgtcgcatcaagcctccactccccaccgatgacaatgtcgtcccattccagtttttggcggacgagatggatgacgagaaggaatcaggtattcacgtcccggtctaccgacagagcgcattttcaaacaagatggaaagagtctgggagcaaggaggacccttccacctcgagcacatcttcaaacaagaagccaccaacgcggacgtgtttgatgagattagtcagctcgtacaaaccgtcttagatgggaagagagtgtgcatattctgctacggccagaccggctcaggcaagacatacaccatgagtcaatccacgaacaagaacgaccttggtattattcccaggacgaaggacatgatcttcaatgagatgcgaagattgaaagagttgggctgggagttcacggtcgaaggcacttaccttcaggtatacctgaacaagctcatggatctctgccatccggaacttggcgaattggaggtagatcagttggcagatgatctgatcatccgtaaaggccaccaattcacgcctcttacggacgaagacgatttggaccagatgattaagttgggtaatgcgaaccgctcgagcggtgcgacagccaagaacgcccattcgtcacgttcccatgccatcctcgctctcaaagtccatgcgcgacgtctagacgagtatggaagtgttattcagacgcgtgagggtacactgaacttggtagatctcgcgggttctgagaaaccaaacatggatcatggaatggagcgtttcgccgaaggcaattcgatcaacgaatctctgagtcatctccggcgtactttgcgcagtttggcggagaacccaaatgttaagccggaagtcagatcatcgacactaactcaggtacttcgcccatctctcttcgggaaacgctgtcgaactctcatgtttgtcatggtgagcccactagaagagaataagaatgagacgattcgcagtctcgaagttgctagagatgcaagagcggtcaagactggaggaaataccccttcacaatctagaccgggcagcaaggcagcagtgcggcctggtgttggccctacgaggaagagtgcaaggtga

SEQ ID NO: 7312 - protein, 1039 aa, Muscodor strobelii
  misc_feature: SGI Peptide ID NO. 562197
  misc_feature (692)..(1010): Pfam Id: PF00225 Pfam Desc: Kinesin motor domain
  misc_feature (694)..(1010): Pfam Id: PF00225 Pfam Desc: Kinesin motor domain
  misc_feature (1)..(1003): NCBI GI: 39940876 Blast Desc: MGG_05350 [Magnaporthe grisea 70-15] gi|145021978|gb|EDK05998.1| MGG_05350 [Magnaporthe grisea 70-15]
  misc_feature (9)..(1003): NCBI GI: 116198407 Blast Desc: CHGG_07359 [Chaetomium globosum CBS 148.51] gi|88178638|gb|EAQ86106.1| CHGG_07359 [Chaetomium globosum CBS 148.51]
  misc_feature (126)..(1003): NCBI GI: 171692427 Blast Desc: protein product [Podospora anserina] gi|170946162|emb|CAP72963.1| protein product [Podospora anserina]
  misc_feature (158)..(1003): NCBI GI: 29421278 Blast Desc: kinesin [Gibberella moniliformis]
  misc_feature (465)..(1012): NCBI GI: 85090153 Blast Desc: NCU04581 [Neurospora crassa OR74A] gi|28919627|gb|EAA29046.1| NCU04581 [Neurospora crassa OR74A] gi|28950021|emb|CAD70776.1| kinesin-related protein KLPA crassa]
  misc_feature (31)..(1012): NCBI GI: 154289877 Blast Desc: BC1G_15934 [Botryotinia fuckeliana B05.10] gi|150848742|gb|EDN23935.1| BC1G_15934 [Botryotinia fuckeliana B05.10]
  misc_feature (50)..(1003): NCBI GI: 29421232 Blast Desc: kinesin [Botryotinia fuckeliana]
  misc_feature (67)..(1012): NCBI GI: 169619417 Blast Desc: SNOG_12905 [Phaeosphaeria nodorum SN15] gi|160703819|gb|EAT79705.2| SNOG_12905 [Phaeosphaeria nodorum SN15]
  misc_feature (333)..(1003): NCBI GI: 46110345 Blast Desc: FG02054.1 [Gibberella zeae PH-1]
  misc_feature (457)..(1012): NCBI GI: 242783767 Blast Desc: kinesin family protein (KlpA), [Talaromyces stipitatus ATCC 10500] gi|218720399|gb|EED19818.1| kinesin family protein (KlpA), [Talaromyces stipitatus ATCC 10500]
MEESTARPSGLRPPSKTSSFATSTNNGLQEITDSQTNARSQYSTMNGPQKRTVPPPGTQPAPKRRPLVERAGDFPGRPASSISYVRPPSRSQGTSLRDLSQSTTSNSNSKIAGPRQHPSTNYAASVGIGARPPSRSHMRTRSGTSTGTVRPQVVKSPRKDVQDNNGTVAPSSVAHVCVPRSKIPKHKILRKYSSMQALGGSDSTYTPLPKEREVSICQKFNSLSLSLDATKKPENQAVFKVEDSPSSVAKPPSTPVRVSEKHALPECEEKAVANLNQVVPMTPSSKQMMDNLHKSCSALREAAMTPQVARTTSPIKPPFLSKDSNLTGYLVNDIDERVGRLDTDLRKVMEFMAETERSNHTFKGKASELREECEKLDTENRRLKYQLEDAHRSIRSLNIDLDDKEQQNERARKITSEDHKLELSRLEAECKRRLEELELQIVTLKEKHDAQSRRDATDNELRIDKLLHDNSNLAREKDTLLREIEKLSRDVEQLRSSCDEGSGRIKDLELDCTKLREVQERQKQNHLEDVKKWSNEVREKETQIESLQDVRKSLQAEKIEFERQLERKESRIQELERRAKDTQEELAEKKGDLGRRINETQMESDSRKRRIEALEDELNKKEAEMEKTKLDATKKIASETAVLREKLTKEEEKRFVLFEKYQELKGNIRVMCRIKPPLPTDDNVVPFQFLADEMDDEKESGIHVPVYRQSAFSNKMERVWEQGGPFHLEHIFKQEATNADVFDEISQLVQTVLDGKRVCIFCYGQTGSGKTYTMSQSTNKNDLGIIPRTKDMIFNEMRRLKELGWEFTVEGTYLQVYLNKLMDLCHPELGELEVDQLADDLIIRKGHQFTPLTDEDDLDQMIKLGNANRSSGATAKNAHSSRSHAILALKVHARRLDEYGSVIQTREGTLNLVDLAGSEKPNMDHGMERFAEGNSINESLSHLRRTLRSLAENPNVKPEVRSSTLTQVLRPSLFGKRCRTLMFVMVSPLEENKNETIRSLEVARDARAVKTGGNTPSQSRPGSKAAVRPGVGPTRKSAR

SEQ ID NO: 7313 - DNA, 4379 bp, Muscodor strobelii
  misc_feature: SGI EST ID NO. CUFF.18120.0
  misc_feature: Variant of the nucleotide sequence at SEQ ID NO 7311
acgcgaattgccatgtcatttgattggagcctatctggcgcatcgaccagagccagtcgactacttcgaacagcaattccaagattgcgggcccgcgacaacatccgagcactaactatgcggctagtgttggaattggcgcccgtcccccttcccgatctcatatgcgaactcggtctggcacgagtactgggacggttcggccccaagtcgtcaagagcccgaggaaggatgtacaggacaacaatgtaaacgacattgacgaacgggttggacgactagatacggatctaagaaaggtcatggagttcatggcggaaaccgagcgcagcaaccatactttcaagggaaaagcatcggaactgcgagaagaatgcgaaaagctagacacggagaacagaaggcttaagtatcagctcgaagacgcacatcgttcgataaggagcttgaacattgatctagacgacaaagagcaacaaaacgagcgagcccgtaaaatcacgagcgaagatcacaaacttgagctaagccgtctagaggcggaatgcaaacgaagactagaagagctcgagctgcagatcgtcacactaaaggaaaagcatgacgctcagtctagacgtgatgctacagataacgaattacgaatcgacaagctgttgcatgacaacagcaatctggcacgagagaaggataccttactgcgggagatcgagaagctgtcgcgggacgtcgagcaactacgaagcagctgcgatgaaggcagtgggcgcatcaaggacctcgaactggattgcaccaagctgcgtgaggttcaagagcgtcagaaacaaaatcacctggaggatgtcaaaaaatggtctaacgaagtgagagaaaaggaaacccaaattgaatcacttcaggatgtgagaaaatctctccaggccgagaaaatcgagttcgagcggcaacttgaacgcaaggaatcgagaatccaggaactcgaaagaagggccaaagacactcaagaagaactcgccgagaagaagggcgatctcggacgtcgcatcaacgaaactcaaatggaatcagattctcgcaaacggaggatcgaagcattggaagatgaattgaacaagaaagaggcggaaatggagaagaccaagttggacgcaacgaagaaaattgcgtcagaaacagccgtcctaagagagaaactcacgaaggaagaggagaagcgtttcgtcttgtttgagaaatatcaagagctcaaaggcaatattcgcgtcatgtgtcgcatcaagcctccactccccaccgatgacaatgtcgtcccattccagtttttggcggacgagatggatgacgagaaggaatcaggtattcacgtcccggtctaccgacagagcgcattttcaaacaagatggaaagagtctgggagcaaggaggacccttccacctcgagcacatcttcaaacaagaagccaccaacgcggacgtgtttgatgagattagtcagctcgtacaaaccgtcttagatgggaagagagtgtgcatattctgctacggccagaccggctcaggcaagacatacaccatgagtcaatccacgaacaagaacgaccttggtattattcccaggacgaaggacatgatcttcaatgagatgcgaagattgaaagagttgggctgggagttcacggtcgaaggcacttaccttcaggtatacctgaacaagctcatggatctctgccatccggaacttggcgaattggaggtagatcagttggcagatgatctgatcatccgtaaaggccaccaattcacgcctcttacggacgaagacgatttggaccagatgattaagttgggtaatgcgaaccgctcgagcggtgcgacagccaagaacgcccattcgtcacgttcccatgccatcctcgctctcaaagtccatgcgcgacgtctagacgagtatggaagtgttattcagacgcgtgagggtacactgaacttggtagatctcgcgggttctgagaaaccaaacatggatcatggaatggagcgtttcgccgaaggcaattcgatcaacgaatctctgagtcatctccggcgtactttgcgcagtttggcggagaacccaaatgttaagccggaagtcagatcatcgacactaactcaggtacttcgcccatctctcttcgggaaacgctgtcgaactctcatgtttgtcatggtgagcccactagaagagaataagaatgagacgattcgcagtctcgaagttgctagagatgcaagagcggtcaagactggaggaaataccccttcacaatctagaccgggcagcaaggcagcagtgcggcctggtgttggccctacgaggaagagtgcaaggtgaaaggaagggcgcgtcctgggagttagctgtactagtttgttggagcgtgtataccctgttgatattggttttgactaaaagatggcgcataggattgctccgtgttggcgtttgcattaggtagcttggctgttgagacattgtgaatgagcatggcacatcgtggaagttgacttttaatggacgatgaacaagtgatacgaattgagattgcattcgatcctggttgctattgaatttgagcttttacgccttttgaaccgggcttagcgagactcttcaaccgcttttctcaaccataaccttccggcttatcattcttcctctatctacaacttgaatgccagccccttactaggcaatacctcgcccttcgccaatctatcccaaccctcaatcacagccttcataccatcagcgaactccacattaaaccccttaatcccattctttcgaatcgcctgccaagattcttcatcctctttccagtactgctcctcgccaatcttagcgatagcgcgtcgccgcatatcatcagcattgacttgcgtgaacttgaaaggcggcttctggccatcagcacctgggagtgccgcgctcggatccttgatctcgaggccgacaccgacaaattggagggttgggttcgtgggcaggagttgcatcgcccagctcggtcccgaccctttccttccgccgaagtcgaagattacgacgcgatttccttccttgtggcctagatccttgagcacggctgtagggttggagttggtggttgttacggcgtcatattcacctgaggcttctacaaagggtctggaagcctcgctactaacaccgatgatgcgaggcggacgggtctccttgggatcgaaatctttgcgcgtgcgtaggagccttgcgaatgccagaccgactttagagcctggggcgaagacgaggaccgtggcattgcttaggtctgcgtcctgagctgtccactcggctgattcgtcttgccctaggcctcccggcacgactgggtgtcccggtacgacacgggactcgttcgacgagaagacgaagcgcgtgagtaagaatgaagttgcgtgcataactttgactagagaatcataggccactgcgtctgtcttccgcgcgatttcatccttgattcctgaggaaggttgatacacgaagtacctgttgtaaatcggcatgacatgttgtctataatcatttgtgacaaaaatttggtccttgatatttttattagggtggaatttaatagtcagatcctgtgccagagtgcccattggcacgtagccccaaacgtgactccccttagggatttctggaactgtggactcgaggacttctgcgtagccccaggcattcattcggccgtatttggaagagtctttgaactcctcgggggtggaagctgggagcgggtgaatgtcccaccagtcccaccctgggagcgatcccattgctgcatatgtgaagttattgaccgtgagacttagcacagaggtgcgaagtctgagagaagagggccctagggccggatatgggagggcattgggaagggagacgagatgctgctcgaagtagttcttcttgcctaagatttgaatcgtgggtatttcgtcagccatattgatgagttgcgctacagtgatgagtaaagcggatgggaagtgctaagatgcggatcgttttacaatggcagatagagttgttttatcatagaatccgtatttcgaatgcaaaatacggtcagttgtccattgatccatatataagcactacccaacgtcgtcataccaatggccttttgtgcgtatccctttaacccacacggccgtgcaacaccttcccaccattggccgaccatccgatgaacccggtcgttgaaagggtgaggaggatggaatatagcggggctgacggcgaggcaagtttgcccggctgccgtgcttccccagaattatggcattccaagcctcgcattcgcaa

SEQ ID NO: 7314 - DNA, 942 bp, Muscodor strobelii
  misc_feature: SGI cDNA ID NO. 562198
  misc_feature: Encodes the peptide sequence at SEQ ID NO 7315
atggagaaatacagccagttccgtgatagaggctccggcatatcgccgtttctcccaacatccaccccatcgtccttcacctccaccctcatcggcgcaggcttcttcctcttccgcttccccttcatcgcctgctacggcataatctacttcctactcctcgaccacctcccactcccgcaatttctgcgtaaactgctcctatgggttctcctcgggttcccaggaatctggtgggtagacctgcaactcgacggcgtgaagcgcggctccctctcccaacagcccgcctcccgcttcccgcgagagcgcgccataatcgccgcgcaattcacctcccccgtcgacgcagtctacctggccgccatcttcgacccaatcttcgtcctctccttcccaaacaccaaaaaggtccagcgcatctctctcttccgcgccatgaccaacgctctctcccaccctaagctatcccaacccaccgcaggcttgaccactctccgcgctctcgtcgacgcaaacccccaccgcgtcatagcagtattccccgaaatgacgcccacaaacggaaaaggcatcatgccattctcaccctccctcctctcctcaccatcctacgcaaacatcttccccgtctctctacgctacacgcccgcagatataacgacacccgtgccgggtgcctggggcagttttctctggaacttgctcagtaaacccacgcacgcactccgcgttagagtcgccgatggtgttgcgaataccacctctgacgatgcgactgagggacgagacgtggtagatgggtcggatttaacgcccgatgaacacaaacttctcgatcgggttgctgaggccctcgcgaggttggcgaggaacaagcgggtcggcttgacgctcaaggataaggcggcgtttgtggatgcttgggctaagaagaagtga

SEQ ID NO: 7315 - protein, 313 aa, Muscodor strobelii
  misc_feature: SGI Peptide ID NO. 562198
  misc_feature (1)..(313): NCBI GI: 46110347 Blast Desc: FG02055.1 [Gibberella zeae PH-1]
  misc_feature (18)..(313): NCBI GI: 171692429 Blast Desc: protein product [Podospora anserina] gi|170946163|emb|CAP72964.1| protein product [Podospora anserina]
  misc_feature (1)..(313): NCBI GI: 256728582 Blast Desc: NECHADRAFT_64266 [Nectria haematococca mpVI 77-13-4]
  misc_feature (1)..(312): NCBI GI: 116198405 Blast Desc: CHGG_07358 [Chaetomium globosum CBS 148.51] gi|88178637|gb|EAQ86105.1| CHGG_07358 [Chaetomium globosum CBS 148.51]
  misc_feature (1)..(313): NCBI GI: 156047914 Blast Desc: SS1G_08688 [Sclerotinia sclerotiorum 1980] gi|154693085|gb|EDN92823.1| SS1G_08688 [Sclerotinia sclerotiorum 1980]
  misc_feature (1)..(313): NCBI GI: 85090151 Blast Desc: NCU04580 [Neurospora crassa OR74A] gi|28919626|gb|EAA29045.1| conserved [Neurospora crassa OR74A] gi|28950020|emb|CAD70775.1| conserved [Neurospora crassa]
  misc_feature (1)..(313): NCBI GI: 212527448 Blast Desc: vacuolar protein sorting protein Vps66, [Penicillium marneffei ATCC 18224] gi|210073279|gb|EEA27366.1| vacuolar protein sorting protein Vps66, [Penicillium marneffei ATCC 18224]
  misc_feature (1)..(309): NCBI GI: 225563454 Blast Desc: conserved [Ajellomyces capsulatus G186AR]
  misc_feature (1)..(313): NCBI GI: 255933277 Blast Desc: Pc12g13010 [Penicillium chrysogenum Wisconsin 54-1255] gi|211582728|emb|CAP80928.1| Pc12g13010 [Penicillium chrysogenum Wisconsin 54-1255]
  misc_feature (1)..(313): NCBI GI: 119481699 Blast Desc: NFIA_089380 [Neosartorya fischeri NRRL 181] gi|119409032|gb|EAW18981.1| conserved [Neosartorya fischeri NRRL 181]
MEKYSQFRDRGSGISPFLPTSTPSSFTSTLIGAGFFLFRFPFIACYGIIYFLLLDHLPLPQFLRKLLLWVLLGFPGIWWVDLQLDGVKRGSLSQQPASRFPRERAIIAAQFTSPVDAVYLAAIFDPIFVLSFPNTKKVQRISLFRAMTNALSHPKLSQPTAGLTTLRALVDANPHRVIAVFPEMTPTNGKGIMPFSPSLLSSPSYANIFPVSLRYTPADITTPVPGAWGSFLWNLLSKPTHALRVRVADGVANTTSDDATEGRDVVDGSDLTPDEHKLLDRVAEALARLARNKRVGLTLKDKAAFVDAWAKKK

SEQ ID NO: 7316 - DNA, 3752 bp, Muscodor strobelii
  misc_feature: SGI EST ID NO. CUFF.18353.0
  misc_feature: Variant of the nucleotide sequence at SEQ ID NO 7314
gttccatgatgaaataattaaatgcttctgtcgtgtgcctcctcacgaccaacccaacgacgacgtgcctctttgactccacttgatctacgtcttaccagcctatgtcttcaaaattatattgaccacaacgagccaactagagtatacataagtgactacaactgcatgatgcgtccatatctggtctcactcctctgataccccatacctccctccaatttacccctcgctacgccttatcccatccacttaaaccttcagttcgcgatagtcgaccaacatggagaaatacagccagttccgtgatagaggctccggcatatcgccgtttctcccaacatccaccccatcgtccttcacctccaccctcatcggcgcaggcttcttcctcttccgcttccccttcatcgcctgctacggcataatctacttcctactcctcgaccacctcccactcccgcaatttctgcgtaaactgctcctatgggttctcctcgggttcccaggaatctggtgggtagacctgcaactcgacggcgtgaagcgcggctccctctcccaacagcccgcctcccgcttcccgcgagagcgcgccataatcgccgcgcaattcacctcccccgtcgacgcagtctacctggccgccatcttcgacccaatcttcgtcctctccttcccaaacaccaaaaaggtccagcgcatctctctcttccgcgccatgaccaacgctctctcccaccctaagctatcccaacccaccgcaggcttgaccactctccgcgctctcgtcgacgcaaacccccaccgcgtcatagcagtattccccgaaatgacgcccacaaacggaaaaggcatcatgccattctcaccctccctcctctcctcaccatcctacgcaaacatcttccccgtctctctacgctacacgcccgcagatataacgacacccgtgccgggtgcctggggcagttttctctggaacttgctcagtaaacccacgcacgcactccgcgttagagtcgccgatggtgttgcgaataccacctctgacgatgcgactgagggacgagacgtggtagatgggtcggatttaacgcccgatgaacacaaacttctcgatcgggttgctgaggccctcgcgaggttggcgaggaacaagcgggtcggcttgacgctcaaggataaggcggcgtttgtggatgcttgggctaagaagaagtgatggcgtagcatacgctaaagcgtggggaacatgtgtgattgattttagttttgcgatatgcggcattaggagtgggaaaaaaagcatagcatttcagggcataattattcaacatggagcaagttgcagtttcattacagtaattcggcagcattatttatgcaggaagccatcaaacagcttagtcaatggcattgatcatctaaatgtaagcaagttgaattgcgccgttgctccttttaggtttcttctttttcaggaggtcctccagctcgtatacggcgtgagccagcgaatatggtatttatatacagatcacatccagaatcaacccagtatacctatccgcacatggatgaaaactgcttcctttacatgtaaatgtcgccttatttggtatcattccacctgcctgtcgctaactatgcatgcatcctcgtatacatttcccccttaagccttgatcggccccgtcgttatacaaccatggctggcatcgctgaccaacttggcatatttcgtgagcgtgccctgggagtatcgtggtgggggcggtgtccagttcttcttgcgctctgccatctcggcgtcgcttacgtcgcagtcgatgacgaggttctcggcgtcgacagtgatggtgtcgccgtctttgatcagaccgatggggccgccctctgcggcctcaggtacgatgtgtccgatcaggaagccgtggctaccgccggagaaacggccgtctgtgagaagcgcaacgtcgtttccaagccccgcgcccatgatcgcggaagacggctttaacatctcgggcatacccggaccacccttgggaccttcgtatcggatgataacgacagtcttctcgcccttcttaatctctcccgcctcgagggcctcgatgaagtcgccttcctggtcgtagcacttggccttaccagtgaacacgaggccctccttgcctgtgatcttgccaacggaaccgccaggtgcaagtgagccgcgcaggatctggatgtgtcccgtgggcttgatcgggttcgacataggccggatgacggcctggtccttgggaaacgatggccacgactcgacgttttgcttcatcgtcttaccggtgacggtcatgccgttacccgaaataataccctccccgatcaggaacttgagaagtgacggcgtgccgccaatcttgtacagatcctcgaagacgtattttccggacggcttcagatcggccaggaagggggttcggttcgagacggcttggaaatcgtcgacggtaagcttgatgcctacggcatcagcgatggcgatcagatgcagcacggcgtttgtgctgcctcccaagatgttaaccacaaccatagcctcctcgaaagcttgcctcgtcataatgtccttaggtcgaatatcctctctcatagtgaccttgatagcctcacccagcctcgcgcactcttcgaccttagccttggactcggcggggctactactgcttccgggcagggtcataccgagtgtctcggcagcggacgccatggtgttggccgtgtacatgccaccgcacgcaccgcttccgttacaagcgtggcggatgatatcgaaccgctgctcctcattgatctcgcctgagatgtactggccgtaggcctggaaggcactgaccatatcgatcgtcttgccgtccatggtgcagccgggcttgatggtgcctccgtagaccatgatactgggtctgttgacgcggcccatagcgatcagaacaccgggcatgttcttgtcgcagccggggagggagatgttggcgtcataccactggccctgcatgacggtctcgatactgtcggcgatgatctctctgctctgcagggagtatcgcatgccggtggtgcccatggagatgccgtccgacacaccgatggtgttgaatcggtaggggacgaggccggcctcggcaacagacttcttgacgacggcggagaggtccatcaggtgcatgttgcacgggttgccttcccaccagacggaggaaatgccgacttgtgctttggacatgtcctctctctccaggcctgtggcgtacagcatggcctgggaggcgccctgggacttgggctgtgtgatgtggcgggagaccttgttgaggccatcgtcttcggctcggcgcggcgcggtggtgcccagacaacgtctatgaagagggttgttagatactggtcgtcgatagattatgtgagacgcaatgcaagaattgagcttgattgctatgacttttgcgtgaggctttagacatactgtgattgacaagcccaagctcggcgccccaaagcggagggagctctgctggtagctcggaggagcgtctgaagggccatgatgcaatccagagctttagaacagctctcgattcggtaacaaaccaacactcaaagtatcaattgaccatacaattacacaattacacaattgccagcagccagtctgcaattgagctatggcaaggtcttctacttggtagagtatttcacgc

SEQ ID NO: 7317 - DNA, 1815 bp, Muscodor strobelii
  misc_feature: SGI cDNA ID NO. 562199
  misc_feature: Reduced expression when VOC is produced
  misc_feature: Encodes the peptide sequence at SEQ ID NO 7318
atggcccttcagacgctcctccgagctaccagcagagctccctccgctttggggcgccgagcttgggcttgtcaatcacaacgttgtctgggcaccaccgcgccgcgccgagccgaagacgatggcctcaacaaggtctcccgccacatcacacagcccaagtcccagggcgcctcccaggccatgctgtacgccacaggcctggagagagaggacatgtccaaagcacaagtcggcatttcctccgtctggtgggaaggcaacccgtgcaacatgcacctgatggacctctccgccgtcgtcaagaagtctgttgccgaggccggcctcgtcccctaccgattcaacaccatcggtgtgtcggacggcatctccatgggcaccaccggcatgcgatactccctgcagagcagagagatcatcgccgacagtatcgagaccgtcatgcagggccagtggtatgacgccaacatctccctccccggctgcgacaagaacatgcccggtgttctgatcgctatgggccgcgtcaacagacccagtatcatggtctacggaggcaccatcaagcccggctgcaccatggacggcaagacgatcgatatggtcagtgccttccaggcctacggccagtacatctcaggcgagatcaatgaggagcagcggttcgatatcatccgccacgcttgtaacggaagcggtgcgtgcggtggcatgtacacggccaacaccatggcgtccgctgccgagacactcggtatgaccctgcccggaagcagtagtagccccgccgagtccaaggctaaggtcgaagagtgcgcgaggctgggtgaggctatcaaggtcactatgagagaggatattcgacctaaggacattatgacgaggcaagctttcgaggaggctatggttgtggttaacatcttgggaggcagcacaaacgccgtgctgcatctgatcgccatcgctgatgccgtaggcatcaagcttaccgtcgacgatttccaagccgtctcgaaccgaacccccttcctggccgatctgaagccgtccggaaaatacgtcttcgaggatctgtacaagattggcggcacgccgtcacttctcaagttcctgatcggggagggtattatttcgggtaacggcatgaccgtcaccggtaagacgatgaagcaaaacgtcgagtcgtggccatcgtttcccaaggaccaggccgtcatccggcctatgtcgaacccgatcaagcccacgggacacatccagatcctgcgcggctcacttgcacctggcggttccgttggcaagatcacaggcaaggagggcctcgtgttcactggtaaggccaagtgctacgaccaggaaggcgacttcatcgaggccctcgaggcgggagagattaagaagggcgagaagactgtcgttatcatccgatacgaaggtcccaagggtggtccgggtatgcccgagatgttaaagccgtcttccgcgatcatgggcgcggggcttggaaacgacgttgcgcttctcacagacggccgtttctccggcggtagccacggcttcctgatcggacacatcgtacctgaggccgcagagggcggccccatcggtctgatcaaagacggcgacaccatcactgtcgacgccgagaacctcgtcatcgactgcgacgtaagcgacgccgagatggcagagcgcaagaagaactggacaccgcccccaccacgatactcccagggcacgctcacgaaatatgccaagttggtcagcgatgccagccatggttgtataacgacggggccgatcaaggcttaa

SEQ ID NO: 7318 - protein, 604 aa, Muscodor strobelii
  misc_feature: SGI Peptide ID NO. 562199
  misc_feature (75)..(599): Pfam Id: PF00920 Pfam Desc: Dehydratase family
  misc_feature (1)..(598): NCBI GI: 85090149 Blast Desc: dihydroxy-acid dehydratase [Neurospora crassa OR74A] gi|28919625|gb|EAA29044.1| dihydroxy-acid dehydratase [Neurospora crassa OR74A] gi|28950019|emb|CAD70774.1| dihydroxy-acid crassa]
  misc_feature (40)..(602): NCBI GI: 145235369 Blast Desc: An03g04520 [Aspergillus niger] gi|134058015|emb|CAK38244.1| protein product [Aspergillus niger]
  misc_feature (1)..(598): NCBI GI: 145615051 Blast Desc: MGG_05345 [Magnaporthe grisea 70-15] gi|145021973|gb|EDK05993.1| MGG_05345 [Magnaporthe grisea 70-15]
  misc_feature (16)..(598): NCBI GI: 256728754 Blast Desc: [Nectria haematococca mpVI 77-13-4]
  misc_feature (8)..(602): NCBI GI: 115395908 Blast Desc: dihydroxy-acid dehydratase [Aspergillus terreus NIH2624] gi|114193162|gb|EAU34862.1| dihydroxy-acid dehydratase [Aspergillus terreus NIH2624]
  misc_feature (9)..(602): NCBI GI: 145254706 Blast Desc: An18g02550 [Aspergillus niger] gi|134084297|emb|CAK43184.1| protein product [Aspergillus niger]
  misc_feature (5)..(598): NCBI GI: 116198403 Blast Desc: conserved [Chaetomium globosum CBS 148.51] gi|88178636|gb|EAQ86104.1| conserved [Chaetomium globosum CBS 148.51]
  misc_feature (17)..(602): NCBI GI: 169763866 Blast Desc: [Aspergillus oryzae RIB40] gi|238489843|ref|XP_002376159.1| dihydroxy-acid dehydratase, [Aspergillus flavus NRRL3357] gi|83770861|dbj|BAE60994.1| protein
  misc_feature (1)..(603): NCBI GI: 46110349 Blast Desc: FG02056.1 [Gibberella zeae PH-1]
  misc_feature (32)..(602): NCBI GI: 119499535 Blast Desc: dihydroxy-acid dehydratase (dad) [Neosartorya fischeri NRRL 181] gi|119414689|gb|EAW24628.1| dihydroxy-acid dehydratase (dad) [Neosartorya fischeri NRRL 181]
  misc_feature (43)..(597): SWISSPROT Homolog: EC 4.2.1.9 Dihydroxy-acid dehydratase
  misc_feature: Useful for introducing or modulating the production of volatile compounds
MALQTLLRATSRAPSALGRRAWACQSQRCLGTTAPRRAEDDGLNKVSRHITQPKSQGASQAMLYATGLEREDMSKAQVGISSVWWEGNPCNMHLMDLSAVVKKSVAEAGLVPYRFNTIGVSDGISMGTTGMRYSLQSREIIADSIETVMQGQWYDANISLPGCDKNMPGVLIAMGRVNRPSIMVYGGTIKPGCTMDGKTIDMVSAFQAYGQYISGEINEEQRFDIIRHACNGSGACGGMYTANTMASAAETLGMTLPGSSSSPAESKAKVEECARLGEAIKVTMREDIRPKDIMTRQAFEEAMVVVNILGGSTNAVLHLIAIADAVGIKLTVDDFQAVSNRTPFLADLKPSGKYVFEDLYKIGGTPSLLKFLIGEGIISGNGMTVTGKTMKQNVESWPSFPKDQAVIRPMSNPIKPTGHIQILRGSLAPGGSVGKITGKEGLVFTGKAKCYDQEGDFIEALEAGEIKKGEKTVVIIRYEGPKGGPGMPEMLKPSSAIMGAGLGNDVALLTDGRFSGGSHGFLIGHIVPEAAEGGPIGLIKDGDTITVDAENLVIDCDVSDAEMAERKKNWTPPPPRYSQGTLTKYAKLVSDASHGCITTGPIKA

SEQ ID NO: 7319 - DNA, 3707 bp, Muscodor strobelii
  misc_feature: SGI EST ID NO. CUFF.18354.1
  misc_feature: Variant of the nucleotide sequence at SEQ ID NO 7317
gcgtgaaatactctaccaagtagaagaccttgccatagctcaattgcagactggctgctggcaattgtgtaattgtgtaattgtatggtcaattgatactttgagtgttggtttgttaccgaatcgagagctgttctaaagctctggattgcatcatggcccttcagacgctcctccgagctaccagcagagctccctccgctttggggcgccgagcttgggcttgtcaatcacaacgttgtctgggcaccaccgcgccgcgccgagccgaagacgatggcctcaacaaggtctcccgccacatcacacagcccaagtcccagggcgcctcccaggccatgctgtacgccacaggcctggagagagaggacatgtccaaagcacaagtcggcatttcctccgtctggtgggaaggcaacccgtgcaacatgcacctgatggacctctccgccgtcgtcaagaagtctgttgccgaggccggcctcgtcccctaccgattcaacaccatcggtgtgtcggacggcatctccatgggcaccaccggcatgcgatactccctgcagagcagagagatcatcgccgacagtatcgagaccgtcatgcagggccagtggtatgacgccaacatctccctccccggctgcgacaagaacatgcccggtgttctgatcgctatgggccgcgtcaacagacccagtatcatggtctacggaggcaccatcaagcccggctgcaccatggacggcaagacgatcgatatggtcagtgccttccaggcctacggccagtacatctcaggcgagatcaatgaggagcagcggttcgatatcatccgccacgcttgtaacggaagcggtgcgtgcggtggcatgtacacggccaacaccatggcgtccgctgccgagacactcggtatgaccctgcccggaagcagtagtagccccgccgagtccaaggctaaggtcgaagagtgcgcgaggctgggtgaggctatcaaggtcactatgagagaggatattcgacctaaggacattatgacgaggcaagctttcgaggaggctatggttgtggttaacatcttgggaggcagcacaaacgccgtgctgcatctgatcgccatcgctgatgccgtaggcatcaagcttaccgtcgacgatttccaagccgtctcgaaccgaacccccttcctggccgatctgaagccgtccggaaaatacgtcttcgaggatctgtacaagattggcggcacgccgtcacttctcaagttcctgatcggggagggtattatttcgggtaacggcatgaccgtcaccggtaagacgatgaagcaaaacgtcgagtcgtggccatcgtttcccaaggaccaggccgtcatccggcctatgtcgaacccgatcaagcccacgggacacatccagatcctgcgcggctcacttgcacctggcggttccgttggcaagatcacaggcaaggagggcctcgtgttcactggtaaggccaagtgctacgaccaggaaggcgacttcatcgaggccctcgaggcgggagagattaagaagggcgagaagactgtcgttatcatccgatacgaaggtcccaagggtggtccgggtatgcccgagatgttaaagccgtcttccgcgatcatgggcgcggggcttggaaacgacgttgcgcttctcacagacggccgtttctccggcggtagccacggcttcctgatcggacacatcgtacctgaggccgcagagggcggccccatcggtctgatcaaagacggcgacaccatcactgtcgacgccgagaacctcgtcatcgactgcgacgtaagcgacgccgagatggcagagcgcaagaagaactggacaccgcccccaccacgatactcccagggcacgctcacgaaatatgccaagttggtcagcgatgccagccatggttgtataacgacggggccgatcaaggcttaagggggaaatgtatacgaggatgcatgcatagttagcgacaggcaggtggaatgataccaaataaggcgacatttacatgtaaaggaagcagttttcatccatgtgcggataggtatactgggttgattctggatgtgatctgtatataaataccatattcgctggctcacgccgtatacgagctggaggacctcctgaaaaagaagaaacctaaaaggagcaacggcgcaattcaacttgcttacatttagatgatcaatgccattgactaagctgtttgatggcttcctgcataaataatgctgccgaattactgtaatgaaactgcaacttgctccatgttgaataattatgccctgaaatgctatgctttttttcccactcctaatgccgcatatcgcaaaactaaaatcaatcacacatgttccccacgctttagcgtatgctacgccatcacttcttcttagcccaagcatccacaaacgccgccttatccttgagcgtcaagccgacccgcttgttcctcgccaacctcgcgagggcctcagcaacccgatcgagaagtttgtgttcatcgggcgttaaatccgacccatctaccacgtctcgtccctcagtcgcatcgtcagaggtggtattcgcaacaccatcggcgactctaacgcggagtgcgtgcgtgggtttactgagcaagttccagagaaaactgccccaggcacccggcacgggtgtcgttatatctgcgggcgtgtagcgtagagagacggggaagatgtttgcgtaggatggtgaggagaggagggagggtgagaatggcatgatgccttttccgtttgtgggcgtcatttcggggaatactgctatgacgcggtgggggtttgcgtcgacgagagcgcggagagtggtcaagcctgcggtgggttgggatagcttagggtgggagagagcgttggtcatggcgcggaagagagagatgcgctggacctttttggtgtttgggaaggagaggacgaagattgggtcgaagatggcggccaggtagactgcgtcgacgggggaggtgaattgcgcggcgattatggcgcgctctcgcgggaagcgggaggcgggctgttgggagagggagccgcgcttcacgccgtcgagttgcaggtctacccaccagattcctgggaacccgaggagaacccataggagcagtttacgcagaaattgcgggagtgggaggtggtcgaggagtaggaagtagattatgccgtagcaggcgatgaaggggaagcggaagaggaagaagcctgcgccgatgagggtggaggtgaaggacgatggggtggatgttgggagaaacggcgatatgccggagcctgtggcgtgaagagtgtgagataggagtgcgatgcgggtacagtgggagtttactaacctctatcacggaactggctgtatttctccatgttggtcgactatcgcgaactgaaggtttaagtggatgggataaggcgtagcgaggggtaaattggagggaggtatggggtatcagaggagtgagaccagatatggacgcatcatgcagttgtagtcacttatgtatactctagttggctcgttgtggtcaatataattttgaagacataggctggtaagacgtagatcaagtggagtcaaagaggcacgtcgtcgttgggttggtcgtgaggaggcacacgacagaagcatttaattatttcatcatggaac

SEQ ID NO: 7320 - DNA, 501 bp, Muscodor strobelii
  misc_feature: SGI cDNA ID NO. 562200
  misc_feature: Encodes the peptide sequence at SEQ ID NO 7321
atgccgaccagtcgcggaacaaaagtcgatatgggccgcaatgcaccagagacgcaagaaggacctggtgcagtcccatcggactctctggcggctgagtctcaagcttttcgtcaagcaaacgaagtggaacaggttggaactggcagaccccaagaaagcgcacacggtcccggaacgtcgatgaaatcagcctcggaatcgggacgcgaatccaaaacatcaagctccgctacggctgcaccgagctacgctgagagtcaaccccgtcacgaccgtcctcacggaaagaacatcacagaaactagtgacatgtcagaggatcccagcaagaacgcaagtttctcggctgagatcgggtccaagaacgatcctagtttgcttgctgagcagaaattgaacttgcagaactcttccgtgccaggttcctctggcggccgagagcaaaagctagatacagataccccgtatgacgcgctcagcagcgagcgagaggcatga

SEQ ID NO: 7321 - protein, 166 aa, Muscodor strobelii
  misc_feature: SGI Peptide ID NO. 562200
  misc_feature (4)..(163): NCBI GI: 46110284 Blast Desc: FG02024.1 [Gibberella zeae PH-1]
  misc_feature (6)..(163): NCBI GI: 256728550 Blast Desc: NECHADRAFT_102879 [Nectria haematococca mpVI 77-13-4]
  misc_feature (19)..(166): NCBI GI: 154301807 Blast Desc: BC1G_10055 [Botryotinia fuckeliana B05.10] gi|150855717|gb|EDN30909.1| BC1G_10055 [Botryotinia fuckeliana B05.10]
  misc_feature (9)..(160): NCBI GI: 261360940 Blast Desc: conserved [Verticillium albo-atrum VaMs.102]
  misc_feature (72)..(164): NCBI GI: 242774538 Blast Desc: conserved [Talaromyces stipitatus ATCC 10500] gi|218722079|gb|EED21497.1| conserved [Talaromyces stipitatus ATCC 10500]
  misc_feature (23)..(166): NCBI GI: 156065777 Blast Desc: SS1G_00899 [Sclerotinia sclerotiorum 1980] gi|154691758|gb|EDN91496.1| SS1G_00899 [Sclerotinia sclerotiorum 1980]
  misc_feature (64)..(166): NCBI GI: 169763248 Blast Desc: [Aspergillus oryzae RIB40] gi|238489135|ref|XP_002375805.1| conserved [Aspergillus flavus NRRL3357] gi|83770552|dbj|BAE60685.1| protein product oryzae]
  misc_feature (14)..(153): NCBI GI: 164426578 Blast Desc: NCU11264 [Neurospora crassa OR74A] gi|157071394|gb|EDO65245.1| NCU11264 [Neurospora crassa OR74A]
  misc_feature (78)..(166): NCBI GI: 258572586 Blast Desc: [Uncinocarpus reesii 1704] gi|237905325|gb|EEP79726.1| [Uncinocarpus reesii 1704]
  misc_feature (93)..(166): NCBI GI: 115492045 Blast Desc: conserved [Aspergillus terreus NIH2624] gi|114197510|gb|EAU39210.1| conserved [Aspergillus terreus NIH2624]
MPTSRGTKVDMGRNAPETQEGPGAVPSDSLAAESQAFRQANEVEQVGTGRPQESAHGPGTSMKSASESGRESKTSSSATAAPSYAESQPRHDRPHGKNITETSDMSEDPSKNASFSAEIGSKNDPSLLAEQKLNLQNSSVPGSSGGREQKLDTDTPYDALSSEREA

SEQ ID NO: 7322 - DNA, 709 bp, Muscodor strobelii
  misc_feature: SGI EST ID NO. CUFF.18125.0
  misc_feature: Variant of the nucleotide sequence at SEQ ID NO 7320
cgttgatcgagctcattcccgccaacttaacaacgccattaaaagattcattaaatcaaacaaacagtcgcgtatcataaaattcaccctactacatcatcaatatgccgaccagtcgcggaacaaaagtcgatatgggccgcaatgcaccagagacgcaagaaggacctggtgcagtcccatcggactctctggcggctgagtctcaagcttttcgtcaagcaaacgaagtggaacaggttggaactggcagaccccaagaaagcgcacacggtcccggaacgtcgatgaaatcagcctcggaatcgggacgcgaatccaaaacatcaagctccgctacggctgcaccgagctacgctgagagtcaaccccgtcacgaccgtcctcacggaaagaacatcacagaaactagtgacatgtcagaggatcccagcaagaacgcaagtttctcggctgagatcgggtccaagaacgatcctagtttgcttgctgagcagaaattgaacttgcagaactcttccgtgccaggttcctctggcggccgagagcaaaagctagatacagataccccgtatgacgcgctcagcagcgagcgagaggcatgaaatgcgcagccaggggggcctcaatctacagcctattatgtataattgagcaatctgtcaagattgtatagtagactaggccaatcttccgcaaaacgcttgag

SEQ ID NO: 7323 - DNA, 1551 bp, Muscodor strobelii
  misc_feature: SGI cDNA ID NO. 562201
  misc_feature: Encodes the peptide sequence at SEQ ID NO 7324
atgacattctcccggcgtcatataccgtctgaaaaagacgggaacattggcagaaatgagttgcaagagtctgaagagagtcaaggagccgatttggctactccaatcgacgatgtcttcggacaagaagagggacatgatatcaagtacaaaactttgagctggccacttgttgctgtactcatgatcacggagattgtatcaaacggcatgctaagcctgcctagcagcatagcggcagttggaatcgttcctggcgttgtattgatattctttctgggtgcgttcgctacatatacagcgtgggctttgatacagttcaaattacggcaccccgaagtccacagtatgggtgatgccggttatatggtatgcgcaactctgttcgggccagttggaagagaggtactagcaggaggcactgtgatctttgcgattttcggtaccggctctcagatcttggctgggcaactcgctcttactgtcctgtcaaacaacaagttgtgcagtgccgcattctctgggatattcgccgccgccgtggctctcgcaagctttccaaggaccttagacagtctcggttttctgtccatcgtaggaactttttcgatcatcgttgcggctatagtcggtctggtcggcgcaggcgttgcccctgtcggccctgcagatcgcgatatacagataactgtcacaactgactttacgtctgcttttattagcattactaatcctgtatttgcatatgctggtcattttatgttcttcatggtatgcatagctcatcctttcaattcctggacttccgctactcgttccgttaaagtcatgtacacaaaattaaccgcggccacagtatgtagaccgaccggaacatcaatacttccagtttccgaattcggtataggtcctgacatgtctagactcatctctgagatgcggcgaccgcaagatgcgatgaaagcggcgtgggcattgcagattgtagcaacttcattgtacatcgtcttcgcattggtcacctatctgtacctaggcactggagtttcaagtcccagtttcttgagtctaagtcctttatggtcgaagattgcttttggacttgcgattccgaattttctaattgcaggaagcctttactcgcatacggcatcgaagctggttttcgtacgaatctttcgccgctctcgacacgtatactcacataccaaacgaggatggatattatggacctttctaatactgttcgccaacattgttgctttcatcttcgcaatcggtatccctattttcaactatctggtcggtattgctgcctcgttatttgcggcctggtacacatatggacttgctggggctttctggctacatgattcatactactttgacggaggctaccgaggatggctgcggcatccatttatgcttgttataaatatactcactgtattagcaggtgcttttatttctgttgctgggctctacgcgaccattacagccttgaaaggggcgtcagcggcaggagagttattgaggcccttccagtgttga

SEQ ID NO: 7324 - protein, 516 aa, Muscodor strobelii
  misc_feature: SGI Peptide ID NO. 562201
  misc_feature (51)..(496): Pfam Id: PF01490 Pfam Desc: Transmembrane amino acid transporter protein
  misc_feature (51)..(256): Pfam Id: PF01490 Pfam Desc: Transmembrane amino acid transporter protein
  misc_feature (11)..(516): NCBI GI: 238844550 Blast Desc: amino acid transporter [Microsporum canis CBS 113480]
  misc_feature (7)..(516): NCBI GI: 255930861 Blast Desc: Pc12g00870 [Penicillium chrysogenum Wisconsin 54-1255] gi|211581606|emb|CAP79714.1| Pc12g00870 [Penicillium chrysogenum Wisconsin 54-1255]
  misc_feature (9)..(506): NCBI GI: 115385525 Blast Desc: conserved [Aspergillus terreus NIH2624] gi|114187756|gb|EAU29456.1| conserved [Aspergillus terreus NIH2624]
  misc_feature (17)..(516): NCBI GI: 258564754 Blast Desc: conserved [Uncinocarpus reesii 1704] gi|237908629|gb|EEP83030.1| conserved [Uncinocarpus reesii 1704]
  misc_feature (9)..(506): NCBI GI: 255947822 Blast Desc: Pc22g06500 [Penicillium chrysogenum Wisconsin 54-1255] gi|211591695|emb|CAP97938.1| Pc22g06500 [Penicillium chrysogenum Wisconsin 54-1255]
  misc_feature (18)..(516): NCBI GI: 121714901 Blast Desc: neutral amino acid permease [Aspergillus clavatus NRRL 1] gi|119403216|gb|EAW13634.1| neutral amino acid permease [Aspergillus clavatus NRRL 1]
  misc_feature (9)..(516): NCBI GI: 119497625 Blast Desc: neutral amino acid permease [Neosartorya fischeri NRRL 181] gi|119413734|gb|EAW23673.1| neutral amino acid permease [Neosartorya fischeri NRRL 181]
  misc_feature (3)..(502): NCBI GI: 239610138 Blast Desc: amino acid transporter [Ajellomyces dermatitidis ER-3]
  misc_feature (9)..(516): NCBI GI: 70988589 Blast Desc: neutral amino acid permease [Aspergillus fumigatus Af293] gi|66846785|gb|EAL87116.1| neutral amino acid permease [Aspergillus fumigatus Af293] gi|159128571|gb|EDP53685.1| neutral
  misc_feature (3)..(502): NCBI GI: 261198375 Blast Desc: amino acid transporter [Ajellomyces dermatitidis SLH14081] gi|239594741|gb|EEQ77322.1| amino acid transporter [Ajellomyces dermatitidis SLH14081]
MTFSRRHIPSEKDGNIGRNELQESEESQGADLATPIDDVFGQEEGHDIKYKTLSWPLVAVLMITEIVSNGMLSLPSSIAAVGIVPGVVLIFFLGAFATYTAWALIQFKLRHPEVHSMGDAGYMVCATLFGPVGREVLAGGTVIFAIFGTGSQILAGQLALTVLSNNKLCSAAFSGIFAAAVALASFPRTLDSLGFLSIVGTFSIIVAAIVGLVGAGVAPVGPADRDIQITVTTDFTSAFISITNPVFAYAGHFMFFMVCIAHPFNSWTSATRSVKVMYTKLTAATVCRPTGTSILPVSEFGIGPDMSRLISEMRRPQDAMKAAWALQIVATSLYIVFALVTYLYLGTGVSSPSFLSLSPLWSKIAFGLAIPNFLIAGSLYSHTASKLVFVRIFRRSRHVYSHTKRGWILWTFLILFANIVAFIFAIGIPIFNYLVGIAASLFAAWYTYGLAGAFWLHDSYYFDGGYRGWLRHPFMLVINILTVLAGAFISVAGLYATITALKGASAAGELLRPFQC

SEQ ID NO: 7325 - DNA, 779 bp, Muscodor strobelii
  misc_feature: SGI EST ID NO. CUFF.18129.0
  misc_feature: Variant of the nucleotide sequence at SEQ ID NO 7323
ccggaacatcaatacttccagtttccgaattcggtataggtcctgacatgtctagactcatctctgagatgcggcgaccgcaagatgcgatgaaagcggcgtgggcattgcagattgtagcaacttcattgtacatcgtcttcgcattggtcacctatctgtacctaggcactggagtttcaagtcccagtttcttgagtctaagtcctttatggtcgaagattgcttttggacttgcgattccgaattttctaattgcaggaagcctttactcgcatacggcatcgaagctggttttcgtacgaatctttcgccgctctcgacacgtatactcacataccaaacgaggatggatattatggacctttctaatactgttcgccaacattgttgctttcatcttcgcaatcggtatccctattttcaactatctggtcggtattgctgcctcgttatttgcggcctggtacacatatggacttgctggggctttctggctacatgattcatactactttgacggaggctaccgaggatggctgcggcatccatttatgcttgttataaatatactcactgtattagcaggtgcttttatttctgttgctgggctctacgcgaccattacagccttgaaaggggcgtcagcggcaggagagttattgaggcccttccagtgttgaattagcgatcaatccatcaaaattatagtatctcttacggaggtgagataagtgattgtggaagcttacgaaagtgctgcaaacgctcataggaaa

SEQ ID NO: 7326 - DNA, 3192 bp, Muscodor strobelii
  misc_feature: SGI cDNA ID NO. 562202
  misc_feature: Encodes the peptide sequence at SEQ ID NO 7327
atgcaagcatctgcggtagcaagcgagggttttagttccatcagaacgatcgctgcgtgtggtgcagaaacaaaaatgggcagacgacatcaaacctgggtagaagaagcaagaaacagaggattcaagttgtccaagattgttgctttgcagcaagcgactatttacttcagtgtttattcgacctttgctttggccttctggtttgccgttagacttctcttagaccatgagatccagaatgttggaactgcaatcacgattctaatgtgcgtgctgatgattgcaactggcgttgggaatcttgctgctccaatatctgctacagctcgagcagctggggcagcagcaattctcttcaacggaatagacgctcccagacaaatcacaagtggcgttaagtacccagaggtatctgctactggcgatattgtcttgtggaatgtcaacttcacttaccctatgcggcccaatgtcaaggttcttgataatttgagcctgattattcctgctggaaaagtgacggccattgtcggaccttcaggctcaggcaagagcactatcgtggcgctcttggagcgctggtacactatgccgtccgatcgagatgaagatgcgaagaagaaaatgatcatgtattttcgaaatggaacggtcaccgtcggcgggcgaaacttatatgaatttgatctcaaatggtggaggagtcaactaagctgcgttcaacaggagccattcttgttcaaccagacgatattcgaaaatgttgcgtctgggttgatcggaaccgtatgggagcacactgacggtgtaaagaaaagagaacttgtccaaaatgcttgtcaagagtcctacgcagatgagttcatcacaaagctaccaatgggctacgacacagttgtcggggatgctggcatccgaatgagcggcggccagcgacagaggcttgcaattgcgcgtgcaatcatcaaacaacctaagattctaattctagatgaggcaacaagctctatagatgtccggggagagaagattgtacaggctgcactcgataaggtatctcgaaaccgcacgacaatcatgatagcccaccgacttgcaacggtaaagaaggcagataacatagtggttttagccaaggggaagatcattcaatggggcacgcacaagagcatgatagccgcaacggggtcgccttattggttgctgacgcaatcccaggaactcgtgggtgaggttcagaatgatgagctctctgaggcaacgaacgaagacgaaagagtggttgaactcatgacattagacaaacacaacgaacacgagacactggatagttcaataaacaccggtagtcttactaggaagtcactaggtccgttccggagctttgcggctttgctgctggagcagcaatcaaattggcactggtatgtgttgatgatatgcggcgctatcattgcgggcgcgactcctccggtgcaagctttcattttcgcgaacctcattgcttcatttgcgttctggggagatgtccttaccaaaattgtggacttttggtgtctcatgtttgtggttctggcaatagctgccgctataagctatttttgcctcggttacgcatcgaccaaaatgtcatttgtgagcgaggaattttcacacctacaagagatttgtactgatacaatggatgaaaagcaaatcgtatcttcctatcggattgagtactttaataatatcgtgaaaaaaagtgtagcttggtttgatggcgatggccgagacatcggcacgctcaccggcttagttgcaacagacccaacgcagcttcaacagctgctgggtacgaacttgacatttgccctcatttctgtccttagcgttcttgggtgcctcgccatctcattctactttggctggaaacttgcccttgtcgctttgtcgtcagctatgcctcttgctcttggtgccgggttctttcgcatgcgggtagaaaagggatttgatatgctgaatctacaagtattcgcggagagtgccaagtttgctaccgaaacgattggtgccattcgaacagtcacggcactcacacttgaagaggatctctccaggagatacgaaaagtcgctacgaaaccatgttaaggacgccttcagaagggcacgtttcacaactctagtgttttctgcgagtgatagtcttccactgttagctatggcattggttctttggtacggtggcactctcttgctcagcggagaatacatgacattcaattacctcgttgtatacatagcagtgatccagggtgcaatgggagctggccagtggctaagcttcgctcctaactttgcgcagtcgtccacagcagcaaaaaggatacgggaaatgaggacaccggatcaaggtcaatgcgcagataatgctctgagccatattcctggtgaagacaatgagggtgtgagagtggagttgctagacgtatgtttcaagtatccgacgagagatattttgatactcaacagactgaacttgactgtcgagaaaggacaatttgccgcaattgtcggcccttcgggttccggcaagacaagcgttatctcattgctggaaagattctatgacgtgacctctggaaaaatcacggtcaatggtgtagcaattgatcggtattctctttcggaatacagagcagtcatttcgctcgttgctcaagaaccgtctttatttgatggcacaatcaaagagaacatactacttggtgttgaccccgacactatcaccgaaggttgcctccactccgtatgtcgagatgctggcatacatgatttcatcagctcacttcccgacggctacaacacgaaagctgggcttaagggagttcttttaagtgggggtcaaaagcaaagaataaacattgcgcgagctcttatccgcaacccgcgtctcttgcttctcgacgaggctacatcaaacctagactctgagacggagaagcaggtccagcaagtactcgagcggaccaaatctaaccgaactatgattgtgattgctcaccgactcgcaacaatacaaaatgccgatgtgatttttgtactaggagacggtaatgtgctcgagaaagggacccatgaagaactccttcagaagcgaggcgtttactctagtatgtgccaagctcaggctttagatagataa

SEQ ID NO: 7327 - protein, 1063 aa, Muscodor strobelii
  misc_feature: SGI Peptide ID NO. 562202
  misc_feature (477)..(773): Pfam Id: PF00664 Pfam Desc: ABC transporter transmembrane region
  misc_feature (848)..(1034): Pfam Id: PF00005 Pfam Desc: ABC transporter
  misc_feature (172)..(381): Pfam Id: PF00005 Pfam Desc: ABC transporter
  misc_feature (567)..(773): Pfam Id: PF00664 Pfam Desc: ABC transporter transmembrane region
  misc_feature (2)..(99): Pfam Id: PF00664 Pfam Desc: ABC transporter transmembrane region
  misc_feature (215)..(381): Pfam Id: PF00005 Pfam Desc: ABC transporter
  misc_feature (3)..(1063): NCBI GI: 156063764 Blast Desc: SS1G_02000 [Sclerotinia sclerotiorum 1980] gi|154697334|gb|EDN97072.1| SS1G_02000 [Sclerotinia sclerotiorum 1980]
  misc_feature (2)..(1063): NCBI GI: 239614223 Blast Desc: ABC multidrug transporter [Ajellomyces dermatitidis ER-3]
  misc_feature (2)..(1063): NCBI GI: 261204473 Blast Desc: MDR efflux pump ABC3 [Ajellomyces dermatitidis SLH14081] gi|239587235|gb|EEQ69878.1| MDR efflux pump ABC3 [Ajellomyces dermatitidis SLH14081]
  misc_feature (2)..(1063): NCBI GI: 226286267 Blast Desc: lipid A export ATP-binding/permease protein msbA [Paracoccidioides brasiliensis Pb01]
  misc_feature (2)..(1063): NCBI GI: 240282132 Blast Desc: MDR efflux pump ABC3 [Ajellomyces capsulatus H143]
  misc_feature (2)..(1063): NCBI GI: 225559200 Blast Desc: ABC multidrug transporter [Ajellomyces capsulatus G186AR]
  misc_feature (2)..(1063): NCBI GI: 240106516 Blast Desc: ABC transporter family protein [Coccidioides posadasii C735 delta SOWgp]
  misc_feature (2)..(1062): NCBI GI: 154323564 Blast Desc: BC1G_00181 [Botryotinia fuckeliana B05.10] gi|150842410|gb|EDN17603.1| BC1G_00181 [Botryotinia fuckeliana B05.10]
  misc_feature (2)..(1063): NCBI GI: 256727932 Blast Desc: NECHADRAFT_95357 [Nectria haematococca mpVI 77-13-4]
  misc_feature (2)..(1063): NCBI GI: 171687329 Blast Desc: protein product [Podospora anserina] gi|170943626|emb|CAP69278.1| protein product [Podospora anserina]
  misc_feature (2)..(1060): SWISSPROT Homolog: EC 3.6.3.44 Xenobiotic-transporting ATPase
MQASAVASEGFSSIRTIAACGAETKMGRRHQTWVEEARNRGFKLSKIVALQQATIYFSVYSTFALAFWFAVRLLLDHEIQNVGTAITILMCVLMIATGVGNLAAPISATARAAGAAAILFNGIDAPRQITSGVKYPEVSATGDIVLWNVNFTYPMRPNVKVLDNLSLIIPAGKVTAIVGPSGSGKSTIVALLERWYTMPSDRDEDAKKKMIMYFRNGTVTVGGRNLYEFDLKWWRSQLSCVQQEPFLFNQTIFENVASGLIGTVWEHTDGVKKRELVQNACQESYADEFITKLPMGYDTVVGDAGIRMSGGQRQRLAIARAIIKQPKILILDEATSSIDVRGEKIVQAALDKVSRNRTTIMIAHRLATVKKADNIVVLAKGKIIQWGTHKSMIAATGSPYWLLTQSQELVGEVQNDELSEATNEDERVVELMTLDKHNEHETLDSSINTGSLTRKSLGPFRSFAALLLEQQSNWHWYVLMICGAIIAGATPPVQAFIFANLIASFAFWGDVLTKIVDFWCLMFVVLAIAAAISYFCLGYASTKMSFVSEEFSHLQEICTDTMDEKQIVSSYRIEYFNNIVKKSVAWFDGDGRDIGTLTGLVATDPTQLQQLLGTNLTFALISVLSVLGCLAISFYFGWKLALVALSSAMPLALGAGFFRMRVEKGFDMLNLQVFAESAKFATETIGAIRTVTALTLEEDLSRRYEKSLRNHVKDAFRRARFTTLVFSASDSLPLLAMALVLWYGGTLLLSGEYMTFNYLVVYIAVIQGAMGAGQWLSFAPNFAQSSTAAKRIREMRTPDQGQCADNALSHIPGEDNEGVRVELLDVCFKYPTRDILILNRLNLTVEKGQFAAIVGPSGSGKTSVISLLERFYDVTSGKITVNGVAIDRYSLSEYRAVISLVAQEPSLFDGTIKENILLGVDPDTITEGCLHSVCRDAGIHDFISSLPDGYNTKAGLKGVLLSGGQKQRINIARALIRNPRLLLLDEATSNLDSETEKQVQQVLERTKSNRTMIVIAHRLATIQNADVIFVLGDGNVLEKGTHEELLQKRGVYSSMCQAQALDR

SEQ ID NO: 7328 - DNA, 750 bp, Muscodor strobelii
  misc_feature: SGI cDNA ID NO. 562203
  misc_feature: Encodes the peptide sequence at SEQ ID NO 7329
atgaggtttctctgccttcctggcgcgtatggtagcgcagataaattccaggttcagctcgcacctctcgtcaaagagctgctctctgatggctcggcttcgtttcgttttgtcgatgcgccatgcgaggctatccctcctgacgggttcgaagacttctttggaaagcctccttacttccgatttattgagccagacgacgtgcaaactgatgacactgatgttttggcccgcattcgagactttccagaatgcgataccgcagaagacacaatgagggagctttttaaagaaggtgtggcaagcagtgtactcagtacacagaaagcaatccagttcttgtttgatattatggacaaagaaggtccattcgaagggatcatcggatattccgaaggcgcgacagttgctgggactctacttcttgccgagcaagaacgtttcgagaagaccggacggctcccaatgatcaaatgtgccgtattcttcgccggttggccaccgctggacccaaaaacatacgcaatggtcttggcagatgagtctgacattgtcattgatgttcatacttgccatatcattggttcattggatccatacgtcgcaggatctatggcactatacaacatctgcgagcccgactacgctcggatattcgaccatggaaaggggcacacgcttccccgcgagaaggcagtgatcaaggaactcggcgacgtcattcgtaagatgataacagaggctgtctga

SEQ ID NO: 7329 - protein, 249 aa, Muscodor strobelii
  misc_feature: SGI Peptide ID NO. 562203
  misc_feature (1)..(243): NCBI GI: 164428229 Blast Desc: NCU06012 [Neurospora crassa OR74A] gi|157072064|gb|EAA29584.2| conserved [Neurospora crassa OR74A]
  misc_feature (1)..(247): NCBI GI: 39941364 Blast Desc: MGG_05593 [Magnaporthe grisea 70-15] gi|145022268|gb|EDK06288.1| MGG_05593 [Magnaporthe grisea 70-15]
  misc_feature (1)..(247): NCBI GI: 39945584 Blast Desc: MGG_04774 [Magnaporthe grisea 70-15] gi|145011229|gb|EDJ95885.1| MGG_04774 [Magnaporthe grisea 70-15]
  misc_feature (1)..(245): NCBI GI: 261351626 Blast Desc: conserved [Verticillium albo-atrum VaMs.102]
  misc_feature (1)..(244): NCBI GI: 156063762 Blast Desc: SS1G_01999 [Sclerotinia sclerotiorum 1980] gi|154697333|gb|EDN97071.1| SS1G_01999 [Sclerotinia sclerotiorum 1980]
  misc_feature (1)..(244): NCBI GI: 154318634 Blast Desc: BC1G_02706 [Botryotinia fuckeliana B05.10] gi|150857836|gb|EDN33028.1| BC1G_02706 [Botryotinia fuckeliana B05.10]
  misc_feature (1)..(193): NCBI GI: 116201721 Blast Desc: CHGG_08745 [Chaetomium globosum CBS 148.51] gi|88177263|gb|EAQ84731.1| CHGG_08745 [Chaetomium globosum CBS 148.51]
  misc_feature (1)..(248): NCBI GI: 212541779 Blast Desc: DUF341 family oxidoreductase, [Penicillium marneffei ATCC 18224] gi|210065951|gb|EEA20044.1| DUF341 family oxidoreductase, [Penicillium marneffei ATCC 18224]
  misc_feature (1)..(241): NCBI GI: 256723756 Blast Desc: NECHADRAFT_8139 [Nectria haematococca mpVI 77-13-4]
  misc_feature (1)..(243): NCBI GI: 145248263 Blast Desc: An13g02420 [Aspergillus niger] gi|134081131|emb|CAK41641.1| protein product [Aspergillus niger]
MRFLCLPGAYGSADKFQVQLAPLVKELLSDGSASFRFVDAPCEAIPPDGFEDFFGKPPYFRFIEPDDVQTDDTDVLARIRDFPECDTAEDTMRELFKEGVASSVLSTQKAIQFLFDIMDKEGPFEGIIGYSEGATVAGTLLLAEQERFEKTGRLPMIKCAVFFAGWPPLDPKTYAMVLADESDIVIDVHTCHIIGSLDPYVAGSMALYNICEPDYARIFDHGKGHTLPREKAVIKELGDVIRKMITEAV

SEQ ID NO: 7330 - DNA, 609 bp, Muscodor strobelii
  misc_feature: SGI EST ID NO. CUFF.18156.0
  misc_feature: Variant of the nucleotide sequence at SEQ ID NO 7328
caaaaacatacgcaatggtcttggcagatgagtctgacattgtcattgatgttcatacttgccatatcattggttcattggatccatacgtcgcaggatctatggcactatacaacatctgcgagcccgactacgctcggatattcgaccatggaaaggggcacacgcttccccgcgagaaggcagtgatcaaggaactcggcgacgtcattcgtaagatgataacagaggctgtctgatactactcgatagtgatgtttcataattgatgtaattgctgtagatttgaaattaatctttagtggttggtcgcatactattctgtttgtggtcataaattttgtcgctagaatgattggttatcacagtcgaatgcgaatacaatgtaatcattaatctccgactgagccaatcgtgaacacgaccagacgggaagaaggggataatgttcctttctggattcggccttaatcaattatgcgatgagaaccatggaataagagacgcgtcaaatatagtgataatggcgctgatgacatctgatgatgcttggcggaagtgatcgccgtccgggccgaatttatccagagacctccaaaagactgtgac

SEQ ID NO: 7331 - DNA, 6978 bp, Muscodor strobelii
  misc_feature: SGI cDNA ID NO. 562204
  misc_feature: Encodes the peptide sequence at SEQ ID NO 7332
atggctccgggcgccatatcaagcaacacgaatggtgtgagccatggagatgtccaggaaattagagttaacacaaacgagcgaactaatggtctagactacggcagacacaatggcttggcgcatgaagagagtgttggcattggtagccaaggtcccaatttaatcaagggaggctctgttgaacttcaacaacagtttccagtatattctaatgttcaccacgctaactattccaacccgaccaccaacggttattccaatggaagtgtcaaacataccaatatgcctgcactccagcttgagggcataccaatcgcaatttgtggcatgtcctgtagactaccaggaaatgtggccagccccgcagagttttgggaactacttgctcgcgagcgtagtggatattccaaaattccgccgtacaggttttccactgggcccttttaccatcccaatcccgggaaggccggctgtttcaatccagttggaggacacttccttgaaaatgatcttacggcctttgatgcacctttcttcagcttgacagagaaggaagccatctccatggatcctcaacaacggcttctccttgagtgtacctttgaagccctcgaaaacgccggaatacccaagcatcagattgtgggcgcaaatgtaggagtattcatcggtggttgtcacatagtatgtgaatctatcatgcggctgatgtccggctggtctgaggaagatcgccgtcatactaacccatggtatcatcgagtagcattcccagagtatgagtctcatcttttcagggacacggacacaattcctatgcatcaagcaactgttatatacacaattccactaggctgcgcctatgctatgcaggccaacagactttcgcatttctttgatttgcgtgggactagtttcaccaccgatacagcttgctcctcaagtctcgtagccctacacgtagcatgtcaaagcttacgaacaggagagtctgatatagctattgtaggaggttgtcacttggatcttttacctgaattcttcatctctttcagcaaatctagactattttcggattcaggtcgctccttctcgttcgataatcgtggaaccggattcggccggggggagggctgtggtgtgatcatcttgaagagactagaccaggcccgaaatgacaatgatcagataagggcaattgtccgatccagtggctgtaatcaggatggaaagactcctgggatcacaatgccttgcgggaaggcacaagatgtgacagagaccttaatgcgatcggtttatgacaaggcaggcatcaggccttcggactgcggattcgttgaggcacatgggacaggcactcgcgttggtgatccgatcgaagctacagcaattcataacgtgttcaacgagggacggacagccagagatccgctacacattggatcggtcaaatcaaacattggccatcttgagggcgcatcaggaattgtggctgttataaaagccgcgctgatgctcgaaagaggcttcattctgccaaattacgacttcaagcagccaaacgagaagattccgtttaaagaatggcatcttaaggtaccaattagccaacggccatggccaaagaacaagaagtatgtgagtattaacaacttcggattcggtggcaccaatgcccatgtcgtacttgagcgggtgcctttcatacagagaggtgccaagaatgattctgatctcaaggatgacattccgacaaggaaactcttcgcggtctctgcaaacgacaaggtctctttagagctcgtgatgaaaaacttggtcatatacttggagcagagaccagaaatgttccaaaagggcttgatggcagattttgcctacacgctcgggcagcgacactcaattctgccatggcgcgtcgctattccagccgtgagatcgttcgatttcatcgaagccatcaatagccagaaaatatcgcctggcaaagagtcagatccactgagaatcggatttatcttcacaggccagggtgctcaatggtacgggatgggtcgtgaactatatcagcagtaccctgtttttgcaagtgctatcgactacgctgatgtctgtttgcgttctattggagcatcctggtctctcctattggaattgagcaaggacgaagcgagttccgagataggtgcggcacatatcagccaaccagcatgtacagcactgcagcttgcattgactgatctcatgagatcgtggaacataaaaccgaccgcagtggctggtcatagttccggcgaaatcggtgctgcgtatgcggctggcatattgacgtttgaagcatgcatggcgattgcttatcatcgtggacgccttgtgcctgtgttgaaagagaggcatcccggtcttcaaggttctatgatggccgtcggcggtacgccggaggagtttgaggatctgattgcaaatgtgaaagccggagagataaggattgcctgttacaacagcccaacgagtttaacgatctctggcgatgaagctggcattgatgaattgaaggcgctcgtcgaagagaaacagctattcaacagaaagcttttcgtcgatacagcttatcactcccatcatatgtccctcctggcaaaatcttacactgagagcatttcagacttacaagcacctatctgcaccactactcgatttcattcgtctctattgggccgccagatcacaggatccgatctggagccatcttactgggttcagaacctcacttgtccagttagatttaatgaagctgtccagaatatgattgcacctcatgaagaacataagacaggtgtcaacatgcttcttgaacttgggccacactctgctttacaagggccattaaagcagattttaaaggcggtcgggggcgacgcggccaagattccatacctcgcagttcttgcacgcaaaaaggacgcagttgaaacagcacttggtgctgcagcgggcatgtttgcgaggggtgtggctcttgattttgaggctattaacttccccaagccgagtaagcccctagtgcttctcaatgatcttcctcgatatccttggaattattctaccaagtactggcacgagtctcgtttcacagattttcataaaaacagaagtgcgctccgtcatgacgttctcggaacactagcaaactattcaaacgacttggagccgacttggagaaatatcgtccgtctggatgatctgccgtggctccaacactataagatacagtcaatgaccgtgttccctatttcaggctatgtggcaatggccgttgaagcaatctctcaactggcacaagaagtaagcgctgaatttgatcggtatgagctccgggatgtcactgtgactaccccattggtcatcatggatgaagatgtagaggtgaccacttctctgagaccctgtggacaagagtgttctgatggcttggagatgagacatgaattccgcatctgttcgtggactaaagtccacaaatggaaagagaactgcagaggcgttgtcgcaatccaactcaggcaatctaacggagtggatatggctcgtcgagacctagcctcaaggattcaactccgagagacagttacgaaaatcgaagaagtcgctacacgggcagtcaatgcgaatcaactctatgaaaagcttcatatggccggtgtttcgcttggaaccacattccaaggattgtataatcctaaaattggggatgcttgtgcctgtgcggacgtctgtgtgccagatatcgcaaaggagatgccgaaccactatatctctcaagcgattattcagccagcatttctagagtcgctgatatcaatgtattggccaatggcaagcgacaaatgcgatgcaatcaatacaatttatgtgccatcatcaattgccaagatctcgatttcgagggacatcggccaaatctcagactcgccaggtacggctgtgaaggcttattgtcgaggggaaatgttcatggacattccaaaggcaacgaagatcaacgtctttgcaacgaaaaacgaccacgtaacgatgcccgtcattcagctcgaagagctgacaatcgctccgatcatagatggggaccaaacaatggtcgatgctccacgcgagctttgctataagctagaatgggagccaactctagaaccaatcgagttgaacaccatggaactgccggtcctacaagacgatagtgttttgcgaggatccgatattgagatcattcacggagctagcgcttcccagatagatctagcatctaacctagctgagaaactcgaatacctgactggcagaaaaccaagcacaaacgacttgcttaaaagtcaaggagatgacaagtttgtaatcttcatccaggagctcgaaaagccgcttctctccaaactcaagagcgccgaatttgaagcaatgcaaaagatcctcacatcggtcaaaggcgctctatggattgtccagggggcatacaacaatgctacagcaccagacttgaatatgatcatgggcctaagtcgaactatccgctctgagacattattgccattcgccaccctggacctagacggtcagtatccattggccgctgcagatacggcgaaagccatcgtgaaggtcttcactgcaatcttcaacggaagctgttcttctagcaacgaaatggaattcatggaacgaggtggctcctttttcactcctagggtcgttcacgacggcgagttgaacaaaattgttcatcaaagtacacagccttcggtactccagtcgattccattcagcgaatcagatcgaccgcttaagctgacgattcagagcacaggggcgctggacacgttgcactttgtggatgccatcgaggagcaagtccccatagacctcgatgacatcgaaatccaggttaaggccgtaggtgtgaatcacagggatatcgcggctgcaaatggaaagcttgcaattacggatttcggtgctgaggcctcggggattgttacctctgttggaaagaatgttgaaggaattaaagtcggtgaccatgttgcggccattacgcaaggcgccttcgctacctcggtccgtactcgagcgggctttgcattcaagctgcctgtcaatatgtctttcgagacaggtgccaccatacctctggcctacgttactgcatattactctcttatagaactgggacgcctacgacaggacgagagagcattgatacacgcaggatctggtgccgtggggcaagcggcaattaacatcgcccaaatgataggcgcgcaagtctacgcaactgttggtagtccagaaaagaaggaattcctgatgaaggagtttgatattccagagcaccgtatatttttcagccgcaatacgtctttcggggaagttgtccgccagtctaccaataatgagggcatggacctcgttctcaattgctggggtgctagcctgaagcaaagttggaccagcttgaacaagtttgggcgtttgattgatgtccatcaaaatgacaccggctcaggcaatcgattagaaaagatgcaattcgacggaaatgcgtgtctcatgtcggtagacatgatgtctatactcgccgaaagaccccgtctgatgaaaggcctcctgtcagacgtctctaatttgctgagatacggtaaaataaagccaatctccccgattacaataatgcctatctcggacgtcgaatccgccttcaagatgttacacggtggcaagacacatggaaaagttgtagtcatgccgcgtgcagatgacatcgtgaaagcgactaagccgacgaagcctagacaaagtctaagagaagatgcaacttatattctcatcggaggcaccggtggtcttgggagaagtatggctcggtggatgataagccggggtgcacgccacctcgttcttgtctcgcgtaccggtagtgttactggtaaagttaagagtctgatcgaagatgctttggaaaccggcgctgaaatcatcgttcggaattgcgacgtcgctgacccagccgatgttgaggacctcatcaattttcagcttgagaacatgcctcctatccgtggtgtgatacatggcgccatggtgctcagggatgtgctcttcgaaaaaatgacatacgatgaatatacaacagtcatctcctcgaaggtacagggtggatggaacttccatcaagcactcatacacgccccgctagactttttcatagcaatatcatcggttgcgggcatggtgggcaacagaggacaagctgcctatgcggctgcaaactgtttcttgaactctctcgtccaataccggttggctaagggtctgccagcctcttccttagacctgactgctatctcggattccggttatctagccgaagatctagagaaagcggcagaggtcgccaggaaccttggaagcgacactatttgcgaggctgaggttctcgcattagtcgatgccgccatcaacggtcaaatggcgtctgggtgcaataatcacgcgatcacaggcatgcgtataaccccaacaatgcagcccttttggacgtcagatgctaaatgcaaataccttcgtgaggcggccgaggcggaagcagcagcagacgaagctgcgggaggaccaagaacgatatcatacaacgcagccatcaaggcagccaagactctggacgaagcagaacaagtggtgtgcgagggtctcgtaagcaagctcgcggcagtcatgatgatggaattggaagatctcgacgttacgcgatcattatcgcactaccctctagattcgctcgtcgcgattgaaatccggaacttcattacccgcgaatttgaggcgacgctgcaagtgctcgagctattgtcgagtgggtctatccagacgcttgcaaaagcagtctgcgtgaagagcaagctagtcaattttcagtag

SEQ ID NO: 7332 - protein, 2325 aa, Muscodor strobelii
  misc_feature: SGI Peptide ID NO. 562204
  misc_feature (673)..(1009): Pfam Id: PF00698 Pfam Desc: Acyl transferase domain
  misc_feature (1642)..(1717): Pfam Id: PF08240 Pfam Desc: Alcohol dehydrogenase GroES-like domain
  misc_feature (1958)..(2125): Pfam Id: PF00106 Pfam Desc: short chain dehydrogenase
  misc_feature (1748)..(1895): Pfam Id: PF00107 Pfam Desc: Zinc-binding dehydrogenase
  misc_feature (104)..(391): Pfam Id: PF00109 Pfam Desc: Beta-ketoacyl synthase, N-terminal domain
  misc_feature (399)..(520): Pfam Id: PF02801 Pfam Desc: Beta-ketoacyl synthase, C-terminal domain
  misc_feature (1958)..(2138): Pfam Id: PF08659 Pfam Desc: KR domain
  misc_feature (674)..(1009): Pfam Id: PF00698 Pfam Desc: Acyl transferase domain
  misc_feature (1748)..(1845): Pfam Id: PF00107 Pfam Desc: Zinc-binding dehydrogenase
  misc_feature (286)..(391): Pfam Id: PF00109 Pfam Desc: Beta-ketoacyl synthase, N-terminal domain
  misc_feature (104)..(228): Pfam Id: PF00109 Pfam Desc: Beta-ketoacyl synthase, N-terminal domain
  misc_feature (312)..(340): Pfam Id: PF00108 Pfam Desc: Thiolase, N-terminal domain
  misc_feature (104)..(1395): NCBI GI: 146323155 Blast Desc: polyketide synthase [Aspergillus fumigatus Af293] gi|129556492|gb|EAL86424.2| polyketide synthase, [Aspergillus fumigatus Af293]
  misc_feature (104)..(1395): NCBI GI: 159128403 Blast Desc: polyketide synthase, [Aspergillus fumigatus A1163]
  misc_feature (105)..(1378): NCBI GI: 171688048 Blast Desc: protein product [Podospora anserina] gi|170943986|emb|CAP70096.1| protein product [Podospora anserina]
  misc_feature (103)..(1320): NCBI GI: 212531917 Blast Desc: polyketide synthase, [Penicillium marneffei ATCC 18224] gi|210071479|gb|EEA25568.1| polyketide synthase, [Penicillium marneffei ATCC 18224]
  misc_feature (96)..(1329): NCBI GI: 121704114 Blast Desc: polyketide synthase, [Aspergillus clavatus NRRL 1] gi|119398465|gb|EAW08895.1| polyketide synthase, [Aspergillus clavatus NRRL 1]
  misc_feature (104)..(1408): NCBI GI: 121712301 Blast Desc: polyketide synthase, [Aspergillus clavatus NRRL 1] gi|119401914|gb|EAW12336.1| polyketide synthase, [Aspergillus clavatus NRRL 1]
  misc_feature (104)..(1396): NCBI GI: 255941364 Blast Desc: Pc16g11480 [Penicillium chrysogenum Wisconsin 54-1255] gi|211586074|emb|CAP93818.1| Pc16g11480 [Penicillium chrysogenum Wisconsin 54-1255]
  misc_feature (106)..(1291): NCBI GI: 242810045 Blast Desc: polyketide synthase, [Talaromyces stipitatus ATCC 10500] gi|218716125|gb|EED15547.1| polyketide synthase, [Talaromyces stipitatus ATCC 10500]
  misc_feature (105)..(1394): NCBI GI: 212544182 Blast Desc: polyketide synthase, [Penicillium marneffei ATCC 18224] gi|210065214|gb|EEA19308.1| polyketide synthase, [Penicillium marneffei ATCC 18224]
  misc_feature (71)..(1320): NCBI GI: 255953379 Blast Desc: Pc21g03930 [Penicillium chrysogenum Wisconsin 54-1255] gi|211589153|emb|CAP95290.1| Pc21g03930 [Penicillium chrysogenum Wisconsin 54-1255]
  misc_feature (105)..(1396): SWISSPROT Homolog: EC 2.3.1.161 Lovastatin nonaketide synthase
  misc_feature: Useful for fungicidal and/or biocontrol applications
MAPGAISSNTNGVSHGDVQEIRVNTNERTNGLDYGRHNGLAHEESVGIGSQGPNLIKGGSVELQQQFPVYSNVHHANYSNPTTNGYSNGSVKHTNMPALQLEGIPIAICGMSCRLPGNVASPAEFWELLARERSGYSKIPPYRFSTGPFYHPNPGKAGCFNPVGGHFLENDLTAFDAPFFSLTEKEAISMDPQQRLLLECTFEALENAGIPKHQIVGANVGVFIGGCHIVCESIMRLMSGWSEEDRRHTNPWYHRVAFPEYESHLFRDTDTIPMHQATVIYTIPLGCAYAMQANRLSHFFDLRGTSFTTDTACSSSLVALHVACQSLRTGESDIAIVGGCHLDLLPEFFISFSKSRLFSDSGRSFSFDNRGTGFGRGEGCGVIILKRLDQARNDNDQIRAIVRSSGCNQDGKTPGITMPCGKAQDVTETLMRSVYDKAGIRPSDCGFVEAHGTGTRVGDPIEATAIHNVFNEGRTARDPLHIGSVKSNIGHLEGASGIVAVIKAALMLERGFILPNYDFKQPNEKIPFKEWHLKVPISQRPWPKNKKYVSINNFGFGGTNAHVVLERVPFIQRGAKNDSDLKDDIPTRKLFAVSANDKVSLELVMKNLVIYLEQRPEMFQKGLMADFAYTLGQRHSILPWRVAIPAVRSFDFIEAINSQKISPGKESDPLRIGFIFTGQGAQWYGMGRELYQQYPVFASAIDYADVCLRSIGASWSLLLELSKDEASSEIGAAHISQPACTALQLALTDLMRSWNIKPTAVAGHSSGEIGAAYAAGILTFEACMAIAYHRGRLVPVLKERHPGLQGSMMAVGGTPEEFEDLIANVKAGEIRIACYNSPTSLTISGDEAGIDELKALVEEKQLFNRKLFVDTAYHSHHMSLLAKSYTESISDLQAPICTTTRFHSSLLGRQITGSDLEPSYWVQNLTCPVRFNEAVQNMIAPHEEHKTGVNMLLELGPHSALQGPLKQILKAVGGDAAKIPYLAVLARKKDAVETALGAAAGMFARGVALDFEAINFPKPSKPLVLLNDLPRYPWNYSTKYWHESRFTDFHKNRSALRHDVLGTLANYSNDLEPTWRNIVRLDDLPWLQHYKIQSMTVFPISGYVAMAVEAISQLAQEVSAEFDRYELRDVTVTTPLVIMDEDVEVTTSLRPCGQECSDGLEMRHEFRICSWTKVHKWKENCRGVVAIQLRQSNGVDMARRDLASRIQLRETVTKIEEVATRAVNANQLYEKLHMAGVSLGTTFQGLYNPKIGDACACADVCVPDIAKEMPNHYISQAIIQPAFLESLISMYWPMASDKCDAINTIYVPSSIAKISISRDIGQISDSPGTAVKAYCRGEMFMDIPKATKINVFATKNDHVTMPVIQLEELTIAPIIDGDQTMVDAPRELCYKLEWEPTLEPIELNTMELPVLQDDSVLRGSDIEIIHGASASQIDLASNLAEKLEYLTGRKPSTNDLLKSQGDDKFVIFIQELEKPLLSKLKSAEFEAMQKILTSVKGALWIVQGAYNNATAPDLNMIMGLSRTIRSETLLPFATLDLDGQYPLAAADTAKAIVKVFTAIFNGSCSSSNEMEFMERGGSFFTPRVVHDGELNKIVHQSTQPSVLQSIPFSESDRPLKLTIQSTGALDTLHFVDAIEEQVPIDLDDIEIQVKAVGVNHRDIAAANGKLAITDFGAEASGIVTSVGKNVEGIKVGDHVAAITQGAFATSVRTRAGFAFKLPVNMSFETGATIPLAYVTAYYSLIELGRLRQDERALIHAGSGAVGQAAINIAQMIGAQVYATVGSPEKKEFLMKEFDIPEHRIFFSRNTSFGEVVRQSTNNEGMDLVLNCWGASLKQSWTSLNKFGRLIDVHQNDTGSGNRLEKMQFDGNACLMSVDMMSILAERPRLMKGLLSDVSNLLRYGKIKPISPITIMPISDVESAFKMLHGGKTHGKVVVMPRADDIVKATKPTKPRQSLREDATYILIGGTGGLGRSMARWMISRGARHLVLVSRTGSVTGKVKSLIEDALETGAEIIVRNCDVADPADVEDLINFQLENMPPIRGVIHGAMVLRDVLFEKMTYDEYTTVISSKVQGGWNFHQALIHAPLDFFIAISSVAGMVGNRGQAAYAAANCFLNSLVQYRLAKGLPASSLDLTAISDSGYLAEDLEKAAEVARNLGSDTICEAEVLALVDAAINGQMASGCNNHAITGMRITPTMQPFWTSDAKCKYLREAAEAEAAADEAAGGPRTISYNAAIKAAKTLDEAEQVVCEGLVSKLAAVMMMELEDLDVTRSLSHYPLDSLVAIEIRNFITREFEATLQVLELLSSGSIQTLAKAVCVKSKLVNFQ

SEQ ID NO: 7333 - DNA, 2730 bp, Muscodor strobelii
  misc_feature: SGI EST ID NO. CUFF.18182.0
  misc_feature: Variant of the nucleotide sequence at SEQ ID NO 7331
gatccgatattgagatcattcacggagctagcgcttcccagatagatctagcatctaacctagctgagaaactcgaatacctgactggcagaaaaccaagcacaaacgacttgcttaaaagtcaaggagatgacaagtttgtaatcttcatccaggagctcgaaaagccgcttctctccaaactcaagagcgccgaatttgaagcaatgcaaaagatcctcacatcggtcaaaggcgctctatggattgtccagggggcatacaacaatgctacagcaccagacttgaatatgatcatgggcctaagtcgaactatccgctctgagacattattgccattcgccaccctggacctagacggtcagtatccattggccgctgcagatacggcgaaagccatcgtgaaggtcttcactgcaatcttcaacggaagctgttcttctagcaacgaaatggaattcatggaacgaggtggctcctttttcactcctagggtcgttcacgacggcgagttgaacaaaattgttcatcaaagtacacagccttcggtactccagtcgattccattcagcgaatcagatcgaccgcttaagctgacgattcagagcacaggggcgctggacacgttgcactttgtggatgccatcgaggagcaagtccccatagacctcgatgacatcgaaatccaggttaaggccgtaggtgtgaatcacagggatatcgcggctgcaaatggaaagcttgcaattacggatttcggtgctgaggcctcggggattgttacctctgttggaaagaatgttgaaggaattaaagtcggtgaccatgttgcggccattacgcaaggcgccttcgctacctcggtccgtactcgagcgggctttgcattcaagctgcctgtcaatatgtctttcgagacaggtgccaccatacctctggcctacgttactgcatattactctcttatagaactgggacgcctacgacaggacgagagagcattgatacacgcaggatctggtgccgtggggcaagcggcaattaacatcgcccaaatgataggcgcgcaagtctacgcaactgttggtagtccagaaaagaaggaattcctgatgaaggagtttgatattccagagcaccgtatatttttcagccgcaatacgtctttcggggaagttgtccgccagtctaccaataatgagggcatggacctcgttctcaattgctggggtgctagcctgaagcaaagttggaccagcttgaacaagtttgggcgtttgattgatgtccatcaaaatgacaccggctcaggcaatcgattagaaaagatgcaattcgacggaaatgcgtgtctcatgtcggtagacatgatgtctatactcgccgaaagaccccgtctgatgaaaggcctcctgtcagacgtctctaatttgctgagatacggtaaaataaagccaatctccccgattacaataatgcctatctcggacgtcgaatccgccttcaagatgttacacggtggcaagacacatggaaaagttgtagtcatgccgcgtgcagatgacatcgtgaaagcgactaagccgacgaagcctagacaaagtctaagagaagatgcaacttatattctcatcggaggcaccggtggtcttgggagaagtatggctcggtggatgataagccggggtgcacgccacctcgttcttgtctcgcgtaccggtagtgttactggtaaagttaagagtctgatcgaagatgctttggaaaccggcgctgaaatcatcgttcggaattgcgacgtcgctgacccagccgatgttgaggacctcatcaattttcagcttgagaacatgcctcctatccgtggtgtgatacatggcgccatggtgctcagggatgtgctcttcgaaaaaatgacatacgatgaatatacaacagtcatctcctcgaaggtacagggtggatggaacttccatcaagcactcatacacgccccgctagactttttcatagcaatatcatcggttgcgggcatggtgggcaacagaggacaagctgcctatgcggctgcaaactgtttcttgaactctctcgtccaataccggttggctaagggtctgccagcctcttccttagacctgactgctatctcggattccggttatctagccgaagatctagagaaagcggcagaggtcgccaggaaccttggaagcgacactatttgcgaggctgaggttctcgcattagtcgatgccgccatcaacggtcaaatggcgtctgggtgcaataatcacgcgatcacaggcatgcgtataaccccaacaatgcagcccttttggacgtcagatgctaaatgcaaataccttcgtgaggcggccgaggcggaagcagcagcagacgaagctgcgggaggaccaagaacgatatcatacaacgcagccatcaaggcagccaagactctggacgaagcagaacaagtggtgtgcgagggtctcgtaagcaagctcgcggcagtcatgatgatggaattggaagatctcgacgttacgcgatcattatcgcactaccctctagattcgctcgtcgcgattgaaatccggaacttcattacccgcgaatttgaggcgacgctgcaagtgctcgagctattgtcgagtgggtctatccagacgcttgcaaaagcagtctgcgtgaagagcaagctagtcaattttcagtagagtaggg

SEQ ID NO: 7334 - DNA, 1773 bp, Muscodor strobelii
  misc_feature: SGI cDNA ID NO. 562205
  misc_feature: Encodes the peptide sequence at SEQ ID NO 7335
atgacaagcaactcacccgacttcaagcatccgggatcgcagcatagtgccgagccgtctgagtatggcactttcgcccgtgaagaccaagaagatggccgcagcttgcatatgaatacggatctggtaacagatgttgagcatcgcgatcttaaacgcggcctaagccagagacacctctccatgctaggaattgcaggagcgatagggacaggtctttttctcggtcttggtagcgcaatccaaaccgctggtcctctaggttccctcctagcttatgccactattggtcttgttgtgtgcgctgtccaattcgccttaggggaagtttctgccttactccccgtcacgggcagcttcgttcggcatgccgaatttcttgtcgaccctgctctcggtttcgcaatcgggtggaacatcgtatatggaaacatcttgagcattccaagcgaaatcaccgccatctgtgttttgttttcctattggacagacttaaattctgcggtcttcatcgttatattcatacttctcaccgtgatagtaggcgtcgcctttattcgcgtatatggagaggtcgaattcacctttgccattctcaaaatcctactcgtcgtatttctaattattctcggactagtgatcgatttgggaggcatacctggggttccagccatcggcggcaagtactggcgggaccctggcccctttgtgccttacatcgcaaatggaagttggggctatttcttaggctattggagtgtcatgagtggtgcagtgttttctttcgcaggtgttgagtctctcgctgttgcggcggcagaaactcgaaacccaagacgtgccattccagccgcttgtaaacgggtttttattcgcattgtagtcttttacatcctggccatcctcgttgtaggtctccttgttgccagcaacgatgaccgcctgaatgattattcgggtacagcagcccagagtccgttcgttattgctgcctctgctgctggaattccggccattccttctgtcgttaacgccattgtgatcacgtctgcctggtcctcgtcgaatcaaagcttgctagccggaactcgcatactttacggtctcgcagtcaagaaacaagcgccgcaattttttcttcggacaacatcttggggcgtcccatatttctgcgtcctattctttgccgctttcatgttcttgagctttctcacgttgtctaatgctgcgctcaccgttttctggtggttcgtggatttaacttctgcgggggtactcatttcttggtccggtaagtttcgtgccagtaaactccagaagctggatgctaacttctccttaactattctacttaatcatatcagactgaaattggccatgaagcgacaaggcatccctgccgacaaattaccatggcataactcgtggactcgtaagtatctcaccaatattacgtgcgttctttgctcaaaggacatagtatacagttcatccgttggactagctgcctgtctcctcatactttttacgggcggtttcacagtattcactgcgggaaattggaacgcacaagacttcgtgtcttcttatctagacattcccctcgtgctaacagcgtacctcgtttggaaattggtcaagaaaacgaaggttataccacttgccgatatacctctccaggaggctttcaagcaaatcgaagatgttccagagttcgacgagcctgttaaacataaaggttgggttcgactcgtcagttggatatgggattga

SEQ ID NO: 7335 - protein, 590 aa, Muscodor strobelii
  misc_feature: SGI Peptide ID NO. 562205
  misc_feature (59)..(556): Pfam Id: PF00324 Pfam Desc: Amino acid permease
  misc_feature (59)..(429): Pfam Id: PF00324 Pfam Desc: Amino acid permease
  misc_feature (500)..(556): Pfam Id: PF00324 Pfam Desc: Amino acid permease
  misc_feature (12)..(590): NCBI GI: 261358819 Blast Desc: dicarboxylic amino acid permease [Verticillium albo-atrum VaMs.102]
  misc_feature (28)..(571): NCBI GI: 46116426 Blast Desc: FG04055.1 [Gibberella zeae PH-1]
  misc_feature (39)..(568): NCBI GI: 256723171 Blast Desc: [Nectria haematococca mpVI 77-13-4]
  misc_feature (5)..(590): NCBI GI: 145608056 Blast Desc: MGG_13659 [Magnaporthe grisea 70-15] gi|145015526|gb|EDK00063.1| MGG_13659 [Magnaporthe grisea 70-15]
  misc_feature (27)..(590): NCBI GI: 71022373 Blast Desc: UM05269.1 [Ustilago maydis 521] gi|46101285|gb|EAK86518.1| UM05269.1 [Ustilago maydis 521]
  misc_feature (13)..(583): NCBI GI: 212539404 Blast Desc: amino acid permease, [Penicillium marneffei ATCC 18224] gi|210067156|gb|EEA21248.1| amino acid permease, [Penicillium marneffei ATCC 18224]
  misc_feature (10)..(589): NCBI GI: 255931163 Blast Desc: Pc12g02500 [Penicillium chrysogenum Wisconsin 54-1255] gi|211581757|emb|CAP79877.1| Pc12g02500 [Penicillium chrysogenum Wisconsin 54-1255]
  misc_feature (39)..(589): NCBI GI: 242804613 Blast Desc: arginine permease, [Talaromyces stipitatus ATCC 10500] gi|218717755|gb|EED17176.1| arginine permease, [Talaromyces stipitatus ATCC 10500]
  misc_feature (27)..(584): NCBI GI: 169775645 Blast Desc: [Aspergillus oryzae RIB40] gi|83771024|dbj|BAE61156.1| protein product [Aspergillus oryzae]
  misc_feature (27)..(584): NCBI GI: 238502283 Blast Desc: arginine permease, [Aspergillus flavus NRRL3357] gi|220691185|gb|EED47533.1| arginine permease, [Aspergillus flavus NRRL3357]
MTSNSPDFKHPGSQHSAEPSEYGTFAREDQEDGRSLHMNTDLVTDVEHRDLKRGLSQRHLSMLGIAGAIGTGLFLGLGSAIQTAGPLGSLLAYATIGLVVCAVQFALGEVSALLPVTGSFVRHAEFLVDPALGFAIGWNIVYGNILSIPSEITAICVLFSYWTDLNSAVFIVIFILLTVIVGVAFIRVYGEVEFTFAILKILLVVFLIILGLVIDLGGIPGVPAIGGKYWRDPGPFVPYIANGSWGYFLGYWSVMSGAVFSFAGVESLAVAAAETRNPRRAIPAACKRVFIRIVVFYILAILVVGLLVASNDDRLNDYSGTAAQSPFVIAASAAGIPAIPSVVNAIVITSAWSSSNQSLLAGTRILYGLAVKKQAPQFFLRTTSWGVPYFCVLFFAAFMFLSFLTLSNAALTVFWWFVDLTSAGVLISWSGKFRASKLQKLDANFSLTILLNHIRLKLAMKRQGIPADKLPWHNSWTRKYLTNITCVLCSKDIVYSSSVGLAACLLILFTGGFTVFTAGNWNAQDFVSSYLDIPLVLTAYLVWKLVKKTKVIPLADIPLQEAFKQIEDVPEFDEPVKHKGWVRLVSWIWD

SEQ ID NO: 7336 - DNA, 2876 bp, Muscodor strobelii
  misc_feature: SGI EST ID NO. CUFF.18186.0
  misc_feature: Variant of the nucleotide sequence at SEQ ID NO 7334
atttgatatgagaatggcgatgctgttgataacctaggtaaataatatgttcagctcctcggcagcttgaattacctacctccagtgttgccgggtatcgggaaagttgtcagtggagggttcgagttgttgaaaaagcactatcaatattctaaaagccgcgatgacaagcaactcacccgacttcaagcatccgggatcgcagcatagtgccgagccgtctgagtatggcactttcgcccgtgaagaccaagaagatggccgcagcttgcatatgaatacggatctggtaacagatgttgagcatcgcgatcttaaacgcggcctaagccagagacacctctccatgctaggaattgcaggagcgatagggacaggtctttttctcggtcttggtagcgcaatccaaaccgctggtcctctaggttccctcctagcttatgccactattggtcttgttgtgtgcgctgtccaattcgccttaggggaagtttctgccttactccccgtcacgggcagcttcgttcggcatgccgaatttcttgtcgaccctgctctcggtttcgcaatcgggtggaacatcgtatatggaaacatcttgagcattccaagcgaaatcaccgccatctgtgttttgttttcctattggacagacttaaattctgcggtcttcatcgttatattcatacttctcaccgtgatagtaggcgtcgcctttattcgcgtatatggagaggtcgaattcacctttgccattctcaaaatcctactcgtcgtatttctaattattctcggactagtgatcgatttgggaggcatacctggggttccagccatcggcggcaagtactggcgggaccctggcccctttgtgccttacatcgcaaatggaagttggggctatttcttaggctattggagtgtcatgagtggtgcagtgttttctttcgcaggtgttgagtctctcgctgttgcggcggcagaaactcgaaacccaagacgtgccattccagccgcttgtaaacgggtttttattcgcattgtagtcttttacatcctggccatcctcgttgtaggtctccttgttgccagcaacgatgaccgcctgaatgattattcgggtacagcagcccagagtccgttcgttattgctgcctctgctgctggaattccggccattccttctgtcgttaacgccattgtgatcacgtctgcctggtcctcgtcgaatcaaagcttgctagccggaactcgcatactttacggtctcgcagtcaagaaacaagcgccgcaattttttcttcggacaacatcttggggcgtcccatatttctgcgtcctattctttgccgctttcatgttcttgagctttctcacgttgtctaatgctgcgctcaccgttttctggtggttcgtggatttaacttctgcgggggtactcatttcttggtccggtaagtttcgtgccagtaaactccagaagctggatgctaacttctccttagtaagtcatgatcgccaatcaagcatgagactatgtttactttcgctctgtacagtgtggaaagccatattcaatcgataactaacatacaatcctcctgattctagactattctacttaatcatatcagactgaaattggccatgaagcgacaaggcatccctgccgacaaattaccatggcataactcgtggactctatacagttcatccgttggactagctgcctgtctcctcatactttttacgggcggtttcacagtattcactgcgggaaattggaacgcacaagacttcgtgtcttcttatctagacattcccctcgtgctaacagcgtacctcgtttggaaattggtcaagaaaacgaaggttataccacttgccgatatacctctccaggaggctttcaagcaaatcgaagatgttccagagttcgacgagcctgttaaacataaaggttgggttcgactcgtcagttggatatgggattgagccctgacattagcgtgctgtatcccatttacacaatctcaaagggtggataagctcgacttcttctcagggaccccaaaatttgatgacctccgattaaattagcactttccatatagaaacgactgcataatgtaatcgtagctggatgaggtcatcaattacagtagaataatgtggaatcgtctacgagctgccagccttgaacatggaggaatgaggtatgaccacaagcatcgcgtaaataagggcccttaatcccgtgagagtgggggtagtgctacacgtaccactacaagtcaccattcaatctcgagttcggagtcttccaggagggtacttatctcatcatagacgttggttgtgacgattgtgactaacttcgagcggggttatcgcgtcggacttagttcttgggaccggacgtatgtataaattggacgttgcagccgcattacggggaactctacgtggtctgatagcaaatttgttgaatgccgtccgccattcgtacttaattcatcgccataatgactacccagtatccgcggagaaggcttggggatgattatgttagcgctgagggactaggatgcatgggcatgtcatttggctatgcgtcattcggcgggttcgacgacgaagagtcgttcaaggtgctaacaagagcagccgacatgggtatcactttctgggatacctctgacgtctatggtccattcacgaacgaaaaactcattggcagatggttcgaagagactggccgtcgcaaggagattttcctcgcgacaaaattcgctaatagattcgttgatggcgcaatgactgtatgcggagatccagaatacgtaaaggaggcttgtgcgggcatgtataagaag

SEQ ID NO: 7337 - DNA, 1725 bp, Muscodor strobelii
  misc_feature: SGI cDNA ID NO. 562206
  misc_feature: Encodes the peptide sequence at SEQ ID NO 7338
atgacaagcaactcacccgacttcaagcatccgggatcgcagcatagtgccgagccgtctgagtatggcactttcgcccgtgaagaccaagaagatggccgcagcttgcatatgaatacggatctggtaacagatgttgagcatcgcgatcttaaacgcggcctaagccagagacacctctccatgctaggaattgcaggagcgatagggacaggtctttttctcggtcttggtagcgcaatccaaaccgctggtcctctaggttccctcctagcttatgccactattggtcttgttgtgtgcgctgtccaattcgccttaggggaagtttctgccttactccccgtcacgggcagcttcgttcggcatgccgaatttcttgtcgaccctgctctcggtttcgcaatcgggtggaacatcgtatatggaaacatcttgagcattccaagcgaaatcaccgccatctgtgttttgttttcctattggacagacttaaattctgcggtcttcatcgttatattcatacttctcaccgtgatagtaggcgtcgcctttattcgcgtatatggagaggtcgaattcacctttgccattctcaaaatcctactcgtcgtatttctaattattctcggactagtgatcgatttgggaggcatacctggggttccagccatcggcggcaagtactggcgggaccctggcccctttgtgccttacatcgcaaatggaagttggggctatttcttaggctattggagtgtcatgagtggtgcagtgttttctttcgcaggtgttgagtctctcgctgttgcggcggcagaaactcgaaacccaagacgtgccattccagccgcttgtaaacgggtttttattcgcattgtagtcttttacatcctggccatcctcgttgtaggtctccttgttgccagcaacgatgaccgcctgaatgattattcgggtacagcagcccagagtccgttcgttattgctgcctctgctgctggaattccggccattccttctgtcgttaacgccattgtgatcacgtctgcctggtcctcgtcgaatcaaagcttgctagccggaactcgcatactttacggtctcgcagtcaagaaacaagcgccgcaattttttcttcggacaacatcttggggcgtcccatatttctgcgtcctattctttgccgctttcatgttcttgagctttctcacgttgtctaatgctgcgctcaccgttttctggtggttcgtggatttaacttctgcgggggtactcatttcttggtccggtaagtttcgtgccagtaaactccagaagctggatgctaacttctccttaactattctacttaatcatatcagactgaaattggccatgaagcgacaaggcatccctgccgacaaattaccatggcataactcgtggactctatacagttcatccgttggactagctgcctgtctcctcatactttttacgggcggtttcacagtattcactgcgggaaattggaacgcacaagacttcgtgtcttcttatctagacattcccctcgtgctaacagcgtacctcgtttggaaattggtcaagaaaacgaaggttataccacttgccgatatacctctccaggaggctttcaagcaaatcgaagatgttccagagttcgacgagcctgttaaacataaaggttgggttcgactcgtcagttggatatgggattga

SEQ ID NO: 7338 - protein, 574 aa, Muscodor strobelii
  misc_feature: SGI Peptide ID NO. 562206
  misc_feature (59)..(540): Pfam Id: PF00324 Pfam Desc: Amino acid permease
  misc_feature (59)..(429): Pfam Id: PF00324 Pfam Desc: Amino acid permease
  misc_feature (449)..(540): Pfam Id: PF00324 Pfam Desc: Amino acid permease
  misc_feature (28)..(555): NCBI GI: 46116426 Blast Desc: FG04055.1 [Gibberella zeae PH-1]
  misc_feature (39)..(552): NCBI GI: 256723171 Blast Desc: [Nectria haematococca mpVI 77-13-4]
  misc_feature (12)..(574): NCBI GI: 261358819 Blast Desc: dicarboxylic amino acid permease [Verticillium albo-atrum VaMs.102]
  misc_feature (5)..(574): NCBI GI: 145608056 Blast Desc: MGG_13659 [Magnaporthe grisea 70-15] gi|145015526|gb|EDK00063.1| MGG_13659 [Magnaporthe grisea 70-15]
  misc_feature (27)..(574): NCBI GI: 71022373 Blast Desc: UM05269.1 [Ustilago maydis 521] gi|46101285|gb|EAK86518.1| UM05269.1 [Ustilago maydis 521]
  misc_feature (13)..(567): NCBI GI: 212539404 Blast Desc: amino acid permease, [Penicillium marneffei ATCC 18224] gi|210067156|gb|EEA21248.1| amino acid permease, [Penicillium marneffei ATCC 18224]
  misc_feature (39)..(573): NCBI GI: 242804613 Blast Desc: arginine permease, [Talaromyces stipitatus ATCC 10500] gi|218717755|gb|EED17176.1| arginine permease, [Talaromyces stipitatus ATCC 10500]
  misc_feature (10)..(573): NCBI GI: 255931163 Blast Desc: Pc12g02500 [Penicillium chrysogenum Wisconsin 54-1255] gi|211581757|emb|CAP79877.1| Pc12g02500 [Penicillium chrysogenum Wisconsin 54-1255]
  misc_feature (27)..(568): NCBI GI: 169775645 Blast Desc: [Aspergillus oryzae RIB40] gi|83771024|dbj|BAE61156.1| protein product [Aspergillus oryzae]
  misc_feature (27)..(568): NCBI GI: 238502283 Blast Desc: arginine permease, [Aspergillus flavus NRRL3357] gi|220691185|gb|EED47533.1| arginine permease, [Aspergillus flavus NRRL3357]
MTSNSPDFKHPGSQHSAEPSEYGTFAREDQEDGRSLHMNTDLVTDVEHRDLKRGLSQRHLSMLGIAGAIGTGLFLGLGSAIQTAGPLGSLLAYATIGLVVCAVQFALGEVSALLPVTGSFVRHAEFLVDPALGFAIGWNIVYGNILSIPSEITAICVLFSYWTDLNSAVFIVIFILLTVIVGVAFIRVYGEVEFTFAILKILLVVFLIILGLVIDLGGIPGVPAIGGKYWRDPGPFVPYIANGSWGYFLGYWSVMSGAVFSFAGVESLAVAAAETRNPRRAIPAACKRVFIRIVVFYILAILVVGLLVASNDDRLNDYSGTAAQSPFVIAASAAGIPAIPSVVNAIVITSAWSSSNQSLLAGTRILYGLAVKKQAPQFFLRTTSWGVPYFCVLFFAAFMFLSFLTLSNAALTVFWWFVDLTSAGVLISWSGKFRASKLQKLDANFSLTILLNHIRLKLAMKRQGIPADKLPWHNSWTLYSSSVGLAACLLILFTGGFTVFTAGNWNAQDFVSSYLDIPLVLTAYLVWKLVKKTKVIPLADIPLQEAFKQIEDVPEFDEPVKHKGWVRLVSWIWD

SEQ ID NO: 7339 - DNA, 2876 bp, Muscodor strobelii; identical to SEQ ID NO: 7336
  misc_feature: SGI EST ID NO. CUFF.18186.0
  misc_feature: Variant of the nucleotide sequence at SEQ ID NO 7337

SEQ ID NO: 7340 - DNA, 618 bp, Muscodor strobelii
  misc_feature: SGI cDNA ID NO. 562207
  misc_feature: Encodes the peptide sequence at SEQ ID NO 7341
atggaacaagatatctcggtgatcaataacccgaccaaacatgacccagaaacccaagactacgattatcccgttgtagagcagaagtccgctacggtccagagcacgaatgaatcggaagcactcgaaaggcaatctaccagctacaatgtgacacacaaaacttccaaaatcacgaacacagttgaacctcgaactgagcaaggaaaacgcgtagatcacaatattggacgcgctgttgcgaaacctcctaatgatagccgtaagataaaaaacttgggctgtgatgagatcgctaagaagacccagacggacagtgaaaaagtcggttctaaaaagcttcagagaaagctaataataccacaagagcagactcaatctaaatctgaaaccggaaaagaatcaagacaagaaacgacggataaagctctgaagaaactctctagagagaccagacgaaggatgagcgaagaagaagaagctgagattgataaagtgagggtcagcgaggaaacaccagtcgatatcgttgatctatatctgaacccaaggctgagtctgagagaaggatggaagaaaggtgcttgggagcgtcgtcggatatggaaggattggtga

SEQ ID NO: 7341 - protein, 205 aa, Muscodor strobelii
  misc_feature: SGI Peptide ID NO. 562207
MEQDISVINNPTKHDPETQDYDYPVVEQKSATVQSTNESEALERQSTSYNVTHKTSKITNTVEPRTEQGKRVDHNIGRAVAKPPNDSRKIKNLGCDEIAKKTQTDSEKVGSKKLQRKLIIPQEQTQSKSETGKESRQETTDKALKKLSRETRRRMSEEEEAEIDKVRVSEETPVDIVDLYLNPRLSLREGWKKGAWERRRIWKDW

SEQ ID NO: 7342 - DNA, 1644 bp, Muscodor strobelii
  misc_feature: SGI cDNA ID NO. 562208
  misc_feature: Encodes the peptide sequence at SEQ ID NO 7343
atggattcgatccttccatccattggacagctcgacaggccagagatccccagtcgcctacaatcccagcgggacttggcagccgtgggtctcttgcgcaccgaccgtggcagtgagccgcaggctctgttggccctaagcctgcgctggagacccctggacagagccctgaactcgggaccgtctcagaaggcttgctccgaacaattcgccgacccgaccttcaaggtcaacgaatatcctcaccgtctcaatttctacgccacgccgcccaccgccgacatcaccctcgagcagttcgagcaatgggccatcgacagactgcgcatcctcgccgagcttgaggcatgctccttccgcaacaagtcgcaagatgagatagccgcccatatgaagcctctgctcgagaaatacctgcctctcgaaacggacacctcccggtccacccagctctttgcccagcgccagaaagaccactacagccacttcattctcagactcgccttcgcctccaccgaggatctgcgccggaggttcagccgtgtcgagactatgctgtttcgactacgtctcgaagaatcgtcgtcgagagacaggaatgaattcatctcgactgtcgaactagattgtgagcctgtcactgttgaagagcaaaacaggtacagggacgagctggcctcggtggctggcttcaggaagaacagcaccgaggaggagacctggatcaaggtcgactgggacaccattcccgatctggtcgagtcacggagagttttcctaagggcaggtaaggcctacgttccgtccaaggagcagtcaaggatggtggtgacggcctttacgaaaagactagaccgtgcccttgagttaacagcccgcgccctgccacggctagatgaagacgacagactgacgccaatcctcgatcatttgtccaagaacttcatcactccggacgcctcctacacaagctcaacgtcgtctgcgcctggtgctgatatatcagcccgaaatgtcgatgccctctcgtcccacttccccctctgcatgcagaatttacaccgctcattaagacgagatgcacatctaaagcattttggtcgtttgcaatacacactcttcctcaagggtatcggtctaaatttggaggagtgcttgattttctggcgcacttcgttccacaaaattacagatgaccagtttaataaagaatacaggtacaatgtgcgccatacttacggagatgttggtggagacgcaaatcgccggggcggcggctattcgcccttctcatgccaaaagatcctcacagagcaccctcccgggcctggcgagtcccatggatgtccatatcgccacttcagtctagaaaacctcacttcgctattgcaaggggtcggaatctcagatcgtggtgtcttgcaaggtgtcaaagaagacaaggacagtcagaagtatcatatggcttgcaaccgtgtttttgactatgttcataagaatgagattaagaaagccaaggacgagggcgttatgaccgtggcacagcttgagactatcgtgcatccgaacgagtatttcaagcgcagttacctgttgaagaatctgggaaaagcaactagcgaggacgtaaaaatggaaggctga

SEQ ID NO: 7343 - protein, 547 aa, Muscodor strobelii
  misc_feature: SGI Peptide ID NO. 562208
  misc_feature (240)..(526): Pfam Id: PF04104 Pfam Desc: Eukaryotic and archaeal DNA primase, large subunit
  misc_feature (68)..(547): NCBI GI: 39977757 Blast Desc: MGG_06763 [Magnaporthe grisea 70-15] gi|145013718|gb|EDJ98359.1| MGG_06763 [Magnaporthe grisea 70-15]
  misc_feature (68)..(547): NCBI GI: 46109914 Blast Desc: FG01839.1 [Gibberella zeae PH-1]
  misc_feature (68)..(547): NCBI GI: 171692437 Blast Desc: protein product [Podospora anserina] gi|170946167|emb|CAP72968.1| protein product [Podospora anserina]
  misc_feature (68)..(547): NCBI GI: 256728513 Blast Desc: [Nectria haematococca mpVI 77-13-4]
  misc_feature (73)..(546): NCBI GI: 154304318 Blast Desc: BC1G_08429 [Botryotinia fuckeliana B05.10] gi|150854231|gb|EDN29423.1| BC1G_08429 [Botryotinia fuckeliana B05.10]
  misc_feature (68)..(547): NCBI GI: 85092024 Blast Desc: NCU04646 [Neurospora crassa OR74A] gi|34395782|sp|Q8NIZ4.1|PRI2_NEUCR RecName: Full= DNA primase large subunit gi|21622313|emb|CAD37016.1| related to DNA primase
  misc_feature (110)..(547): NCBI GI: 156037748 Blast Desc: SS1G_12588 [Sclerotinia sclerotiorum 1980] gi|154697996|gb|EDN97734.1| SS1G_12588 [Sclerotinia sclerotiorum 1980]
  misc_feature (68)..(492): NCBI GI: 116198397 Blast Desc: CHGG_07354 [Chaetomium globosum CBS 148.51] gi|88178633|gb|EAQ86101.1| CHGG_07354 [Chaetomium globosum CBS 148.51]
  misc_feature (68)..(545): NCBI GI: 258565989 Blast Desc: conserved [Uncinocarpus reesii 1704] gi|237907440|gb|EEP81841.1| conserved [Uncinocarpus reesii 1704]
  misc_feature (68)..(545): NCBI GI: 225677794 Blast Desc: DNA primase large subunit [Paracoccidioides brasiliensis Pb03]
MDSILPSIGQLDRPEIPSRLQSQRDLAAVGLLRTDRGSEPQALLALSLRWRPLDRALNSGPSQKACSEQFADPTFKVNEYPHRLNFYATPPTADITLEQFEQWAIDRLRILAELEACSFRNKSQDEIAAHMKPLLEKYLPLETDTSRSTQLFAQRQKDHYSHFILRLAFASTEDLRRRFSRVETMLFRLRLEESSSRDRNEFISTVELDCEPVTVEEQNRYRDELASVAGFRKNSTEEETWIKVDWDTIPDLVESRRVFLRAGKAYVPSKEQSRMVVTAFTKRLDRALELTARALPRLDEDDRLTPILDHLSKNFITPDASYTSSTSSAPGADISARNVDALSSHFPLCMQNLHRSLRRDAHLKHFGRLQYTLFLKGIGLNLEECLIFWRTSFHKITDDQFNKEYRYNVRHTYGDVGGDANRRGGGYSPFSCQKILTEHPPGPGESHGCPYRHFSLENLTSLLQGVGISDRGVLQGVKEDKDSQKYHMACNRVFDYVHKNEIKKAKDEGVMTVAQLETIVHPNEYFKRSYLLKNLGKATSEDVKMEG

SEQ ID NO: 7344 - DNA, 2168 bp, Muscodor strobelii
  misc_feature: SGI EST ID NO. CUFF.18230.0
  misc_feature: Variant of the nucleotide sequence at SEQ ID NO 7342
gcccctccaactcaattaattgttgaagattgatacaaccaccgcgtcgcgcttcttcctcgtaggtcttagatatcgataggatttcatagattgacaatttgagtgccgatacagactcagcacatctgattgggaattgagacgacaagtggaattttaatcgaccatcaccgactcatgctttcgtcgacatcgttgaccaagtcttgctaaacacctactgtcaacatgcttcgacacgaccacaaccgcatcgatgccaagaggcgcaacattgtcgaccaccgcaagaacaattcgccgacccgaccttcaaggtcaacgaatatcctcaccgtctcaatttctacgccacgccgcccaccgccgacatcaccctcgagcagttcgagcaatgggccatcgacagactgcgcatcctcgccgagcttgaggcatgctccttccgcaacaagtcgcaagatgagatagccgcccatatgaagcctctgctcgagaaatacctgcctctcgaaacggacacctcccggtccacccagctctttgcccagcgccagaaagaccactacagccacttcattctcagactcgccttcgcctccaccgaggatctgcgccggaggttcagccgtgtcgagactatgctgtttcgactacgtctcgaagaatcgtcgtcgagagacaggaatgaattcatctcgactgtcgaactagattgtgagcctgtcactgttgaagagcaaaacaggtacagggacgagctggcctcggtggctggcttcaggaagaacagcaccgaggaggagacctggatcaaggtcgactgggacaccattcccgatctggtcgagtcacggagagttttcctaagggcaggtaaggcctacgttccgtccaaggagcagtcaaggatggtggtgacggcctttacgaaaagactagaccgtgcccttgagttaacagcccgcgccctgccacggctagatgaagacgacagactgacgccaatcctcgatcatttgtccaagaacttcatcactccggacgcctcctacacaagctcaacgtcgtctgcgcctggtgctgatatatcagcccgaaatgtcgatgccctctcgtcccacttccccctctgcatgcagaatttacaccgctcattaagacgagatgcacatctaaagcattttggtcgtttgcaatacacactcttcctcaagggtatcggtctaaatttggaggagtgcttgattttctggcgcacttcgttccacaaaattacagatgaccagtttaataaagaatacaggtacaatgtgcgccatacttacggagatgttggtggagacgcaaatcgccggggcggcggctattcgcccttctcatgccaaaagatcctcacagagcaccctcccgggcctggcgagtcccatggatgtccatatcgccacttcagtctagaaaacctcacttcgctattgcaaggggtcggaatctcagatcgtggtgtcttgcaaggtgtcaaagaagacaaggacagtcagaagtatcatatggcttgcaaccgtgtttttgactatgttcataagaatgagattaagaaagccaaggacgagggcgttatgaccgtggcacagcttgagactatcgtgcatccgaacgagtatttcaagcgcagttacctgttgaagaatctgggaaaagcaactagcgaggacgtaaaaatggaaggctgagacgttcggccatggcaatgagtatgcgtggtacgatggtttcgactaatgaacgacattggtgttttaacgatcagggtaattctttcatttcgttggcaaaacgaaatgctgtatatgaattgtgtcgttcggcgtttggggagagggtttgggacgcatgtcgggtgccatgtgagttggattcggctgaatgaacttctgtcactagagcatcgtcaccgatggttccgtaattcatatcatgatcgatcaagaatgaagaggcttgagcaacggcattgtattttcagacgctggataaggtgctagtcgtgtcacaaacgtgttgatactggaaacgtctcttgagcatctaaggcgactataactcaggtttgctttttggaagtattgtatatcttctgcaatgtcatcatgagttaattatcc

SEQ ID NO: 7345 - DNA, 1305 bp, Muscodor strobelii
  misc_feature: SGI cDNA ID NO. 562209
  misc_feature: Reduced expression when VOC is produced
  misc_feature: Encodes the peptide sequence at SEQ ID NO 7346
atggactcagaaagcattgtagacaagaaaaagaaaagccgaatacaagacgagaacattccgtcattaaaaattcaacttgtcagcaacttcaatgctggcatcatcgacagatccggcaatgtgcctttcaagctctacgcttatattcaacgtcttggcggaattgatcgagaatctgatctgctcgtctttcctatcgccgggtcggtctttgatctgaaagcaggcttcgaacatggcttgattgagcttcatgatgagacgacggatgaaattgtcaatgttgcgaccgccatcgctgattctcgcgagctgcgcgctggggagagcccggagcttgacggagatgctctaatagagctcccaccagagagcaggtctcgcagacgcgcagttgagttccaattccacggtgccgaattcattcgcgactttgtcgagctaggtcgcgagtacacactgcgaattaaagggccagatctaggaataaagtggtggagctggtgtcctccggactttgctctggttcttccgaactcatcaacaagtgactctaatccgcctcttcatctcaaagaaccaagtagggttgctaagctacgcgtcgttgagtcccttcctcttccaccaaagttggacattcgattgtctctagcaattacgccagcaggcccagcaatcgtggcgcgagccacaaatccaactccagaggcggtgacagtcaaagtgtctggtgaccaacgatacttgtttccaccgtatcccatgccggggaataaccctatgcgaaaggccaatgtattagcggatctggcaccaaactccacatctcccacaaatttcatagtaacggagacaaatctcaaggctgatgtcgctggcattgatgacgagggaaaagacgacaacaagatcgcggggacactagcaccaaccgaactatttcccgagtcttgggtctgtgtcctcacagctccaggacataagccaaaatatccacgcagacaattcgtaactcttgcacctaatagttcagaaaccatcacacggcttgttcatctgccgcagcgactcttcaagcaacctgattcgagctcagggtctcccattctcagaagagagtttcgaatccaattgaggtctgttggttgctggtggacctcagggacgatggacgataccttcggcattgataacgatgtcttggatcactggccaactaggaactcccaagtagtgcccctgatgcttgagagtgatgatgtggtaacactggaggtcgaatacggcgagactgtttga

SEQ ID NO: 7346 - protein, 434 aa, Muscodor strobelii
  misc_feature: SGI Peptide ID NO. 562209
  misc_feature (22)..(431): NCBI GI: 46112789 Blast Desc: FG02896.1 [Gibberella zeae PH-1]
  misc_feature: Useful for introducing or modulating the production of volatile compounds
MDSESIVDKKKKSRIQDENIPSLKIQLVSNFNAGIIDRSGNVPFKLYAYIQRLGGIDRESDLLVFPIAGSVFDLKAGFEHGLIELHDETTDEIVNVATAIADSRELRAGESPELDGDALIELPPESRSRRRAVEFQFHGAEFIRDFVELGREYTLRIKGPDLGIKWWSWCPPDFALVLPNSSTSDSNPPLHLKEPSRVAKLRVVESLPLPPKLDIRLSLAITPAGPAIVARATNPTPEAVTVKVSGDQRYLFPPYPMPGNNPMRKANVLADLAPNSTSPTNFIVTETNLKADVAGIDDEGKDDNKIAGTLAPTELFPESWVCVLTAPGHKPKYPRRQFVTLAPNSSETITRLVHLPQRLFKQPDSSSGSPILRREFRIQLRSVGCWWTSGTMDDTFGIDNDVLDHWPTRNSQVVPLMLESDDVVTLEVEYGETV

SEQ ID NO: 7347 - DNA, 1519 bp, Muscodor strobelii
  misc_feature: SGI EST ID NO. CUFF.18238.0
  misc_feature: Variant of the nucleotide sequence at SEQ ID NO 7345
ctcagaaagcattgtagacaagaaaaagaaaagccgaatacaagacgagaacattccgtcattaaaaattcaacttgtcagcaacttcaatgctggcatcatcgacagatccggcaatgtgcctttcaagctctacgcttatattcaacgtcttggcggaattgatcgagaatctgatctgctcgtctttcctatcgccgggtcggtctttgatctgaaagcaggcttcgaacatggcttgattgagcttcatgatgagacgacggatgaaattgtcaatgttgcgaccgccatcgctgattctcgcgagctgcgcgctggggagagcccggagcttgacggagatgctctaatagagctcccaccagagagcaggtctcgcagacgcgcagttgagttccaattccacggtgccgaattcattcgcgactttgtcgagctaggtcgcgagtacacactgcgaattaaagggccagatctaggaataaagtggtggagctggtgtcctccggactttgctctggttcttccgaactcatcaacaagtgactctaatccgcctcttcatctcaaagaaccaagtagggttgctaagctacgcgtcgttgagtcccttcctcttccaccaaagttggacattcgattgtctctagcaattacgccagcaggcccagcaatcgtggcgcgagccacaaatccaactccagaggcggtgacagtcaaagtgtctggtgaccaacgatacttgtttccaccgtatcccatgccggggaataaccctatgcgaaaggccaatgtattagcggatctggcaccaaactccacatctcccacaaatttcatagtaacggagacaaatctcaaggctgatgtcgctggcattgatgacgagggaaaagacgacaacaagatcgcggggacactagcaccaaccgaactatttcccgagtcttgggtctgtgtcctcacagctccaggacataagccaaaatatccacgcagacaattcgtaactcttgcacctaatagttcagaaaccatcacacggcttgttcatctgccgcagcgactcttcaagcaacctgattcgagctcagggtctcccattctcagaagagagtttcgaatccaattgaggtctgttggttgctggtggacctcagggacgatggacgataccttcggcattgataacgatgtcttggatcactggccaactaggaactcccaagtagtgcccctgatgcttgagagtgatgatgtggtaacactggaggtcgaatacggcgagactgtttgaatttggttaagatcgtacgtccgagtattacgagtgcgtaaaaaagccacattcaacatgtgcgccgtgtctatattgattgcaataaaactttaaagatttaaattcgtcagagccggctgggtacaatgtcatgtattcatgatgtgcatcaacatgagaaatagtgtcgctatgcataggaactaaactcgatacgaaaaacaaagctgaccaaat

SEQ ID NO: 7348 - DNA, 1041 bp, Muscodor strobelii
  misc_feature: SGI cDNA ID NO. 562210
  misc_feature: Encodes the peptide sequence at SEQ ID NO 7349
atgagacactcgtggctattggcacttgcgagcagcaaacttgcggcttgtggaactatactctgggacggccgcttcaatgacctgagctcatccagtgacctgaataattggtcatgggcgaatcaggttggaccataccagtactatattcatggaagcggcgctgttactgaatatgtcaatctatcgtctgactataaaaatccggccgacacgggctcgaaacaaggcgtcaagatcacattggactcaactgcatactggaatggtcagactatgcgacgtacggagttgatcccgcagacgactgctgcgatcaactccggcaaagtgtggtatcatttcagcatgatgcggagcactacgaacgcaccatcgatctaccgagaacatcaaatcaacttcttcgaaagccacttcacggagatgaaagctggttggatcagcggcgagagtgctacttcagactctaatctccaatggatggttggcggtacatcgaaatgggccgttactttcgacgcaggagtttggcacaatgttgcgtatgaaatcgacttcagcgccaataccgtggctttctggcattcaaccgggtccaaccctttggcattgaccgtcagtgccgtgtcggcctctacatctagtaatggtgccgactggcatcttggtgttttggaactacctcgcgatgggtatcccgatgcgaacgaagacttgtacttctctggtgtttatatcgagagtggaagcctgactacttctgtatctggacctggagcgtcaagtggaggaggttcttcgagcagcagcactaccaccaagagcgcaacgagcagcagtacgctctcgacctcgacgacaaaaggctctacgacaacgactaaaacaacgacgtccgcttccgcaacaactacaagtggttgctccgcagctaaatatgggcaatgcggaggtatcggctggaccggctgcaaaagctgcgcctcaggatcgacgtgcacgaccgtgaacgactattacttccaatgtctataa

SEQ ID NO: 7349 - protein, 346 aa, Muscodor strobelii
  misc_feature: SGI Peptide ID NO. 562210
  misc_feature (314)..(342): Pfam Id: PF00734 Pfam Desc: Fungal cellulose binding domain
  misc_feature (9)..(345): NCBI GI: 116205385 Blast Desc: CHGG_10576 [Chaetomium globosum CBS 148.51] gi|88176704|gb|EAQ84172.1| CHGG_10576 [Chaetomium globosum CBS 148.51]
  misc_feature (1)..(345): NCBI GI: 85090296 Blast Desc: NCU09764 [Neurospora crassa OR74A] gi|28919704|gb|EAA29112.1| conserved [Neurospora crassa OR74A]
  misc_feature (8)..(345): NCBI GI: 39946208 Blast Desc: MGG_08408 [Magnaporthe grisea 70-15] gi|145019932|gb|EDK04160.1| MGG_08408 [Magnaporthe grisea 70-15]
  misc_feature (20)..(346): NCBI GI: 261353966 Blast Desc: conserved [Verticillium albo-atrum VaMs.102]
  misc_feature (1)..(346): NCBI GI: 171677165 Blast Desc: protein product [Podospora anserina] gi|170936650|emb|CAP61309.1| protein product [Podospora anserina]
  misc_feature (1)..(260): NCBI GI: 85081705 Blast Desc: NCU00449 [Neurospora crassa OR74A] gi|28917845|gb|EAA27532.1| conserved [Neurospora crassa OR74A]
  misc_feature (6)..(261): NCBI GI: 154292153 Blast Desc: BC1G_14698 [Botryotinia fuckeliana B05.10] gi|150846249|gb|EDN21442.1| BC1G_14698 [Botryotinia fuckeliana B05.10]
  misc_feature (6)..(260): NCBI GI: 156055190 Blast Desc: SS1G_04946 [Sclerotinia sclerotiorum 1980] gi|154702731|gb|EDO02470.1| SS1G_04946 [Sclerotinia sclerotiorum 1980]
  misc_feature (1)..(261): NCBI GI: 171686038 Blast Desc: protein product [Podospora anserina] gi|170942980|emb|CAP68633.1| protein product [Podospora anserina]
  misc_feature (15)..(260): NCBI GI: 189191658 Blast Desc: conserved [Pyrenophora tritici-repentis Pt-1C-BFP] gi|187973774|gb|EDU41273.1| conserved [Pyrenophora tritici-repentis Pt-1C-BFP]
MRHSWLLALASSKLAACGTILWDGRFNDLSSSSDLNNWSWANQVGPYQYYIHGSGAVTEYVNLSSDYKNPADTGSKQGVKITLDSTAYWNGQTMRRTELIPQTTAAINSGKVWYHFSMMRSTTNAPSIYREHQINFFESHFTEMKAGWISGESATSDSNLQWMVGGTSKWAVTFDAGVWHNVAYEIDFSANTVAFWHSTGSNPLALTVSAVSASTSSNGADWHLGVLELPRDGYPDANEDLYFSGVYIESGSLTTSVSGPGASSGGGSSSSSTTTKSATSSSTLSTSTTKGSTTTTKTTTSASATTTSGCSAAKYGQCGGIGWTGCKSCASGSTCTTVNDYYFQCL

SEQ ID NO: 7350 - DNA, 1024 bp, Muscodor strobelii
  misc_feature: SGI EST ID NO. CUFF.18233.0
  misc_feature: Variant of the nucleotide sequence at SEQ ID NO 7348
cggcgagagtgctacttcagactctaatctccaatggatggttggcggtacatcgaaatgggccgttactttcgacgcaggagtttggcacaatgttgcgtatgaaatcgacttcagcgccaataccgtggctttctggcattcaaccgggtccaaccctttggcattgaccgtcagtgccgtgtcggcctctacatctagtaatggtgccgactggcatcttggtgttttggaactacctcgcgatgggtatcccgatgcgaacgaagacttgtacttctctggtgtttatatcgagagtggaagcctgactacttctgtatctggacctggagcgtcaagtggaggaggttcttcgagcagcagcactaccaccaagagcgcaacgagcagcagtacgctctcgacctcgacgacaaaaggctctacgacaacgactaaaacaacgacgtccgcttccgcaacaactacaagtggttgctccgcagctaaatatgggcaatgcggaggtatcggctggaccggctgcaaaagctgcgcctcaggatcgacgtgcacgaccgtgaacgactattacttccaatgtctataacgtgcgaattattatgacaactagacttcatgtatatactactgcaaccggggttccgtagatgcttcttcgaggttgtccatttgttttgaacagatacaacatagttctatatatctatgatgtcatatttgcagagggcggatcttagtacatgatcctcatacatgattgatatacatattctatatttcacatggagacttcgtgcttcacaagcaccattgttcccgcacttcaaattgaaccttagtgaacatgatagtcgatcagaatatgagccttcaaatggtttctaccgaagcggaacaatgttagtaatatatgcacatacattgactcctgtgtcgatactgtattgttgtcatgtacgtcgtttaggaggtgtttgtggttcacaacatgtgagtcacatcacgtggcggatcatcg

SEQ ID NO: 7351 - DNA, 453 bp, Muscodor strobelii
  misc_feature: SGI cDNA ID NO. 562211
  misc_feature: Elevated expression when VOC is produced
  misc_feature: Encodes the peptide sequence at SEQ ID NO 7352
atgtcgatccccacttcaacctccgtcgtagagtcagccgttatcaaggctcccctgagccacgtctggcaccatatcaaactgcagaacttcagcgacttttggtctacgctgaagtccagcgagtttgtcaagggagccagcaacgagactgacatcgtccactgggtcttcaacgacggcactgaactcgatgtcaagcaagaggagcatagcactatcaaccattacatcacgtacagtgtcatcactgccaagcctgagctgacttacacgtcggttctgtctaccattcgctgctacgctatcacttcgggcgaattcgagggctctaccttcatcgagtggactggcaacttctctagcgatgccgatgctggtgtcattcaggatgccaaattcaagcgtcgcgacgctctcgccgacttggctaaagttgcagtaaagaagtag

SEQ ID NO: 7352 - protein, 150 aa, Muscodor strobelii
  misc_feature: SGI Peptide ID NO. 562211
  misc_feature (2)..(150): NCBI GI: 189208504 Blast Desc: conserved [Pyrenophora tritici-repentis Pt-1C-BFP] gi|187976678|gb|EDU43304.1| conserved [Pyrenophora tritici-repentis Pt-1C-BFP]
  misc_feature (2)..(149): NCBI GI: 39969363 Blast Desc: MGG_10292 [Magnaporthe grisea 70-15] gi|149211199|ref|XP_001522974.1| MGCH7_ch7g1060 [Magnaporthe grisea 70-15] gi|86197015|gb|EAQ71653.1| MGCH7_ch7g1060 grisea
  misc_feature (3)..(150): NCBI GI: 169599320 Blast Desc: SNOG_02477 [Phaeosphaeria nodorum SN15] gi|111069569|gb|EAT90689.1| SNOG_02477 [Phaeosphaeria nodorum SN15]
  misc_feature (2)..(150): NCBI GI: 46115924 Blast Desc: FG03804.1 [Gibberella zeae PH-1]
  misc_feature (9)..(149): NCBI GI: 85106258 Blast Desc: NCU07273 [Neurospora crassa OR74A] gi|28923723|gb|EAA32891.1| conserved [Neurospora crassa OR74A]
  misc_feature (3)..(150): NCBI GI: 256730388 Blast Desc: [Nectria haematococca mpVI 77-13-4]
  misc_feature (1)..(137): NCBI GI: 170940190 Blast Desc: protein product [Podospora anserina]
  misc_feature (3)..(136): NCBI GI: 116195556 Blast Desc: CHGG_04376 [Chaetomium globosum CBS 148.51] gi|88180289|gb|EAQ87757.1| CHGG_04376 [Chaetomium globosum CBS 148.51]
  misc_feature (5)..(150): NCBI GI: 149211345 Blast Desc: MGCH7_ch7g1129 [Magnaporthe grisea 70-15] gi|86197084|gb|EAQ71722.1| MGCH7_ch7g1129 [Magnaporthe grisea 70-15]
  misc_feature: Useful for introducing or modulating the production of volatile compounds
MSIPTSTSVVESAVIKAPLSHVWHHIKLQNFSDFWSTLKSSEFVKGASNETDIVHWVFNDGTELDVKQEEHSTINHYITYSVITAKPELTYTSVLSTIRCYAITSGEFEGSTFIEWTGNFSSDADAGVIQDAKFKRRDALADLAKVAVKK

SEQ ID NO: 7353 - DNA, 1429 bp, Muscodor strobelii
  misc_feature: SGI EST ID NO. CUFF.18259.0
  misc_feature: Variant of the nucleotide sequence at SEQ ID NO 7351
cgcactacctacttctcagtcactgctttgcccctcaatgacgtttttgatggcattagtgatgcatgtgcaaacagtgcaaacgcctagatttgtcttcacttacattatttcactaccacatctcaaatctgcttgttcattctctctcgaaatcgtaagcatctaaaccaattcggcatacgaattcgagaactcaactgcaagtcaatagcaacgactagatcatcatgtcgatccccacttcaacctccgtcgtagagtcagccgttatcaaggctcccctgagccacgtctggcaccatatcaaactgcagaacttcagcgacttttggtctacgctgaagtccagcgagtttgtcaagggagccagcaacgagactgacatcgtccactgggtcttcaacgacggcactgaactcgatgtcaagcaagaggagcatagcactatcaaccattacatcacgtacagtgtcatcactgccaagcctgagctgacttacacgtcggttctgtctaccattcgctgctacgctatcacttcgggcgaattcgagggctctaccttcatcgagtggactggcaacttctctagcgatgccgatgctggtgtcattcaggatgccaaattcaagcgtcgcgacgctctcgccgacttggctaaagttgcagtaaagaagtagaacgatgcacaggctaccatggctaaggtcgtcgtgaacagtgtgccgaaggagaaattcatgaaagttctatggttgatctcgttgttacgccatgaattgccgcaaaattgataatctcttgattggagaagtattcaaattaaatgcaaaaggaaaaagacactaagggtcaatgtgttttcagtattcccaatgggactaagcgaatggcaacgtgagatagccagcatctgtaaaataggggtctgagtatttcttgggctcgactgatcattagcattagtaaaatcacgtcaaccacatgcattgaactgttaaaatccacagatcgtttggtgtttcgactttcagaagaacatcattccacctgctggtaaattctggacaaatcttaataaacaccgtcaccaaccgaatacctaacacaccgagtatttcacatttgctacgtatcatttcgagatgtgaatcgaataatactgtcctcactgagtttctttcgaatcgattcctgatttgggctcacaccatgagaccatgcggtccttggcgaataactcagtcataggtccccatttctcaatatcagtcgcatcatccaatagtccaatcttcactatcagtgttccgcccagtgaagccggccgtactacaatgatggtgggacaactcgcacagtagtcgtaaactacatcttctccagaaccgcctttgcgggtccaattattgactttgccagacat

SEQ ID NO: 7354 - DNA, 1557 bp, Muscodor strobelii
  misc_feature: SGI cDNA ID NO. 562212
  misc_feature: Encodes the peptide sequence at SEQ ID NO 7355
atgccagtcaactccttcactcctattaatcagagggagatccaaactcccaatgcacctaatgcctatctggcgtttggtgggaggacgttttcagatggcacggagattcatgagactaagaagaaacgacatgtcgacgatgcccagactataacgccttactcttccaagaaacagttcactgacggccaatttgagacggcttgccccattcgttcacctcttacatcaacttcaacaccgtttcagtcactgaaagtaaccaagactttccgcacctttgacaaccctcttaaaatcaacaattatcatttgcttgcctcttcatataacacttgcttcgacacccagagctgtgaagcggaaacgtctgatacgactagcgagtttgataagtacttcaacaagtcgaaattcgaggaagcgcaacaaaaggctgtccataatgctagtgaatatctctcagacgaggacctatatgtgggtttcagctggccatcagtgaacactgaccagtccctgtttgaacccgaacaccgttcgaaatcagtgtgcgagaatcagatagcccccgcagttcaagattcttccaatcttagtggtgatctgctccagtcagacgatgactatcctctggacgatgatgtcgaggaagaagatatgatcaatctcttagcagtacctcaagatgcagtacttgagactcacgtacctccttcatctgtccaacaggactgggatcatgagtcacgatcggatgtgcaatatgatccaactttgcagtattcgtccccgagcttagaatcttttgatgaaggtcaagcaacgaatctcacgacaaaagtgggtgaagaaagtctgttagacgaagaagttgactggaacgcagtttacgacgtcgcagacagcattcagaagaagtcatcgtcttcgctctactcacaaccaatggagagagcttcgatggtgggcctaattatgacggatcggctagacctgatgaattcagattcgacaatatttacagacactgccgaaccattatctgctttcgtccggccgccttttcctgataaggttcgtgatcgaccctttgtacctggcgttagctctacagcattgttgcgtacatgctttcggatcggggtcatgattagtcaaactgcatggagccacaatcacaggcaagatgtgatttttgagctatatgcccgcgtcgcatactcaaaccgcgagacaatgagtcgaaagcagcatttccgattagttgatctgttcaaagaccaacagccttatccagctgcgaccctagcaaactggagggctgggactcagcttgcacatgatagtgcggtattcctcgatacgcataagggaccacggctttgctggtgcatatgcaaggcaaagcgagatacgaatacagtgatcggttggtcttatacggtcctcaggatcaaagaaaccacttgggagcagattgaatgggccaagagagttgtgggtgatcagtcggtcgaacagaatggagatctagggacgaacaagtcgtga

SEQ ID NO: 7355 - protein, 518 aa, Muscodor strobelii
  misc_feature: SGI Peptide ID NO. 562212
  misc_feature (150)..(502): NCBI GI: 85096986 Blast Desc: NCU04723 [Neurospora crassa OR74A] gi|28921847|gb|EAA31122.1| [Neurospora crassa OR74A]
  misc_feature (208)..(509): NCBI GI: 154310871 Blast Desc: BC1G_06414 [Botryotinia fuckeliana B05.10] gi|150851213|gb|EDN26406.1| BC1G_06414 [Botryotinia fuckeliana B05.10]
  misc_feature (204)..(509): NCBI GI: 156034252 Blast Desc: SS1G_13429 [Sclerotinia sclerotiorum 1980] gi|154698832|gb|EDN98570.1| SS1G_13429 [Sclerotinia sclerotiorum 1980]
  misc_feature (209)..(509): NCBI GI: 261359405 Blast Desc: conserved [Verticillium albo-atrum VaMs.102]
  misc_feature (217)..(502): NCBI GI: 171682492 Blast Desc: protein product [Podospora anserina] gi|170941205|emb|CAP66855.1| protein product [Podospora anserina]
  misc_feature (308)..(503): NCBI GI: 189201257 Blast Desc: conserved [Pyrenophora tritici-repentis Pt-1C-BFP] gi|187984064|gb|EDU49552.1| conserved [Pyrenophora tritici-repentis Pt-1C-BFP]
  misc_feature (326)..(502): NCBI GI: 169618621 Blast Desc: SNOG_12504 [Phaeosphaeria nodorum SN15] gi|160703654|gb|EAT80317.2| SNOG_12504 [Phaeosphaeria nodorum SN15]
  misc_feature (342)..(441): NCBI GI: 258575021 Blast Desc: [Uncinocarpus reesii 1704] gi|237901958|gb|EEP76359.1| [Uncinocarpus reesii 1704]
MPVNSFTPINQREIQTPNAPNAYLAFGGRTFSDGTEIHETKKKRHVDDAQTITPYSSKKQFTDGQFETACPIRSPLTSTSTPFQSLKVTKTFRTFDNPLKINNYHLLASSYNTCFDTQSCEAETSDTTSEFDKYFNKSKFEEAQQKAVHNASEYLSDEDLYVGFSWPSVNTDQSLFEPEHRSKSVCENQIAPAVQDSSNLSGDLLQSDDDYPLDDDVEEEDMINLLAVPQDAVLETHVPPSSVQQDWDHESRSDVQYDPTLQYSSPSLESFDEGQATNLTTKVGEESLLDEEVDWNAVYDVADSIQKKSSSSLYSQPMERASMVGLIMTDRLDLMNSDSTIFTDTAEPLSAFVRPPFPDKVRDRPFVPGVSSTALLRTCFRIGVMISQTAWSHNHRQDVIFELYARVAYSNRETMSRKQHFRLVDLFKDQQPYPAATLANWRAGTQLAHDSAVFLDTHKGPRLCWCICKAKRDTNTVIGWSYTVLRIKETTWEQIEWAKRVVGDQSVEQNGDLGTNKS

SEQ ID NO: 7356 - DNA, 379 bp, Muscodor strobelii
  misc_feature: SGI EST ID NO. CUFF.18241.0
  misc_feature: Variant of the nucleotide sequence at SEQ ID NO 7354
cgcagatccgtttaatgacgatatgagccgtcagaggtaatacatgattgaggactagatctgagataaagtggctgacgctggcataagcattcacgctaccacagattctccatcgatgccagtcaactccttcactcctattaatcagagggagatccaaactcccaatgcacctaatgcctatctggcgtttggtgggaggacgttttcagatggcacggagattcatgagactaagaagaaacgacatgtcgacgatgcccagactataacgccttactcttccaagaaacagttcactgacggccaatttgagacggcttgccccattcgttcacctcttacatcaacttcaacaccgtttcagtcactgaaa

SEQ ID NO: 7357 - DNA, 1611 bp, Muscodor strobelii
  misc_feature: SGI cDNA ID NO. 562213
  misc_feature: Encodes the peptide sequence at SEQ ID NO 7358
atgtcaatcatatcctcgctctcgaacgggcatgagctcactgggatagccggggaggctgcctctcgagttaactattatcaacagatggatattgaaagacaaaatctcgttcaaggcatgatacggcaaatcaattccgatgcacaaagaatagccgaactggaaaaggaaatcagatatgagcagagaaatcgaaaacagtatcaaggagaggccgaaaaacttgaattggaggtggcccaaataaatcaagtcgttaaaagtactgggtttacagttgtacttattgatggtgacggtgcgaaattcagagatgaattccttcgcgaccatgagaatggtgccgctcgagctgccgtgaaactcagagaagcagtcaaagaggcaggctatggggacgatatcctcgttcgcgtcttcgcgaacgttaatgatctggcgaggtcgctttgcctctctggtgccattgactacgcagatagcatgaaaatatttgcggagcaattcacaaattctaatcccagctttgatttcatcaacgttggcaaaggcaaagagaatgcagattcaaaattacgaagtcaactacgccattattacagaaattttcaatgccagaagatcttgattgcgtgctgccacgacaacggctatctccatgcccttcgcgaatacttcggttctaaagacgacaagatagttcttttagagacaacaccagccgagccgggcttcaagaaattagacttcccgatcctgcgcttcgattctgtttttaggtctgagtctttgaataacgagactaagtacagaccacaaagccttccattcagcaatgttcgcgctccccccgggtttgctcaggcacctcttggtcgaccaatgccatctctaccagatctggcggatgccactatcacaaatcagtcgatgtaccgaagttcaacaccttctgcgagttctaccacgacatcgccagttcagaccacctctaacgttgagcgaccacagccacctgtggagaaatcaccgccccctgcgccaacccgtcctaagtcaaatatcgtcagctctggcaacggaggtacttcgattagttatgctacagctggtggaaacgcggagcatcaaaacgttacggtaaaaatggcaaagccgaagaaacagcccaattacgcatactacaatgttgatcagggtcggctggatcttccgatacagcatccagcgaagtctgccgctcaggagacttaccaggccaaattcctagcagccaagccgtcagtcttgtgcaatgatcactaccttcgcggcttctgcaagaaactcaactgtaataaaacccacgatgtgaagctaactcctgaggaacttgccattcatcgatataaagctcgaacgagcatgtgtcccgaggggccatactgcgtcgactatacctgctacttatctcatcattgtcctcgggtaaagtgccttccgacacaggagaagccctgccccttttcgaacacggctgaatacggtgatctgcattatacgactaaggaacagtctacgcctcgttacaaatggaccgaaggcatcgagtttcccgaaagtttatga

SEQ ID NO: 7358 - protein, 536 aa, Muscodor strobelii
  misc_feature: SGI Peptide ID NO. 562213
  misc_feature (23)..(536): NCBI GI: 121708755 Blast Desc: conserved [Aspergillus clavatus NRRL 1] gi|119400386|gb|EAW10812.1| conserved [Aspergillus clavatus NRRL 1]
  misc_feature (19)..(514): NCBI GI: 119499802 Blast Desc: NFIA_102460 [Neosartorya fischeri NRRL 181] gi|119414823|gb|EAW24761.1| conserved [Neosartorya fischeri NRRL 181]
  misc_feature (19)..(536): NCBI GI: 146323905 Blast Desc: conserved [Aspergillus fumigatus Af293] gi|129557477|gb|EAL89403.2| conserved [Aspergillus fumigatus Af293]
  misc_feature (19)..(536): NCBI GI: 159125625 Blast Desc: conserved [Aspergillus fumigatus A1163]
  misc_feature (50)..(274): NCBI GI: 256730063 Blast Desc: NECHADRAFT_82690 [Nectria haematococca mpVI 77-13-4]
  misc_feature (23)..(332): NCBI GI: 212545474 Blast Desc: conserved [Penicillium marneffei ATCC 18224] gi|210065860|gb|EEA19954.1| conserved [Penicillium marneffei ATCC 18224]
  misc_feature (34)..(504): NCBI GI: 171685492 Blast Desc: protein product [Podospora anserina] gi|170942707|emb|CAP68360.1| protein product [Podospora anserina]
  misc_feature (91)..(513): NCBI GI: 85092272 Blast Desc: NCU08222 [Neurospora crassa OR74A] gi|28920716|gb|EAA30076.1| [Neurospora crassa OR74A]
  misc_feature (27)..(503): NCBI GI: 189195098 Blast Desc: conserved [Pyrenophora tritici-repentis Pt-1C-BFP] gi|187979766|gb|EDU46392.1| conserved [Pyrenophora tritici-repentis Pt-1C-BFP]
  misc_feature (22)..(489): NCBI GI: 189199110 Blast Desc: conserved [Pyrenophora tritici-repentis Pt-1C-BFP] gi|187982991|gb|EDU48479.1| conserved [Pyrenophora tritici-repentis Pt-1C-BFP]
MSIISSLSNGHELTGIAGEAASRVNYYQQMDIERQNLVQGMIRQINSDAQRIAELEKEIRYEQRNRKQYQGEAEKLELEVAQINQVVKSTGFTVVLIDGDGAKFRDEFLRDHENGAARAAVKLREAVKEAGYGDDILVRVFANVNDLARSLCLSGAIDYADSMKIFAEQFTNSNPSFDFINVGKGKENADSKLRSQLRHYYRNFQCQKILIACCHDNGYLHALREYFGSKDDKIVLLETTPAEPGFKKLDFPILRFDSVFRSESLNNETKYRPQSLPFSNVRAPPGFAQAPLGRPMPSLPDLADATITNQSMYRSSTPSASSTTTSPVQTTSNVERPQPPVEKSPPPAPTRPKSNIVSSGNGGTSISYATAGGNAEHQNVTVKMAKPKKQPNYAYYNVDQGRLDLPIQHPAKSAAQETYQAKFLAAKPSVLCNDHYLRGFCKKLNCNKTHDVKLTPEELAIHRYKARTSMCPEGPYCVDYTCYLSHHCPRVKCLPTQEKPCPFSNTAEYGDLHYTTKEQSTPRYKWTEGIEFPESL

SEQ ID NO: 7359 - DNA, 5530 bp, Muscodor strobelii
  misc_feature: SGI EST ID NO. CUFF.18349.0
  misc_feature: Variant of the nucleotide sequence at SEQ ID NO 7357
aattacctggcaattatttgatccaggcaacaaacggccactcttctttctttctaagaacgttcataaccaatttggctagatgaattgacgtgtacgcaatttgtgaacttttcgtctgattcttctacacaataatcactggggcacctagtagacatcgcgcgaacatcacaaccggcgcaatcaccaatcttctaattgctcaggcacgctgacaaaagccggtgtcaatctatatgagaagacattgcatatttcgcagtacacagttctgcattcttcagctgatcacgtctgcctcgtacatcgctagccaccactaggcagtaacttctctttgcagaccaattttcagccaatttccccgaaagtgaagacagctgcgatatgtcaatcatatcctcgctctcgaacgggcatgagctcactgggatagccggggaggctgcctctcgagttaactattatcaacagatggatattgaaagacaaaatctcgttcaaggcatgatacggcaaatcaattccgatgcacaaagaatagccgaactggaaaaggaaatcagatatgagcagagaaatcgaaaacagtatcaaggagaggccgaaaaacttgaattggaggtggcccaaataaatcaagtcgttaaaagtactgggtttacagttgtacttattgatggtgacggtgcgaaattcagagatgaattccttcgcgaccatgagaatggtgccgctcgagctgccgtgaaactcagagaagcagtcaaagaggcaggctatggggacgatatcctcgttcgcgtcttcgcgaacgttaatgatctggcgaggtcgctttgcctctctggtgccattgactacgcagatagcatgaaaatatttgcggagcaattcacaaattctaatcccagctttgatttcatcaacgttggcaaaggcaaagagaatgcagattcaaaattacgaagtcaactacgccattattacagaaattttcaatgccagaagatcttgattgcgtgctgccacgacaacggctatctccatgcccttcgcgaatacttcggttctaaagacgacaagatagttcttttagagacaacaccagccgagccgggcttcaagaaattagacttcccgatcctgcgcttcgattctgtttttaggtctgagtctttgaataacgagactaagtacagaccacaaagccttccattcagcaatgttcgcgctccccccgggtttgctcaggcacctcttggtcgaccaatgccatctctaccagatctggcggatgccactatcacaaatcagtcgatgtaccgaagttcaacaccttctgcgagttctaccacgacatcgccagttcagaccacctctaacgttgagcgaccacagccacctgtggagaaatcaccgccccctgcgccaacccgtcctaagtcaaatatcgtcagctctggcaacggaggtacttcgattagttatgctacagctggtggaaacgcggagcatcaaaacgttacggtaaaaatggcaaagccgaagaaacagcccaattacgcatactacaatgttgatcagggtcggctggatcttccgatacagcatccagcgaagtctgccgctcaggagacttaccaggccaaattcctagcagccaagccgtcagtcttgtgcaatgatcactaccttcgcggcttctgcaagaaactcaactgtaataaaacccacgatgtgaagctaactcctgaggaacttgccattcatcgatataaagctcgaacgagcatgtgtcccgaggggccatactgcgtcgactatacctgctacttatctcatcattgtcctcgggtaaagtgccttccgacacaggagaagccctgccccttttcgaacacggctgaatacggtgatctgcattatacgactaaggaacagtctacgcctcgttacaaatggaccgaaggcatcgagtttcccgaaagtttatgaaaagaccaaaaacagttgcgatggttttcccgacctccccttgggcttaaccagatcgacaacggataaatgcaccacatatatctctcccctttttttctatatgtcgccttaatacaagatttatatacattatacacagacgtaggtgttggggtagcgcgtcaggatgttgtcggggaagcgtgcagtgcgagttggttgaggtttcgtagaggacattcaacatatcttgattcagcttagctgggtttcaacacaatgggtacgcgtccagatggaggagcatatgctttcagactgagacgagcttcccggcctcctgggaggaggtaaaacttcggggaaagagtcgtgagcaaaccggaccctaagaacacaaagcaaatcgacaacatcgatcaaccatcaaggaccagatctcaactatctttctcttcttcgttgagactcgcgtctcctttacaatacacatatttttcacgatattttacttcgattcccgattgccaacgggccattcttcacatacacaatttggtgcattttgtgccagccactcgttcatagccaactgaaattcactcattactcaatgcctgtgcttctgctcgtgattaattgtttcattgtgagcgcgatgtaatgtgatagatatcaatgcaatgctccagaatctccacgccttgcctcatattaaggatatgccaacgccaaacgtatctgtagtcaatgtgtatatatcttttcaccagacgctcccgagtcctgttatccttgcggggtatataaaatgcatgtccgcgagactcccatctttcccgtgtaattacctatgactaaaaagcgggattcagacagtactgagaataatcataccagatcttccccagttcgctctccagattgtgcgccatactggacctccattctctctgcgtttctaacggccgccgcgccctcattttcctcgagcacaccttgtaattcttgtcggagtctttgactgagtttgtcgaggatccattcggcctcctcgcgggtatccatgagcggactgcggtggccgacccaggaccattttgagtctttctcgggcttagaaagagcgttgtcagcttcatcgctgcaagagtgtgtctctgccgctggtcctactccagctggttcttgctcgggtttctttggtggactacggtgagttgcggcgtcactttcgtcttcgccgaccagacggagataccatgccctgtggcgatcattaatcagtaatttctaactttggtccggcatgaaacaaatacttaccattgttgataggtgtatctccgcggcggcgattcctgcagatgctccatgacacgtcgtatctcgtcgacaagcactagatggtactctgagcgagttctgggcagatcatcggggatgctatctccgaccaagggctgtttccaatctcgaggagcagacgactggctcttggagttttgcgttttggatgtgccttgtgtgcttgttcctagatttgtcgctgacacaccgcccgtggctcgtgaactagagtttccgttttcttttgcatcgtctgcggcttctgcatcgcaagattcatcatcgatatcttcatcttcctcttccttttcacgccatggttgggcagcaccaaggaagccaggaggggattcatgaatgtactcttcctggaagagcttgccagctgacaacctcgaacatatctgtttgacacttttcctaaatccttgctcgccggggagaattgtgatattgccgagtaggactgtcacgtccctaatctcctttatgatcgtgtcacctgcattagaaatcaacacggtcagtgttgggagggcaagtaatgaccagaagacgaagaaggcctttgcagagttcgacactggggtgttgtcgccatatccgattgtcgtcatagcctggaaagcaaaagataccccatcgaaatatgtccagccctgatacggatgttcagagacttggaagatataggcgccaacaagccagagtaccagccaacatgatgtcgaagtcgccatggcagtccaacgtctcctactagctgttctgtcctggattttacgcatcaagtgaaattctttgtggcgtcgctcgagttccgtctttcgcgactggattttgaattgagggtagtaatcggcgtctttttccgtgatgggttcgaggtcatctccctttcccttctttgtcaggcgacgaagaaatcgacgtcgctttttttcgagcattcgagcgtttatttttgtttttccttcgtctagcatcaaactccggatggagccaatgacaagaccaagagtgataatgccaatgagagcatatggaatcataaggccacggccaacgttcgtagtaggatacaaatcgccgaaccctactgtgaaaagagtcacatctgcccaatagagagcatcgaggtagagccagccttcgacatgtgagaaaaccaatgcacccaagagcagatacacgaggaatgcgatagtctgtagcatgagagtcctttggctcattgtaagttcaaagtctcttgggtagtgcccggcgttcgcgccatacacagttacagccataagggaagcaacgaggaagtagagaatggcggcgaaaatgccatagtaaaaggcttgagcccaaacatagtctatgtcgtttttgagtgcaagcggaccgctggcagtcgcagccagggcgatgagcaggagagatgaaatataccagccggctatagtgataggttgagcaatagagaagcggactctcttggtcatgttgagcaagagaaacacattggctgcgagtgcaatgaccagttggatggcgttcaccacataaagccagtaggggtcatggacaaacacggccgttgtgacattagccccaggcggtatatattgtcgccagttgttgatgagagcgcagatactgaaagctgatgctactggccccagcgtaccagcgaccatgggaaaagctgatgaagccaaccaccaacggcttggatttacctttattagtcttggtcctcgaagtaagagattgaagccacgtacgttgggtcgagatggatctcatctttgtgctcaggattttgaccgtctggtgctcgattctcgccgtgggcatcatctaccactccactgtgctcagcgatattgtcgcctaaatttgcgtcctccatgccggctgagacagaggaggatcggaatttcaaaagagtgtgttcggatatctctaaatgcagttcataacggcataaagttaagccaaaaagagtgtacgcgacagacttaagtcagttcttatggtagaggcagatgttggatgtagctggaatgtagaggtgccgataccaatataaacacctggatgcctttacttcgtgtcgttcctccttcttgagattcttctgagcagtggttgtattaaatctctatacatagaacgacttagagttttatcacaggtataagat

SEQ ID NO: 7360 - DNA, 2247 bp, Muscodor strobelii
  misc_feature: SGI cDNA ID NO. 562214
  misc_feature: Reduced expression when VOC is produced
  misc_feature: Encodes the peptide sequence at SEQ ID NO 7361
atggaggacgcaaatttaggcgacaatatcgctgagcacagtggagtggtagatgatgcccacggcgagaatcgagcaccagacggtcaaaatcctgagcacaaagatgagatccatctcgacccaacccgttggtggttggcttcatcagcttttcccatggtcgctggtacgctggggccagtagcatcagctttcagtatctgcgctctcatcaacaactggcgacaatatataccgcctggggctaatgtcacaacggccgtgtttgtccatgacccctactggctttatgtggtgaacgccatccaactggtcattgcactcgcagccaatgtgtttctcttgctcaacatgaccaagagagtccgcttctctattgctcaacctatcactatagccggctggtatatttcatctctcctgctcatcgccctggctgcgactgccagcggtccgcttgcactcaaaaacgacatagactatgtttgggctcaagccttttactatggcattttcgccgccattctctacttcctcgttgcttcccttatggctgtaactgtgtatggcgcgaacgccgggcactacccaagagactttgaacttacaatgagccaaaggactctcatgctacagactatcgcattcctcgtgtatctgctcttgggtgcattggttttctcacatgtcgaaggctggctctacctcgatgctctctattgggcagatgtgactcttttcacagtagggttcggcgatttgtatcctactacgaacgttggccgtggccttatgattccatatgctctcattggcattatcactcttggtcttgtcattggctccatccggagtttgatgctagacgaaggaaaaacaaaaataaacgctcgaatgctcgaaaaaaagcgacgtcgatttcttcgtcgcctgacaaagaagggaaagggagatgacctcgaacccatcacggaaaaagacgccgattactaccctcaattcaaaatccagtcgcgaaagacggaactcgagcgacgccacaaagaatttcacttgatgcgtaaaatccaggacagaacagctagtaggagacgttggactgccatggcgacttcgacatcatgttggctggtactctggcttgttggcgcctatatcttccaagtctctgaacatccgtatcagggctggacatatttcgatggggtatcttttgctttccaggctatgacgacaatcggatatggcgacaacaccccagtgtcgaactctgcaaaggccttcttcgtcttctggtcattacttgccctcccaacactgaccgtgttgatttctaatgcaggtgacacgatcataaaggagattagggacgtgacagtcctactcggcaatatcacaattctccccggcgagcaaggatttaggaaaagtgtcaaacagatatgttcgaggttgtcagctggcaagctcttccaggaagagtacattcatgaatcccctcctggcttccttggtgctgcccaaccatggcgtgaaaaggaagaggaagatgaagatatcgatgatgaatcttgcgatgcagaagccgcagacgatgcaaaagaaaacggaaactctagttcacgagccacgggcggtgtgtcagcgacaaatctaggaacaagcacacaaggcacatccaaaacgcaaaactccaagagccagtcgtctgctcctcgagattggaaacagcccttggtcggagatagcatccccgatgatctgcccagaactcgctcagagtaccatctagtgcttgtcgacgagatacgacgtgtcatggagcatctgcaggaatcgccgccgcggagatacacctatcaacaatgggcatggtatctccgtctggtcggcgaagacgaaagtgacgccgcaactcaccgtagtccaccaaagaaacccgagcaagaaccagctggagtaggaccagcggcagagacacactcttgcagcgatgaagctgacaacgctctttctaagcccgagaaagactcaaaatggtcctgggtcggccaccgcagtccgctcatggatacccgcgaggaggccgaatggatcctcgacaaactcagtcaaagactccgacaagaattacaaggtgtgctcgaggaaaatgagggcgcggcggccgttagaaacgcagagagaatggaggtccagtatggcgcacaatctggagagcgaactggggaagatctggtatga

SEQ ID NO: 7361 - protein, 748 aa, Muscodor strobelii
  misc_feature: SGI Peptide ID NO. 562214
  misc_feature (215)..(290): Pfam Id: PF07885 Pfam Desc: Ion channel
  misc_feature (376)..(454): Pfam Id: PF07885 Pfam Desc: Ion channel
  misc_feature (236)..(284): Pfam Id: PF00520 Pfam Desc: Ion transport protein
  misc_feature (1)..(720): NCBI GI: 39973841 Blast Desc: MGG_00933 [Magnaporthe grisea 70-15] gi|145018113|gb|EDK02392.1| MGG_00933 [Magnaporthe grisea 70-15]
  misc_feature (1)..(712): NCBI GI: 256727754 Blast Desc: NECHADRAFT_91373 [Nectria haematococca mpVI 77-13-4]
  misc_feature (1)..(739): NCBI GI: 23821211 Blast Desc: potassium channel [Neurospora crassa]
  misc_feature (1)..(737): NCBI GI: 46134185 Blast Desc: FG09232.1 [Gibberella zeae PH-1]
  misc_feature (54)..(713): NCBI GI: 171682474 Blast Desc: protein product [Podospora anserina] gi|170941196|emb|CAP66846.1| protein product [Podospora anserina]
  misc_feature (1)..(739): NCBI GI: 85086329 Blast Desc: NCU04065 [Neurospora crassa OR74A] gi|28918774|gb|EAA28444.1| conserved [Neurospora crassa OR74A]
  misc_feature (2)..(712): NCBI GI: 256720325 Blast Desc: NECHADRAFT_98338 [Nectria haematococca mpVI 77-13-4]
  misc_feature (1)..(713): NCBI GI: 261359363 Blast Desc: potassium channel [Verticillium albo-atrum VaMs.102]
  misc_feature (35)..(521): NCBI GI: 116202701 Blast Desc: CHGG_09235 [Chaetomium globosum CBS 148.51] gi|88177753|gb|EAQ85221.1| CHGG_09235 [Chaetomium globosum CBS 148.51]
  misc_feature (119)..(719): NCBI GI: 154315579 Blast Desc: BC1G_04362 [Botryotinia fuckeliana B05.10] gi|150847302|gb|EDN22495.1| BC1G_04362 [Botryotinia fuckeliana B05.10]
  misc_feature: Useful for introducing or modulating the production of volatile compounds
MEDANLGDNIAEHSGVVDDAHGENRAPDGQNPEHKDEIHLDPTRWWLASSAFPMVAGTLGPVASAFSICALINNWRQYIPPGANVTTAVFVHDPYWLYVVNAIQLVIALAANVFLLLNMTKRVRFSIAQPITIAGWYISSLLLIALAATASGPLALKNDIDYVWAQAFYYGIFAAILYFLVASLMAVTVYGANAGHYPRDFELTMSQRTLMLQTIAFLVYLLLGALVFSHVEGWLYLDALYWADVTLFTVGFGDLYPTTNVGRGLMIPYALIGIITLGLVIGSIRSLMLDEGKTKINARMLEKKRRRFLRRLTKKGKGDDLEPITEKDADYYPQFKIQSRKTELERRHKEFHLMRKIQDRTASRRRWTAMATSTSCWLVLWLVGAYIFQVSEHPYQGWTYFDGVSFAFQAMTTIGYGDNTPVSNSAKAFFVFWSLLALPTLTVLISNAGDTIIKEIRDVTVLLGNITILPGEQGFRKSVKQICSRLSAGKLFQEEYIHESPPGFLGAAQPWREKEEEDEDIDDESCDAEAADDAKENGNSSSRATGGVSATNLGTSTQGTSKTQNSKSQSSAPRDWKQPLVGDSIPDDLPRTRSEYHLVLVDEIRRVMEHLQESPPRRYTYQQWAWYLRLVGEDESDAATHRSPPKKPEQEPAGVGPAAETHSCSDEADNALSKPEKDSKWSWVGHRSPLMDTREEAEWILDKLSQRLRQELQGVLEENEGAAAVRNAERMEVQYGAQSGERTGEDLV

SEQ ID NO: 7362 - DNA, 4421 bp, Muscodor strobelii
  misc_feature: SGI EST ID NO. CUFF.18350.1
  misc_feature: Variant of the nucleotide sequence at SEQ ID NO 7360
cttatacctgtgataaaactctaagtcgttctatgtatagagatttaatacaaccactgctcagaagaatctcaagaaggaggaacgacacgaagtaaaggcatccaggtgtttatattggtatcggcacctctacattccagctacatccaacatctgcctctaccataagaactgacttaagtctgtcgcgtacactctttttggcttaactttatgccgttatgaactgcatttagagatatccgaacacactcttttgaaattccgatcctcctctgtctcagccggcatggaggacgcaaatttaggcgacaatatcgctgagcacagtggagtggtagatgatgcccacggcgagaatcgagcaccagacggtcaaaatcctgagcacaaagatgagatccatctcgacccaacccgttggtggttggcttcatcagcttttcccatggtcgctggtacgctggggccagtagcatcagctttcagtatctgcgctctcatcaacaactggcgacaatatataccgcctggggctaatgtcacaacggccgtgtttgtccatgacccctactggctttatgtggtgaacgccatccaactggtcattgcactcgcagccaatgtgtttctcttgctcaacatgaccaagagagtccgcttctctattgctcaacctatcactatagccggctggtatatttcatctctcctgctcatcgccctggctgcgactgccagcggtccgcttgcactcaaaaacgacatagactatgtttgggctcaagccttttactatggcattttcgccgccattctctacttcctcgttgcttcccttatggctgtaactgtgtatggcgcgaacgccgggcactacccaagagactttgaacttacaatgagccaaaggactctcatgctacagactatcgcattcctcgtgtatctgctcttgggtgcattggttttctcacatgtcgaaggctggctctacctcgatgctctctattgggcagatgtgactcttttcacagtagggttcggcgatttgtatcctactacgaacgttggccgtggccttatgattccatatgctctcattggcattatcactcttggtcttgtcattggctccatccggagtttgatgctagacgaaggaaaaacaaaaataaacgctcgaatgctcgaaaaaaagcgacgtcgatttcttcgtcgcctgacaaagaagggaaagggagatgacctcgaacccatcacggaaaaagacgccgattactaccctcaattcaaaatccagtcgcgaaagacggaactcgagcgacgccacaaagaatttcacttgatgcgtaaaatccaggacagaacagctagtaggagacgttggactgccatggcgacttcgacatcatgttggctggtactctggcttgttggcgcctatatcttccaagtctctgaacatccgtatcagggctggacatatttcgatggggtatcttttgctttccaggctatgacgacaatcggatatggcgacaacaccccagtgtcgaactctgcaaaggccttcttcgtcttctggtcattacttgccctcccaacactgaccgtgttgatttctaatgcaggtgacacgatcataaaggagattagggacgtgacagtcctactcggcaatatcacaattctccccggcgagcaaggatttaggaaaagtgtcaaacagatatgttcgaggttgtcagctggcaagctcttccaggaagagtacattcatgaatcccctcctggcttccttggtgctgcccaaccatggcgtgaaaaggaagaggaagatgaagatatcgatgatgaatcttgcgatgcagaagccgcagacgatgcaaaagaaaacggaaactctagttcacgagccacgggcggtgtgtcagcgacaaatctaggaacaagcacacaaggcacatccaaaacgcaaaactccaagagccagtcgtctgctcctcgagattggaaacagcccttggtcggagatagcatccccgatgatctgcccagaactcgctcagagtaccatctagtgcttgtcgacgagatacgacgtgtcatggagcatctgcaggaatcgccgccgcggagatacacctatcaacaatgggcatggtatctccgtctggtcggcgaagacgaaagtgacgccgcaactcaccgtagtccaccaaagaaacccgagcaagaaccagctggagtaggaccagcggcagagacacactcttgcagcgatgaagctgacaacgctctttctaagcccgagaaagactcaaaatggtcctgggtcggccaccgcagtccgctcatggatacccgcgaggaggccgaatggatcctcgacaaactcagtcaaagactccgacaagaattacaaggtgtgctcgaggaaaatgagggcgcggcggccgttagaaacgcagagagaatggaggtccagtatggcgcacaatctggagagcgaactggggaagatctggtatgattattctcagtactgtctgaatcccgctttttagtcataggtaattacacgggaaagatgggagtctcgcggacatgcattttatataccccgcaaggataacaggactcgggagcgtctggtgaaaagatatatacacattgactacagatacgtttggcgttggcatatccttaatatgaggcaaggcgtggagattctggagcattgcattgatatctatcacattacatcgcgctcacaatgaaacaattaatcacgagcagaagcacaggcattgagtaatgagtgaatttcagttggctatgaacgagtggctggcacaaaatgcaccaaattgtgtatgtgaagaatggcccgttggcaatcgggaatcgaagtaaaatatcgtgaaaaatatgtgtattgtaaaggagacgcgagtctcaacgaagaagagaaagatagttgagatctggtccttgatggttgatcgatgttgtcgatttgctttgtgttcttagggtccggtttgctcacgactctttccccgaagttttacctcctcccaggaggccgggaagctcgtctcagtctgaaagcatatgctcctccatctggacgcgtacccattgtgttgaaacccagctaagctgaatcaagatatgttgaatgtcctctacgaaacctcaaccaactcgcactgcacgcttccccgacaacatcctgacgcgctaccccaacacctacgtctgtgtataatgtatataaatcttgtattaaggcgacatatagaaaaaaaggggagagatatatgtggtgcatttatccgttgtcgatctggttaagcccaaggggaggtcgggaaaaccatcgcaactgtttttggtcttttcataaactttcgggaaactcgatgccttcggtccatttgtaacgaggcgtagactgttccttagtcgtataatgcagatcaccgtattcagccgtgttcgaaaaggggcagggcttctcctgtgtcggaaggcactttacccgaggacaatgatgagataagtagcaggtatagtcgacgcagtatggcccctcgggacacatgctcgttcgagctttatatcgatgaatggcaagttcctcaggagttagcttcacatcgtgggttttattacagttgagtttcttgcagaagccgcgaaggtagtgatcattgcacaagactgacggcttggctgctaggaatttggcctggtaagtctcctgagcggcagacttcgctggatgctgtatcggaagatccagccgaccctgatcaacattgtagtatgcgtaattgggctgtttcttcggctttgccatttttaccgtaacgttttgatgctccgcgtttccaccagctgtagcataactaatcgaagtacctccgttgccagagctgacgatatttgacttaggacgggttggcgcagggggcggtgatttctccacaggtggctgtggtcgctcaacgttagaggtggtctgaactggcgatgtcgtggtagaactcgcagaaggtgttgaacttcggtacatcgactgatttgtgatagtggcatccgccagatctggtagagatggcattggtcgaccaagaggtgcctgagcaaacccggggggagcgcgaacattgctgaatggaaggctttgtggtctgtacttagtctcgttattcaaagactcagacctaaaaacagaatcgaagcgcaggatcgggaagtctaatttcttgaagcccggctcggctggtgttgtctctaaaagaactatcttgtcgtctttagaaccgaagtattcgcgaagggcatggagatagccgttgtcgtggcagcacgcaatcaagatcttctggcattgaaaatttctg

SEQ ID NO: 7363 - DNA, 819 bp, Muscodor strobelii
  misc_feature: SGI cDNA ID NO. 562215
  misc_feature: Encodes the peptide sequence at SEQ ID NO 7364
atgagctatacgcgccgcgatatctatgtctacggctcgtatctaggtgcatcactagcgacgtcgctcgcgctgacagaggctcatcctcacgaacgaatgggtgttcgaggatgtattgcatacaatggcatctacaattggaccatgttcctcccagatcatcctattagcaaattagcaatgccacgaaatttcttcgaagaaatatttcccggagaccccgattttcaagagttaaagacaacggctagagaatggttcaagacacccgacaacctatttgatccctttgccagcccttgtcttttcttccatacgccaggcttgcatgtgccaccatctttcgatgaatctgccctgtctgatggtgagtctttgacggaaacgaactggctctcagatgatgatgaggtgccaataccgaagccaaccaagtcgccacggaaaagcccattagtcttcccaccacggaaatctaccctcaaaattcccgagatgctattactacatgatacgccaccgcctcttccaccttcgcagctcagaagacaacagagacggacgaaacagaatttcggaaacaattttcggactcaggccgacgaacttgccggcttgatgcgaaagagcatcaatcgggtggagctgagggatcgcctgaaatgggatgaggaatatgatgaatgggacgatgaagcacatagacggatacaagttttggacgttgggcataatgagccatttacggaagtgggtgtgaatggcaacaatattgtcgccgcttggctagaagaaaaggcttctcgacgagcttaa

SEQ ID NO: 7364 - protein, 272 aa, Muscodor strobelii
  misc_feature: SGI Peptide ID NO. 562215
  misc_feature (5)..(267): NCBI GI: 256727171 Blast Desc: NECHADRAFT_58626 [Nectria haematococca mpVI 77-13-4]
  misc_feature (5)..(269): NCBI GI: 46134183 Blast Desc: FG09231.1 [Gibberella zeae PH-1]
  misc_feature (5)..(267): NCBI GI: 145610739 Blast Desc: MGG_00932 [Magnaporthe grisea 70-15] gi|145018114|gb|EDK02393.1| MGG_00932 [Magnaporthe grisea 70-15]
  misc_feature (6)..(243): NCBI GI: 171682476 Blast Desc: protein product [Podospora anserina] gi|170941197|emb|CAP66847.1| protein product [Podospora anserina]
  misc_feature (5)..(118): NCBI GI: 85086325 Blast Desc: NCU04064 [Neurospora crassa OR74A] gi|28918773|gb|EAA28443.1| [Neurospora crassa OR74A]
  misc_feature (6)..(126): NCBI GI: 116202699 Blast Desc: CHGG_09234 [Chaetomium globosum CBS 148.51] gi|88177752|gb|EAQ85220.1| CHGG_09234 [Chaetomium globosum CBS 148.51]
  misc_feature (188)..(267): NCBI GI: 261359362 Blast Desc: conserved [Verticillium albo-atrum VaMs.102]
  misc_feature (195)..(270): NCBI GI: 85086325 Blast Desc: NCU04064 [Neurospora crassa OR74A] gi|28918773|gb|EAA28443.1| [Neurospora crassa OR74A]
  misc_feature (42)..(244): NCBI GI: 154311849 Blast Desc: [Botryotinia fuckeliana B05.10] gi|150850608|gb|EDN25801.1| [Botryotinia fuckeliana B05.10]
  misc_feature (8)..(113): NCBI GI: 121699380 Blast Desc: conserved [Aspergillus clavatus NRRL 1] gi|119396144|gb|EAW06576.1| conserved [Aspergillus clavatus NRRL 1]
MSYTRRDIYVYGSYLGASLATSLALTEAHPHERMGVRGCIAYNGIYNWTMFLPDHPISKLAMPRNFFEEIFPGDPDFQELKTTAREWFKTPDNLFDPFASPCLFFHTPGLHVPPSFDESALSDGESLTETNWLSDDDEVPIPKPTKSPRKSPLVFPPRKSTLKIPEMLLLHDTPPPLPPSQLRRQQRRTKQNFGNNFRTQADELAGLMRKSINRVELRDRLKWDEEYDEWDDEAHRRIQVLDVGHNEPFTEVGVNGNNIVAAWLEEKASRRA

SEQ ID NO: 7365 - DNA, 1544 bp, Muscodor strobelii
  misc_feature: SGI EST ID NO. CUFF.18250.0
  misc_feature: Variant of the nucleotide sequence at SEQ ID NO 7363
aactcatcgcgcagtggtatcaaatcggcaaaactcagattgttgtcgaagttccagctattctcccgtcctgtcatggaagatgagatggcttcgacattgcaattcttttgggtcaagacctcacttttacttctacagaagaacagggttagcccgaccgttgagtaccgtttctgctagcctgtacgatgctgaaagaattcgcgtgcccgtaggctcctctgggagcgtgaatatcgatttacataatttggcaaaggtgtcaacttcagcagagccgcttttgatctatttacctccgttctccaatgcagctcctgtaactaatctctcacaactaccgagatttgctcagaagcatgcaactgctgtcatccactatcggtggacggaaccctcatatgaggatgcagtcaagaatgataaggctctagatgatgatgatccattcagacaatcctttcacgcgggatggccagcgccagttcatgacaccctgaaagcttattcttggatcgtcgagaatcttgcaccaatgagctatacgcgccgcgatatctatgtctacggctcgtatctaggtgcatcactagcgacgtcgctcgcgctgacagaggctcatcctcacgaacgaatgggtgttcgaggatgtattgcatacaatggcatctacaattggaccatgttcctcccagatcatcctattagcaaattagcaatgccacgaaatttcttcgaagaaatatttcccggagaccccgattttcaagagttaaagacaacggctagagaatggttcaagacacccgacaacctatttgatccctttgccagcccttgtcttttcttccatacgccaggcttgcatgtgccaccatctttcgatgaatctgccctgtctgatggtgagtctttgacggaaacgaactggctctcagatgatgatgaggtgccaataccgaagccaaccaagtcgccacggaaaagcccattagtcttcccaccacggaaatctaccctcaaaattcccgagatgctattactacatgatacgccaccgcctcttccaccttcgcagctcagaagacaacagagacggacgaaacagaatttcggaaacaattttcggactcaggccgacgaacttgccggcttgatgcgaaagagcatcaatcgggtggagctgagggatcgcctgaaatgggatgaggaatatgatgaatgggacgatgaagcacatagacggatacaagttttggacgttgggcataatgagccatttacggaagtgggtgtgaatggcaacaatattgtcgccgcttggctagaagaaaaggcttctcgacgagcttaacagtagatatattagtccatccgctatgtttcccactattatatagatctgccagtccgaatccctttcaaaatggccaatacccaaacgctttcacacttctagttcgaactacaaagattcaagagatcacgacttcttaccgcaacatgttttttctactagtagagtatcctgcctcggcttc

SEQ ID NO: 7366 - DNA, 945 bp, Muscodor strobelii
  misc_feature: SGI cDNA ID NO. 562216
  misc_feature: Encodes the peptide sequence at SEQ ID NO 7367
atgacggaaacattcgctatcgatccctcaaccctaaccagcgtaaagaacaaagtcatcctcataaccggaggctcctcaggcatcggccgcgccacagccgagttccttttaacactctcacccagcaaccgcatcgcgattctcgaccgtgcagcgccaccgcatgaatcagcgctctcatcgtcgtcatcactagctaatcaccgtgtgctattccaccaatgcgacgtgacatcctgggaagcacaacgcgccggcttcgaagctgcttttaaagtcttcggtcgcatcgacgtcgtgttcgctaatgcgggaatcaatgagcgcggtgatcaattcttcactgatgagtttgatggtgatggtaaattgaaagcgccggatcggagtgtgctggatttggatttgacggcgaatgcggataccgtcaaacttggaattcattacctaaggaggaatggggagagaggaggatctatcattttgacgagtagttttgctggatatcttgggaaccccggggcgccatattataatgcggcgaaacatgggctcgtcggtctcatgcgatcgctaaaagcggacgtttccaggatcaacattgcaatctccattgttgcgccctccgtcacggcgactcccatgcttgtttctcttgacgacggcgcgataacagaaaaggagaaggcagcgcaattagtcaagactggtttaacagtcaatcgcgttgagagcattgcactggcggtgggatatctgattaatggcggacagaagtccaacggcaggagcatactgattcaggatgataagatggttgatgtagaaaggggatatcaaaggagtaaggaagcctggatgggtaaggagatgttagatcttgtgaaaagagggcctgggaaagacttgtatcgccggttcgatgcgaaagctaaaatttga

SEQ ID NO: 7367 - protein, 314 aa, Muscodor strobelii
  misc_feature: SGI Peptide ID NO. 562216
  misc_feature (18)..(198): Pfam Id: PF00106 Pfam Desc: short chain dehydrogenase
  misc_feature (19)..(210): Pfam Id: PF08659 Pfam Desc: KR domain
  misc_feature (2)..(305): NCBI GI: 240111460 Blast Desc: oxidoreductase,short chain dehydrogenase, [Coccidioides posadasii C735 delta SOWgp]
  misc_feature (4)..(299): NCBI GI: 226280832 Blast Desc: conserved [Paracoccidioides brasiliensis Pb01]
  misc_feature (12)..(314): NCBI GI: 169604018 Blast Desc: SNOG_05019 [Phaeosphaeria nodorum SN15] gi|160706495|gb|EAT87410.2| SNOG_05019 [Phaeosphaeria nodorum SN15]
  misc_feature (5)..(311): NCBI GI: 189196838 Blast Desc: conserved [Pyrenophora tritici-repentis Pt-1C-BFP] gi|187980636|gb|EDU47262.1| conserved [Pyrenophora tritici-repentis Pt-1C-BFP]
  misc_feature (3)..(299): NCBI GI: 261196928 Blast Desc: conserved [Ajellomyces dermatitidis SLH14081] gi|239596112|gb|EEQ78693.1| conserved [Ajellomyces dermatitidis SLH14081]
  misc_feature (5)..(306): NCBI GI: 258575983 Blast Desc: UREG_01689 [Uncinocarpus reesii 1704] gi|237902439|gb|EEP76840.1| UREG_01689 [Uncinocarpus reesii 1704]
  misc_feature (4)..(299): NCBI GI: 225680485 Blast Desc: conserved [Paracoccidioides brasiliensis Pb03] gi|226292880|gb|EEH48300.1| conserved [Paracoccidioides brasiliensis Pb18]
  misc_feature (3)..(299): NCBI GI: 239609698 Blast Desc: conserved [Ajellomyces dermatitidis ER-3]
  misc_feature (18)..(221): NCBI GI: 242809468 Blast Desc: short chain dehydrogenase/reductase, [Talaromyces stipitatus ATCC 10500] gi|218716000|gb|EED15422.1| short chain dehydrogenase/reductase, [Talaromyces stipitatus ATCC 10500]
  misc_feature (4)..(298): NCBI GI: 255931837 Blast Desc: Pc12g06330 [Penicillium chrysogenum Wisconsin 54-1255] gi|211582094|emb|CAP80260.1| Pc12g06330 [Penicillium chrysogenum Wisconsin 54-1255]
  misc_feature (15)..(273): SWISSPROT Homolog: EC 1.1.1.141 15-hydroxyprostaglandin dehydrogenase (NAD(+))
MTETFAIDPSTLTSVKNKVILITGGSSGIGRATAEFLLTLSPSNRIAILDRAAPPHESALSSSSSLANHRVLFHQCDVTSWEAQRAGFEAAFKVFGRIDVVFANAGINERGDQFFTDEFDGDGKLKAPDRSVLDLDLTANADTVKLGIHYLRRNGERGGSIILTSSFAGYLGNPGAPYYNAAKHGLVGLMRSLKADVSRINIAISIVAPSVTATPMLVSLDDGAITEKEKAAQLVKTGLTVNRVESIALAVGYLINGGQKSNGRSILIQDDKMVDVERGYQRSKEAWMGKEMLDLVKRGPGKDLYRRFDAKAKI

SEQ ID NO: 7368 - DNA, 1120 bp, Muscodor strobelii
  misc_feature: SGI EST ID NO. CUFF.18253.0
  misc_feature: Variant of the nucleotide sequence at SEQ ID NO 7366
cttatttctctctttgagataccaacaccaagaaacactcataatccaatatgacggaaacattcgctatcgatccctcaaccctaaccagcgtaaagaacaaagtcatcctcataaccggaggctcctcaggcatcggccgcgccacagccgagttccttttaacactctcacccagcaaccgcatcgcgattctcgaccgtgcagcgccaccgcatgaatcagcgctctcatcgtcgtcatcactagctaatcaccgtgtgctattccaccaatgcgacgtgacatcctgggaagcacaacgcgccggcttcgaagctgcttttaaagtcttcggtcgcatcgacgtcgtgttcgctaatgcgggaatcaatgagcgcggtgatcaattcttcactgatgagtttgatggtgatggtaaattgaaagcgccggatcggagtgtgctggatttggatttgacggcgaatgcggataccgtcaaacttggaattcattacctaaggaggaatggggagagaggaggatctatcattttgacgagtagttttgctggatatcttgggaaccccggggcgccatattataatgcggcgaaacatgggctcgtcggtctcatgcgatcgctaaaagcggacgtttccaggatcaacattgcaatctccattgttgcgccctccgtcacggcgactcccatgcttgtttctcttgacgacggcgcgataacagaaaaggagaaggcagcgcaattagtcaagactggtttaacagtcaatcgcgttgagagcattgcactggcggtgggatatctgattaatggcggacagaagtccaacggcaggagcatactgattcaggatgataagatggttgatgtagaaaggggatatcaaaggagtaaggaagcctggatgggtaaggagatgttagatcttgtgaaaagagggcctgggaaagacttgtatcgccggttcgatgcgaaagctaaaatttgagcattacgtttagtcatttgaaggaagccattgctcttaattcttgacaggctgtacacaataacgtaccggcgttgaaaatggcacgtcttattcatcggtccaagccaaggcccattttgcac

SEQ ID NO: 7369 - DNA, 789 bp, Muscodor strobelii
  misc_feature: SGI cDNA ID NO. 562217
  misc_feature: Encodes the peptide sequence at SEQ ID NO 7370
atggcgccgatcattcaccttgttcgccatgctcagggctaccacaacctcaacacggaaagccaatggatcaaagatcccgatctgactgagctcggtaagcagcaatgcgcagagctatgcaaggccttcccttatcacgacaaaataacacacctagttgcgtctcccattcggcgcacgctctacacgtgcaagttagcattcgccccagcagtagagtcaggaaagaagatactggccctcgaagatacacaagaagtatcattgtacccttgtgatgtcggcagcgatgttgaaatattgaagaaggaatttggagatctagttgacttccatctggtccatagcaattggaacgacaagtcactagaaagcaagtactacccacatcctcagaagttggaggccagagcccggaatgctagacttgcgctccgggagattgcgaatgaggcagatagtgacgcacacatagtgcttgttactcatggtggtatacttcatttcttgaccgaagattggcaaggcatagcagtaggtcgggggactgcgtgggagaacacagaataccgctcctatcaattcgccgacaagacgggatctcccaatgcaagtctagaagagcttccagagagccgcagtcgcagaaagggtgctgagaataagctcacaaaggctgagcagaggtccatgcgggcagcatacgagagtgtgctgaatagcgaactcgaagaggttatcaagagcattgccgagaagaaggagaaggaggcactaccaaattaa

SEQ ID NO: 7370 - protein, 262 aa, Muscodor strobelii
  misc_feature: SGI Peptide ID NO. 562217
  misc_feature (4)..(171): Pfam Id: PF00300 Pfam Desc: Phosphoglycerate mutase family
  misc_feature (1)..(244): NCBI GI: 171682482 Blast Desc: protein product [Podospora anserina] gi|170941200|emb|CAP66850.1| protein product [Podospora anserina]
  misc_feature (1)..(233): NCBI GI: 256734112 Blast Desc: NECHADRAFT_92004 [Nectria haematococca mpVI 77-13-4]
  misc_feature (1)..(233): NCBI GI: 46128337 Blast Desc: FG08546.1 [Gibberella zeae PH-1]
  misc_feature (1)..(238): NCBI GI: 156060535 Blast Desc: SS1G_02406 [Sclerotinia sclerotiorum 1980] gi|154699814|gb|EDN99552.1| SS1G_02406 [Sclerotinia sclerotiorum 1980]
  misc_feature (1)..(255): NCBI GI: 29150129 Blast Desc: conserved [Neurospora crassa]
  misc_feature (1)..(243): NCBI GI: 116202675 Blast Desc: CHGG_09222 [Chaetomium globosum CBS 148.51] gi|88177740|gb|EAQ85208.1| CHGG_09222 [Chaetomium globosum CBS 148.51]
  misc_feature (1)..(234): NCBI GI: 145602384 Blast Desc: MGG_04960 [Magnaporthe grisea 70-15] gi|145010805|gb|EDJ95461.1| MGG_04960 [Magnaporthe grisea 70-15]
  misc_feature (1)..(232): NCBI GI: 242763080 Blast Desc: conserved [Talaromyces stipitatus ATCC 10500] gi|218723701|gb|EED23118.1| conserved [Talaromyces stipitatus ATCC 10500]
  misc_feature (1)..(232): NCBI GI: 212529458 Blast Desc: conserved [Penicillium marneffei ATCC 18224] gi|210074284|gb|EEA28371.1| conserved [Penicillium marneffei ATCC 18224]
  misc_feature (1)..(247): NCBI GI: 119489888 Blast Desc: phosphoglycerate mutase family protein [Neosartorya fischeri NRRL 181] gi|119411064|gb|EAW21007.1| phosphoglycerate mutase family protein [Neosartorya fischeri NRRL 181]
MAPIIHLVRHAQGYHNLNTESQWIKDPDLTELGKQQCAELCKAFPYHDKITHLVASPIRRTLYTCKLAFAPAVESGKKILALEDTQEVSLYPCDVGSDVEILKKEFGDLVDFHLVHSNWNDKSLESKYYPHPQKLEARARNARLALREIANEADSDAHIVLVTHGGILHFLTEDWQGIAVGRGTAWENTEYRSYQFADKTGSPNASLEELPESRSRRKGAENKLTKAEQRSMRAAYESVLNSELEEVIKSIAEKKEKEALPN

SEQ ID NO: 7371 - DNA, 1252 bp, Muscodor strobelii
  misc_feature: SGI EST ID NO. CUFF.18291.1
  misc_feature: Variant of the nucleotide sequence at SEQ ID NO 7369
gaaaaacctcccttccattccagggcacgaggcggcccaaataattaccagatcaatcatcggattctccacagccgccggcttacgaaggagcaaacgccgtgttctttaagttttttaagtaggtcaacattttgacaagccttctaccttcattctagtttttcttgggcttcagtcatagtggcttagtccacaagcttataatcaactagtcctccgcatattccttaccaccagagaatcatccatcaactgaacttagcattctaagacaataaacaaaatggcgccgatcattcaccttgttcgccatgctcagggctaccacaacctcaacacggaaagccaatggatcaaagatcccgatctgactgagctcggtaagcagcaatgcgcagagctatgcaaggccttcccttatcacgacaaaataacacacctagttgcgtctcccattcggcgcacgctctacacgtgcaagttagcattcgccccagcagtagagtcaggaaagaagatactggccctcgaagatacacaagaagtatcattgtacccttgtgatgtcggcagcgatgttgaaatattgaagaaggaatttggagatctagttgacttccatctggtccatagcaattggaacgacaagtcactagaaagcaagtactacccacatcctcagaagttggaggccagagcccggaatgctagacttgcgctccgggagattgcgaatgaggcagatagtgacgcacacatagtgcttgttactcatggtggtatacttcatttcttgaccgaagattggcaaggcatagcagtaggtcgggggactgcgtgggagaacacagaataccgctcctatcaattcgccgacaagacgggatctcccaatgcaagtctagaagagcttccagagagccgcagtcgcagaaagggtgctgagaataagctcacaaaggctgagcagaggtccatgcgggcagcatacgagagtgtgctgaatagcgaactcgaagaggttatcaagagcattgccgagaagaaggagaaggaggcactaccaaattaatcatttaccgcagaatcgtaagtaaagtggaggattagaaatattccagtacacgaacattcagatagactacagtacggaagaatatacatgacctagaattagacctagaatacctacacagatcgtgttgcactggttacagatgttcaatagaagctatgatttcacctcgac

SEQ ID NO: 7372 - DNA, 381 bp, Muscodor strobelii
  misc_feature: SGI cDNA ID NO. 562218
  misc_feature: Reduced expression when VOC is produced
  misc_feature: Encodes the peptide sequence at SEQ ID NO 7373
atgcctggaattccccccaacgccctcaacaacctgaaggccaagctcaagggcgtcttcaagaagaagtccaagaagcccaaggaggaggaggccaccggctcttccaccgcccccgttcccactgctaccactgctggtgctggtgaggctgtcgccgccgtcacgggcgccactgtcgagcctgttgccactgagcagaaggagactgccaccgcccccgccgaggctcccaaggctgaggacactcccgccgctgctccggttgccgctcctgtcgctgctcctgtcgacactcctgccgagcccgttgccgccgccgagcctgtcgctgccgagcacgagaccaagcccgctgctgcccctgctcctactgcctag

SEQ ID NO: 7373 - protein, 126 aa, Muscodor strobelii
  misc_feature: SGI Peptide ID NO. 562218
  misc_feature: Useful for introducing or modulating the production of volatile compounds
MPGIPPNALNNLKAKLKGVFKKKSKKPKEEEATGSSTAPVPTATTAGAGEAVAAVTGATVEPVATEQKETATAPAEAPKAEDTPAAAPVAAPVAAPVDTPAEPVAAAEPVAAEHETKPAAAPAPTA

SEQ ID NO: 7374 - DNA, 1846 bp, Muscodor strobelii
  misc_feature: SGI EST ID NO. CUFF.18272.0
  misc_feature: Variant of the nucleotide sequence at SEQ ID NO 7372
gcagagtcgcatatggtaatgatagtgaccgtacgatgtgtatcgtttccggaacttggatgttaagttccgacatcatcaggggtctagtggaactagtatcctttccaggtgaccacaggcaagatattacaataatcaggttctgccatcaaactgattctttaaatcatacttcacataagaatctcccaagcccctgattaaactcggtgattccacatatatttcaataatgtaagcgatttctcaacctaccttatccggcggtctttcattttttcgaaagactgaagttgagagatctgaatactctatcgaaaacaggtagccctggtgcatggtccgggcgtcttgcagaaggacaagggaccacaccgcgcccgtaacatggaacacaggcaggtatggtcgcgggcgctagactggaaaagagcaagatgcacccctccatctccaaatgaatgccaataattgtgagaaagtggaggtgttttgggacatcaggcggccccaaagaaaccccaaatggtcagagaatgatgcagcattgcagatggatggccagcgatagtcagggaagaagatagaggtgtagtagacgagcaggtgcatgtaccgtcatgtcaggggacgcgtagcttggcgcagcattgcaacagctctcgactgccgttgagctgtggcccctgctagcgcgcattcacccttttgacgatatcatttccccaggttccacccgttcctatcgccttccccctcaagctctctggaatctttttttccaaacatctttctctcgtagccagatacaagcagacacaagctttgccaacacctatcgatttctctgcagctttacaactgcaagaacatcacttgtgcccaactttcagtgcttcgcgcccgacacgagtcttccatacacacaaaacaccggtcaacgtcttctttcgcaagaaaacatcatgcctggaattccccccaacgccctcaacaacctgaaggccaagctcaagggcgtcttcaagaagaagtccaagaagcccaaggaggaggaggccaccggctcttccaccgcccccgttcccactggtaagcattttctgtgccctgtagagtctgtaatgaattgcgtccatgactccatgtccacgcgacccatgttgtccagacactcgtccgagacagattgtccgaggaaggaaccaagtctgacttgcgtcttcggttagctaccactgctggtgctggtgaggctgtcgccgccgtcacgggcgccactgtcgagcctgttgccactgagcagaaggagactggtaagtgatctctgccctctcatcagtgatgatgtccccattcgccacgacctcgatcgagcacttgctaatgctgggctgtcgctagccaccgcccccgccgaggctcccaaggctgaggacactcccgccgctgctccggttgccgctcctgtcgctgctcctgtcgacactcctgccgagcccgttgccgccgccgagcctgtcgctgccgagcacgagaccaagcccgctgctgcccctgctcctactgcctagacgcaggcgcgtgccgacacaccatgaatgatctcttaggacgttgatttgggggacgctgatttcggggccgttcttgtctttttctccgaggagtctggatgaacataggagatccttagaccatcttgccttgcctgcaaacgagatgcgtggtcttgcgcgcggctgtggagcgcctggcgcaatggtacaggattcctggggatagttggtttgttattgattgagatacccttccagaaaatacaacacagattctcgcatct

SEQ ID NO: 7375 - DNA, 447 bp, Muscodor strobelii
  misc_feature: SGI cDNA ID NO. 562219
  misc_feature: Encodes the peptide sequence at SEQ ID NO 7376
atgatctcaaacatcggacccaaaaaggaccgaccccccgccgaggagacgactgagcctgtttctgacgaggccgctgccgctgccaacaagcccggcgacgacgagcgtgcccccgtttcagagaccgcaccagtaattcctgatactgaaattaatgagcctctcgctgatcagttcgttgctgctctcaactctcttcctttcccgcccacccataaccccctaaccgagaccgccacccctcgtgtcccccattacgctcttccgactctcgcgcctttggctagtcgcgcctcggccagacagccagcctggtcgggtccggggacatggagtgagggtcagacgcgccatcactatgcgtaccctattgtagcggaggagaaagggctaaagattgtccaccaaaaccctgcttcgtgtgccacaagccaggtcatatga

SEQ ID NO: 7376 - protein, 148 aa, Muscodor strobelii
  misc_feature: SGI Peptide ID NO. 562219
MISNIGPKKDRPPAEETTEPVSDEAAAAANKPGDDERAPVSETAPVIPDTEINEPLADQFVAALNSLPFPPTHNPLTETATPRVPHYALPTLAPLASRASARQPAWSGPGTWSEGQTRHHYAYPIVAEEKGLKIVHQNPASCATSQVI

SEQ ID NO: 7377 - DNA, 1611 bp, Muscodor strobelii
  misc_feature: SGI cDNA ID NO. 562220
  misc_feature: Encodes the peptide sequence at SEQ ID NO 7378
atggagccaccaccaccagcaatgatgcagacatcatttcccatcttggcaaaacttaataccgctgtacctcacgagtttatcaaacctgtgaagcgaatccatgatgcagaagatgtatctaaattcttgacctcacaggcctaccgggacatagggctattcgtcatgcagctcaaccgtgctatgtgtccccgcaaagtgaccgacgaagacggcaaggacaagttcctgacttttctcatcggctcaaagtatgaaacggagcccgtgcctcccatacaagcacttcaaaccctactcgccaagatcgagtctctcatcgatgaggctccaccggttgagggcccaaggcggtttggaaacgtcgcctttcgcacgtggtatgcaaaattagaagagcgggtcgagtcgtttgtcaaagattctatccctgtgtctatcaatgattttagctcaagagagtcaagccccgaggtcacagctttcgatgagctttccgcctaccttctaggttccttcggtagcgcccagcgtcttgactacggaaccggtcacgaactaagtttccttgcctttctcggctgtctatggaaactgggtgttttcaaggatggagatgccaaaaatagcgacattgagcgaagtatcgtcctcggtgtctttgaaccctacctacgcgtcgtccgtcgtctcatattgacctatactctcgagcctgccggctcccatggagtatggggcttagacgaccactccttccagccatatatctacggctctgctcaactcactcgcgctatcacagagtcggatcctatgccactcgagggatcgttgttcagggcacccaaaccatccatggtcacaaatgcggaatatgtcgacgaagagcggaaaagaaatctttacttctctgctattggtttcatcaatgatgtgaagaagggacctttctgggaacatagtcccatcctattcgatatctcaggtatcaaagatggatggggtaaaatcaacaaggggatgatcaaaatgttcaacgcagaggttctctcgaagttccctgttgtacaacactttccattcggatctttatattcatgggatcaggatcccgacgccccgccacctcagcaatcggtccacatggtgaaccaacctatcgcttcatcctcaatgccgccacctggtgctgcgctgggagggacagcggcgccttgggctaaggcaacaagcatgcctcccccaatgggtccaggtacacgcaacgagcagatctgctgctgctggtctatcctcgatgacgagcctgcacaactgcacttgctgaatcgcgacacgcacttcaaccatagcaatgcacttcttgcccggacatttacattcgggcgccgacatcacgtatctcttgccattaatgatggtgatgagggtgactcggcccttgcaccccttcctaccctcgttggcaaacttatcttccacttcgatatggtctggatttatacatatcggctggtgacacaagtgcgaggcgtggtacttctcctcgtcggagaggaaagggtcgatctcagcctagagttacaagaactattggtcaagtaa

SEQ ID NO: 7378 - protein, 536 aa, Muscodor strobelii
  misc_feature: SGI Peptide ID NO. 562220
  misc_feature (29)..(375): Pfam Id: PF03095 Pfam Desc: Phosphotyrosyl phosphate activator (PTPA) protein
  misc_feature (94)..(375): Pfam Id: PF03095 Pfam Desc: Phosphotyrosyl phosphate activator (PTPA) protein
  misc_feature (8)..(421): NCBI GI: 46134179 Blast Desc: FG09229.1 [Gibberella zeae PH-1] gi|90101563|sp|Q4I0M9.1|PTPA1_GIBZE RecName: Full=Serine/threonine-protein phosphatase 2A activator 1; PTPA-1;
  misc_feature (1)..(426): NCBI GI: 39944618 Blast Desc: MGG_04320 [Magnaporthe grisea 70-15] gi|145015057|gb|EDJ99625.1| MGG_04320 [Magnaporthe grisea 70-15]
  misc_feature (4)..(365): NCBI GI: 156034424 Blast Desc: SS1G_13515 [Sclerotinia sclerotiorum 1980] gi|154698918|gb|EDN98656.1| SS1G_13515 [Sclerotinia sclerotiorum 1980]
  misc_feature (12)..(411): NCBI GI: 258575193 Blast Desc: conserved [Uncinocarpus reesii 1704] gi|237902044|gb|EEP76445.1| conserved [Uncinocarpus reesii 1704]
  misc_feature (25)..(436): NCBI GI: 212531463 Blast Desc: phosphotyrosyl phosphatase activator [Penicillium marneffei ATCC 18224] gi|210071252|gb|EEA25341.1| phosphotyrosyl phosphatase activator [Penicillium marneffei ATCC 18224]
  misc_feature (12)..(409): NCBI GI: 226292021 Blast Desc: serine/threonine-protein phosphatase 2A activator 1 [Paracoccidioides brasiliensis Pb18]
  misc_feature (12)..(409): NCBI GI: 226282812 Blast Desc: serine/threonine-protein phosphatase 2A activator 1 [Paracoccidioides brasiliensis Pb01]
  misc_feature (12)..(409): NCBI GI: 225681267 Blast Desc: serine/threonine-protein phosphatase 2A activator 1 [Paracoccidioides brasiliensis Pb03]
  misc_feature (15)..(422): NCBI GI: 115400405 Blast Desc: ATEG_06613 [Aspergillus terreus NIH2624] gi|114191457|gb|EAU33157.1| ATEG_06613 [Aspergillus terreus NIH2624]
  misc_feature (12)..(410): NCBI GI: 261205356 Blast Desc: serine/threonine-protein phosphatase 2A activator 1 [Ajellomyces dermatitidis SLH14081] gi|239592474|gb|EEQ75055.1| serine/threonine-protein phosphatase 2A activator 1 [Ajellomyces
  misc_feature (8)..(421): SWISSPROT Homolog: EC 5.2.1.8 Peptidylprolyl isomerase
MEPPPPAMMQTSFPILAKLNTAVPHEFIKPVKRIHDAEDVSKFLTSQAYRDIGLFVMQLNRAMCPRKVTDEDGKDKFLTFLIGSKYETEPVPPIQALQTLLAKIESLIDEAPPVEGPRRFGNVAFRTWYAKLEERVESFVKDSIPVSINDFSSRESSPEVTAFDELSAYLLGSFGSAQRLDYGTGHELSFLAFLGCLWKLGVFKDGDAKNSDIERSIVLGVFEPYLRVVRRLILTYTLEPAGSHGVWGLDDHSFQPYIYGSAQLTRAITESDPMPLEGSLFRAPKPSMVTNAEYVDEERKRNLYFSAIGFINDVKKGPFWEHSPILFDISGIKDGWGKINKGMIKMFNAEVLSKFPVVQHFPFGSLYSWDQDPDAPPPQQSVHMVNQPIASSSMPPPGAALGGTAAPWAKATSMPPPMGPGTRNEQICCCWSILDDEPAQLHLLNRDTHFNHSNALLARTFTFGRRHHVSLAINDGDEGDSALAPLPTLVGKLIFHFDMVWIYTYRLVTQVRGVVLLLVGEERVDLSLELQELLVK

SEQ ID NO: 7379 - DNA, 1866 bp, Muscodor strobelii
  misc_feature: SGI EST ID NO. CUFF.18285.0
  misc_feature: Variant of the nucleotide sequence at SEQ ID NO 7377
gcgagaggctcaagatgaggctatctccagtctcaatctattgactatctggtgttttaataacgagtgcgaaatctgcatacaatgagcaactgtacgccaacaaaatgctcttatgattccataacgaagtgaaccttctcatcacttctttcggcaccttagacaccccatcttcatcatcgcagccattaagttcaacttataactgttgctccttccgtcatggagccaccaccaccagcaatgatgcagacatcatttcccatcttggcaaaacttaataccgctgtacctcacgagtttatcaaacctgtgaagcgaatccatgatgcagaagatgtatctaaattcttgacctcacaggcctaccgggacatagggctattcgtcatgcagctcaaccgtgctatgtgtccccgcaaagtgaccgacgaagacggcaaggacaagttcctgacttttctcatcggctcaaagtatgaaacggagcccgtgcctcccatacaagcacttcaaaccctactcgccaagatcgagtctctcatcgatgaggctccaccggttgagggcccaaggcggtttggaaacgtcgcctttcgcacgtggtatgcaaaattagaagagcgggtcgagtcgtttgtcaaagattctatccctgtgtctatcaatgattttagctcaagagagtcaagccccgaggtcacagctttcgatgagctttccgcctaccttctaggttccttcggtagcgcccagcgtcttgactacggaaccggtcacgaactaagtttccttgcctttctcggctgtctatggaaactgggtgttttcaaggatggagatgccaaaaatagcgacattgagcgaagtatcgtcctcggtgtctttgaaccctacctacgcgtcgtccgtcgtctcatattgacctatactctcgagcctgccggctcccatggagtatggggcttagacgaccactccttccagccatatatctacggctctgctcaactcactcgcgctatcacagagtcggatcctatgccactcgagggatcgttgttcagggcacccaaaccatccatggtcacaaatgcggaatatgtcgacgaagagcggaaaagaaatctttacttctctgctattggtttcatcaatgatgtgaagaagggacctttctgggaacatagtcccatcctattcgatatctcaggtatcaaagatggatggggtaaaatcaacaaggggatgatcaaaatgttcaacgcagaggttctctcgaagttccctgttgtacaacactttccattcggatctttatattcatgggatcaggatcccgacgccccgccacctcagcaatcggtccacatggtgaaccaacctatcgcttcatcctcaatgccgccacctggtgctgcgctgggagggacagcggcgccttgggctaaggcaacaagcatgcctcccccaatgggtccaggtacacggttcgtaagagcgcctatgtctactcaatctccaccagggacaactcagagaccacagccctcacagcagccgcatcctgtaaataatgcctcgacatttacacatactccatgggcagcgtccagtgaccggccgagtggatgaaaagttacatcaagtgcattatctggaatgctgagcgatctcgttctatttcggctcctgtcggctcaattagctgtccataccatatgatgcgcttacggcccggcgctcaaagataccgttgtggaggtcgcgaacacggacataagatgtacataattcagaagtagatactgcaaagcgaagactgatctacctaaaattaatgatgaattgcttatatgacca

SEQ ID NO: 7380 - DNA, 2592 bp, Muscodor strobelii
  misc_feature: SGI cDNA ID NO. 562221
  misc_feature: Reduced expression when VOC is produced
  misc_feature: Encodes the peptide sequence at SEQ ID NO 7381
atgccgcctccgaccatgcgcccttggggtgcccttcgcgagcgtcacctcgagcccatcgcccaacccaacaatcgctatgcacttgatccttccgcctacgacatcgagagctcctcggacgaagacgacgaaggcatccctgccaccatctcccccctcaagcgccccgcccctcctgtcgccatcaacccctccaccgccgcgaagccgtctctctctagcaagccgggtcttgttttctaccccggctccaagcgacgaaaggtggccgatgacagacgcatgcccagatgccctccttccgactctacacacatctacagccctgatgctcatgtccaagaggggctcttgagttctgtcaacgccgtctttcgacacccacatgacgcccgcggacaacaggcagcagatcgagagctcctcacggctggagacgacgagctgggagccgaaccatttagtctcgacgtctccttgcccgccaccatgcacggtcttctgagtggtgttggggatcgtttcgatgagccagcacgctctatcagtgatgcagacatgaatgccgacgccaattcggttgttttagcgacccaagcaccgattgaagccatagtggctgacaccaatcctcaaataaacaatgagccggtggctcctgcctcacagcttaaggacgacgacatgtgggatgtacctagctcccctataagagagacgatagaggcggacaacttccctgcgcagtcagctaagagaggccgcccgcggaaacatgtacttatgcctacctcgcaaccttcgctgtcatatcgttcgcttgattcgtggaaaagcaccgtcgacgcatcggaacccgagaacgcagaaccaggagcagttataaacacagatcacctgccacaagaccaagatgccgtagagcaaatttcggacagtgcctctgttacaacccgtagcgagtgctcagatgcagatatcgtgttacgccgaccacaatccgaatcacgaaactcggaacaggagacgggtctcttcgtgactcaagagaccgaagtgaaagcagaagaagccgaagaggaggtcgcagagcgcgacgtcgaagaagatgccttgactcatagcaaagacccatatctcttggaagtcaccgatgcagaatcagagggcagcgaagaccgtgacggacaatacttcgatcacgccgaagataatagagaccatgtcgcagatgactcagatgatgaagcggccgaagtggaggatcggttcatcaatgatagtgacgatgatgaatctgatgaggaccgttcgagtatgatcaacgactttgaggatgaatccatttacggcgacgatgtcgatctttcggctctagagaccttcgagcgggacgtcgaagagttccgaaatcgtgcagtagtcgatgccgaagacagcgagatctttgagtgtccgcacgacgacaacctcacagcgatttatctggatcatgttcctctaagacgaatctgcagcttactcgctgacccggcttggctcgacacgagagctggatggcaggacagaccattatccacaactattccggagactaaatcagctgaagctctggttacggtcttatctaagctggagagattgtatctggccacaccgagagctccccacctgcaggagcagaacgaattcatcagtcgccatgctgatttactcaataactacttccacaaaacccagcgcatcgttgatcatatccgccagcaacgtcttggtgacccgagccaccccgacactcgttatcgcaagcgaatcgcaaaagatcttgttcatgctgtcttccctacactcatccactcagttgcatctgcgtggagtatagggggcaaagattgggcccagggcaacttcacgaccgctactgtcgaatttcttaggaggagcattggctggtctcggtcgttatacggtcaccttctacgagagctcaagctaagcccgttggagaagaagcccgaatccaagtatcgacaaatgatatggcgcaagtggaacgagaagaggatggatctcaagcccattctggatagtctgcatgaggtcattgcagatgcgccagatcagttggccgagttagaagcccggcagcaccaagaggcggagacccggcgtcagagaaccctggaagagcagaaacggagcttagaactagccgctgagcgagaacgtaaggaggaggcagaaaaagcggccagtgtagaacgacgaagaagggctatccaatccatgcgcggcattcactatcctcttgtttcatcttcggccaccccatctgaaccgtctcgatctatgacgccgaaggtgacagagtggtcgcgcgaggagaggacgtttctcttcaaggagatacagaaagcatacccgcgactggccgacctggaacaaattcactgggagttgaacaaatcccccgaggataccgccaggatggctgaaaagttgctaaagaggatgctcgccgcggtgaagcccgagcagacggagcaagagcgcgacgcattcgtccggcgcatgatgaggggcgagtga

SEQ ID NO: 7381 - protein, 863 aa, Muscodor strobelii
  misc_feature: SGI Peptide ID NO. 562221
  misc_feature (482)..(652): NCBI GI: 116202055 Blast Desc: CHGG_08912 [Chaetomium globosum CBS 148.51] gi|88177430|gb|EAQ84898.1| CHGG_08912 [Chaetomium globosum CBS 148.51]
  misc_feature (512)..(764): NCBI GI: 261359352 Blast Desc: [Verticillium albo-atrum VaMs.102]
  misc_feature: Useful for introducing or modulating the production of volatile compounds
MPPPTMRPWGALRERHLEPIAQPNNRYALDPSAYDIESSSDEDDEGIPATISPLKRPAPPVAINPSTAAKPSLSSKPGLVFYPGSKRRKVADDRRMPRCPPSDSTHIYSPDAHVQEGLLSSVNAVFRHPHDARGQQAADRELLTAGDDELGAEPFSLDVSLPATMHGLLSGVGDRFDEPARSISDADMNADANSVVLATQAPIEAIVADTNPQINNEPVAPASQLKDDDMWDVPSSPIRETIEADNFPAQSAKRGRPRKHVLMPTSQPSLSYRSLDSWKSTVDASEPENAEPGAVINTDHLPQDQDAVEQISDSASVTTRSECSDADIVLRRPQSESRNSEQETGLFVTQETEVKAEEAEEEVAERDVEEDALTHSKDPYLLEVTDAESEGSEDRDGQYFDHAEDNRDHVADDSDDEAAEVEDRFINDSDDDESDEDRSSMINDFEDESIYGDDVDLSALETFERDVEEFRNRAVVDAEDSEIFECPHDDNLTAIYLDHVPLRRICSLLADPAWLDTRAGWQDRPLSTTIPETKSAEALVTVLSKLERLYLATPRAPHLQEQNEFISRHADLLNNYFHKTQRIVDHIRQQRLGDPSHPDTRYRKRIAKDLVHAVFPTLIHSVASAWSIGGKDWAQGNFTTATVEFLRRSIGWSRSLYGHLLRELKLSPLEKKPESKYRQMIWRKWNEKRMDLKPILDSLHEVIADAPDQLAELEARQHQEAETRRQRTLEEQKRSLELAAERERKEEAEKAASVERRRRAIQSMRGIHYPLVSSSATPSEPSRSMTPKVTEWSREERTFLFKEIQKAYPRLADLEQIHWELNKSPEDTARMAEKLLKRMLAAVKPEQTEQERDAFVRRMMRGE

SEQ ID NO: 7382 - DNA, 1527 bp, Muscodor strobelii
  misc_feature: SGI cDNA ID NO. 562222
  misc_feature: Encodes the peptide sequence at SEQ ID NO 7383
atgaacgcacccgagggccccgacaactttacgcctaagcaggccatcacccctaacgtagagctctttgacgagcttgtttcggattgtttcgtgaatcttgctacggaatcgctggcgtacatcacgcccctgcagaatggatccgtcgtccttgacgatggctgcggagccggagccgcaaccgctgccgtcatggctgcggtgggccggtccatcaacctttccgtcaaaggaattgatatcgacaaaggcgcactggagaaatatcagaagagggctgaggagaactcttggaacgcagaagccattgatatgaacgccactgccctgcaattccccgacgacacgtttactctctcctttgcgaacggtctccttttcgtccttgacagacccagagaaggcgaggtggagccccagaagaagtaccctaacgccgtcgccgctgtcagtcaggttcaccgtacgctcaagccaggcggaatagcgatcttcaactcgtggaaatacgtaccgaacttggggccggtccaaaccgcttccaaggagacgcgtcctgaaggaacccctgtgccgcgcgaaggactcgacgattggtccgtctccgagtacctcaggcaagtcgtccagaagggaggcttcagcaagatcgtgatgcatgagtgccccgtgtcgacaacggtatccaagatggatcgatacgttccgatgctctggagcttcatcggtggtgcggggggagccggctggttgcggtcagacgaagagaattgggatcgcgctcttgccgtcgtggagcgagaatctgctcttgggcccgaggactatgctgttccggatgttctgcagtataaccgtggctttcgagtcatcccagtcgtgcaggcaccacttcatcgtgtagacctcgcatctagggacgagcttgaagaagtcgccgctgaccacattgtcgtcttcgatctgcttcgcgacgtcgtggtgtcggccaccggactgcaacgcttctcggaatcgactggcgttgaaggggatttcgaacaaaccaccacgcatattggggtattttcgaacgtacgatgcagctggggcgtccaatcttgctcgagaaagaactctggctatctcatgtgccagctgctcgggagctgcgtcagccttacaagcggtggcccttggaaacccgtccggggcgctctcgacgtgtcattcaaccgtcaagggactggatccattgttcccaaggttcagaagcatgtacgcgttcatttcaccaagatcacccaagacggacagattgcaaagaatcttctagacccagctgctcattttcaaatgctcccattctggatagtggccgaggtgcaatacgggaatctagacgaagacatgacgaggtcactggagagcatggtaccagttcacacagagctgtttgactacatgatccaaggcggcgtcccgcggttcacggccgtgaagttcctgcctacgaaggccatgcgtcagcttaggatgttctag

SEQ ID NO: 7383 - protein, 508 aa, Muscodor strobelii
  misc_feature: SGI Peptide ID NO. 562222
  misc_feature (52)..(166): Pfam Id: PF08241 Pfam Desc: Methyltransferase domain
  misc_feature (52)..(135): Pfam Id: PF08241 Pfam Desc: Methyltransferase domain
  misc_feature (1)..(267): NCBI GI: 46116114 Blast Desc: FG03899.1 [Gibberella zeae PH-1]
  misc_feature (10)..(263): NCBI GI: 46115658 Blast Desc: FG03671.1 [Gibberella zeae PH-1]
  misc_feature (373)..(508): NCBI GI: 238497558 Blast Desc: cytochrome P450 oxidoreductase GliC [Aspergillus flavus NRRL3357] gi|220693288|gb|EED49633.1| cytochrome P450 oxidoreductase GliC [Aspergillus flavus NRRL3357]
  misc_feature (373)..(508): NCBI GI: 169768272 Blast Desc: [Aspergillus oryzae RIB40] gi|83766464|dbj|BAE56604.1| protein product [Aspergillus oryzae]
  misc_feature (373)..(508): NCBI GI: 121709641 Blast Desc: cytochrome P450 monooxygenase, [Aspergillus clavatus NRRL 1] gi|119400625|gb|EAW11050.1| cytochrome P450 monooxygenase, [Aspergillus clavatus NRRL 1]
  misc_feature (373)..(508): NCBI GI: 154309105 Blast Desc: BC1G_07447 [Botryotinia fuckeliana B05.10] gi|150852490|gb|EDN27682.1| BC1G_07447 [Botryotinia fuckeliana B05.10]
  misc_feature (343)..(508): NCBI GI: 145241468 Blast Desc: An09g00560 [Aspergillus niger] gi|134077918|emb|CAL00316.1| protein product [Aspergillus niger]
  misc_feature (369)..(508): NCBI GI: 238485152 Blast Desc: cytochrome P450 oxidoreductase GliC-like, [Aspergillus flavus NRRL3357] gi|220698693|gb|EED55032.1| cytochrome P450 oxidoreductase GliC-like, [Aspergillus flavus NRRL3357]
  misc_feature (373)..(508): NCBI GI: 145604505 Blast Desc: MGG_07743 [Magnaporthe grisea 70-15] gi|145012510|gb|EDJ97164.1| MGG_07743 [Magnaporthe grisea 70-15]
  misc_feature (378)..(508): NCBI GI: 169772221 Blast Desc: [Aspergillus oryzae RIB40] gi|83768439|dbj|BAE58578.1| protein product [Aspergillus oryzae]
MNAPEGPDNFTPKQAITPNVELFDELVSDCFVNLATESLAYITPLQNGSVVLDDGCGAGAATAAVMAAVGRSINLSVKGIDIDKGALEKYQKRAEENSWNAEAIDMNATALQFPDDTFTLSFANGLLFVLDRPREGEVEPQKKYPNAVAAVSQVHRTLKPGGIAIFNSWKYVPNLGPVQTASKETRPEGTPVPREGLDDWSVSEYLRQVVQKGGFSKIVMHECPVSTTVSKMDRYVPMLWSFIGGAGGAGWLRSDEENWDRALAVVERESALGPEDYAVPDVLQYNRGFRVIPVVQAPLHRVDLASRDELEEVAADHIVVFDLLRDVVVSATGLQRFSESTGVEGDFEQTTTHIGVFSNVRCSWGVQSCSRKNSGYLMCQLLGSCVSLTSGGPWKPVRGALDVSFNRQGTGSIVPKVQKHVRVHFTKITQDGQIAKNLLDPAAHFQMLPFWIVAEVQYGNLDEDMTRSLESMVPVHTELFDYMIQGGVPRFTAVKFLPTKAMRQLRMF

SEQ ID NO: 7384 - DNA, 1797 bp, Muscodor strobelii
  misc_feature: SGI cDNA ID NO. 562224
  misc_feature: Encodes the peptide sequence at SEQ ID NO 7385
atggccactgccaggctcgcatcgtgtcttgcgatatttctcgtagctctcacagctctgaactacactggacgatacgcggtaacgcatttggaggatggagcgacaaagagacctaggatggtatcattcccactcatgagagactcggagcgacgatcgatcacacgacgagaagagttcacggacatcaggctgtatcgcaatttgacattagcgggatatttcattcaattgtccattggaacgcctcaacaagacgtcaaggtacttgtcgacacagacgtctctcctctgtgggtgaccaccgcctgcgtgggcgagtcgttgtgtgagcctagttatggggtctacgatccttccagttcgagcaccagtagccccattcccggcacggtaaacataacctacacttccggcgaaaatgtctcgttggatttttataccgatgcatattctttcagcaccggcgttgaggtaaagggtgttcagtttggcgtcacgaacatcacagatgtacagaatgggatcctcggacttggcttgccgagagcattcgatcaataccccaacctcgtccaacagctagcatcgcagggaaagacgaatagcaaagcctttagtttggcattgggcaattcgtctagcgaatccaccgacactgacggcgttataatattcggcggaatcgactccaagaagttcagcggcccgttggcgacctatgagatcattccagatgccacagattacacaataaatatggaaagcgtgggtgtcggtacttttgctgatggcgatgtgacaaacatcacagattctaacacaagagtaacaatcggctccgggatcggcttgatctatctaccgaacgcaactgtgatgagtcttgccaaacaatttaacgcgagcactgccgatgagctagacggcatgtatggactgtcgtgtgcgtctgtagcaaatagtacttcgttcgtaagtttcaacttcgctggtgtggccattgagatcccattttctgccctcgcgtacgaggtcgaagatcaaaatgatttgtgtcaactgggtatccagcccgacacattcagcggcggtttaacagctcttggtattccgtttctccaatacgcatatatcgtgttcgaccaaaccctcatgacagtgtccctggcacaatatgcgaaatgcggcactaatgcacaagagattccgagtactggtgttggtgagatggatttggtcggcgactgcgcgcctgcggggagtagcacggcaccgagcagcaatacaggcgatccctccatgacgcccacaacaacaagtagttcccatcccggtccttcatctagtatttcttctataggcgccaaagccggcatcggcgtgggcgttagcgtaggggttattgcgctcatcggagtggcttactttttccttgttgcgaagaaacgacgaaaggagaacattgcagaagacacgcaggctcaggaatcgcaggttcaagccctagagagaccatacccagacaaagaagaacaggctccacctacttatgcgccccaggagatgcacgcggatgccgttcatgaggcacctggctcaccatttgatgaagcaactggacagcgatggagttcgaagggtttgatggggcaaagttacgaccagcgagtttctcaactaccagatgaagacacacaaggagttgaggaaaccacctgcgtatctcctatacagagtagcgaccacacacagaaacacgacgacccgcagggaaacagcagctcgccctaa

SEQ ID NO: 7385 - protein, 598 aa, Muscodor strobelii
  misc_feature: SGI Peptide ID NO. 562224
  misc_feature (74)..(394): Pfam Id: PF00026 Pfam Desc: Eukaryotic aspartyl protease
  misc_feature (25)..(421): NCBI GI: 39970765 Blast Desc: MGG_02849 [Magnaporthe grisea 70-15] gi|149210259|ref|XP_001522504.1| MGCH7_ch7g607 [Magnaporthe grisea 70-15] gi|86196562|gb|EAQ71200.1| MGCH7_ch7g607 grisea
  misc_feature (42)..(438): NCBI GI: 171680938 Blast Desc: protein product [Podospora anserina] gi|170940427|emb|CAP65654.1| protein product [Podospora anserina]
  misc_feature (27)..(436): NCBI GI: 189195264 Blast Desc: candidapepsin-4 precursor [Pyrenophora tritici-repentis Pt-1C-BFP] gi|187979849|gb|EDU46475.1| candidapepsin-4 precursor [Pyrenophora tritici-repentis
  misc_feature (75)..(404): NCBI GI: 169598015 Blast Desc: SNOG_01805 [Phaeosphaeria nodorum SN15] gi|160707642|gb|EAT91454.2| SNOG_01805 [Phaeosphaeria nodorum SN15]
  misc_feature (42)..(481): NCBI GI: 39971095 Blast Desc: MGG_03014 [Magnaporthe grisea 70-15] gi|149210653|ref|XP_001522701.1| MGCH7_ch7g799 [Magnaporthe grisea 70-15] gi|86196754|gb|EAQ71392.1| MGCH7_ch7g799 grisea
  misc_feature (79)..(424): NCBI GI: 116191517 Blast Desc: CHGG_05476 [Chaetomium globosum CBS 148.51] gi|88181389|gb|EAQ88857.1| CHGG_05476 [Chaetomium globosum CBS 148.51]
  misc_feature (39)..(443): NCBI GI: 39948622 Blast Desc: MGG_08698 [Magnaporthe grisea 70-15] gi|145009241|gb|EDJ93952.1| MGG_08698 [Magnaporthe grisea 70-15]
  misc_feature (42)..(418): NCBI GI: 261353472 Blast Desc: candidapepsin-1 [Verticillium albo-atrum VaMs.102]
  misc_feature (45)..(464): NCBI GI: 171682894 Blast Desc: protein product [Podospora anserina] gi|170941406|emb|CAP67057.1| protein product [Podospora anserina]
  misc_feature (75)..(463): NCBI GI: 145606406 Blast Desc: MGG_11945 [Magnaporthe grisea 70-15] gi|145014070|gb|EDJ98711.1| MGG_11945 [Magnaporthe grisea 70-15]
  misc_feature (75)..(404): SWISSPROT Homolog: EC 3.4.23.35 Barrierpepsin
MATARLASCLAIFLVALTALNYTGRYAVTHLEDGATKRPRMVSFPLMRDSERRSITRREEFTDIRLYRNLTLAGYFIQLSIGTPQQDVKVLVDTDVSPLWVTTACVGESLCEPSYGVYDPSSSSTSSPIPGTVNITYTSGENVSLDFYTDAYSFSTGVEVKGVQFGVTNITDVQNGILGLGLPRAFDQYPNLVQQLASQGKTNSKAFSLALGNSSSESTDTDGVIIFGGIDSKKFSGPLATYEIIPDATDYTINMESVGVGTFADGDVTNITDSNTRVTIGSGIGLIYLPNATVMSLAKQFNASTADELDGMYGLSCASVANSTSFVSFNFAGVAIEIPFSALAYEVEDQNDLCQLGIQPDTFSGGLTALGIPFLQYAYIVFDQTLMTVSLAQYAKCGTNAQEIPSTGVGEMDLVGDCAPAGSSTAPSSNTGDPSMTPTTTSSSHPGPSSSISSIGAKAGIGVGVSVGVIALIGVAYFFLVAKKRRKENIAEDTQAQESQVQALERPYPDKEEQAPPTYAPQEMHADAVHEAPGSPFDEATGQRWSSKGLMGQSYDQRVSQLPDEDTQGVEETTCVSPIQSSDHTQKHDDPQGNSSSP

SEQ ID NO: 7386 - DNA, 882 bp, Muscodor strobelii
  misc_feature: SGI cDNA ID NO. 562225
  misc_feature: Encodes the peptide sequence at SEQ ID NO 7387
atgatggcgccagataaaaaaatcgtcctgatcacaggatgcagctcaggtattggcgaggcactcgctctggattttcattcgagaggccacgccgtaattgcgacagcgagaaatctagcaaaacttcagaaactgaaagaccttggcatacaaactatacagctcgatgcaatccaggtcacagattctcagtcgatcagcgactccgtcaaggcactcgacaagatcaccgacaaactagatatcctcattaataactccggcataggctatacatcaccgctcttagacgtcgacctcaccgttgctcgctcagtaatggaaacaaatctgttcggccgagtagcagtcacccaggccttctttccctttctaagaatcgcaaaaggcacaattgtaaacataggtagcatcgcggcagtggacccaatgccatgggcctcgatctatgctgcgtcatgttcagctgtacacatgtggaatgattcgttgagattagagatgagacctttcggtatcaaagttgtacttgttgttaccggtgccatcgaatcctcattcctggacaacctgacgacacctaagcttagacccgactccctatactatccagctcacgaaaagatcgaagcagcgatggccggcgcaaacgcgggaaaatatacaccaaccgcgcaatacgccacccgccttgtcactcatctcctccgaactaatgttactaaacacatctggatcggaaagctaacgactagactttggtttgtgtctacattcctgtggtctactgtatgggacttgctactcgcaggccctttcggcgtcacagagttcgagagaatattgaaggccaaggaaagtgaacaaggcggaacatga

SEQ ID NO: 7387 - protein, 293 aa, Muscodor strobelii
  misc_feature: SGI Peptide ID NO. 562225
  misc_feature (7)..(170): Pfam Id: PF00106 Pfam Desc: short chain dehydrogenase
  misc_feature (6)..(270): NCBI GI: 146324313 Blast Desc: short-chain dehydrogenase/reductase [Aspergillus fumigatus Af293] gi|129556254|gb|EAL85701.2| short-chain dehydrogenase/reductase, [Aspergillus fumigatus Af293] fumigatus
  misc_feature (6)..(270): NCBI GI: 119467458 Blast Desc: short-chain dehydrogenase/reductase, [Neosartorya fischeri NRRL 181] gi|119405687|gb|EAW15638.1| short-chain dehydrogenase/reductase, [Neosartorya fischeri NRRL 181]
  misc_feature (6)..(287): NCBI GI: 154317593 Blast Desc: BC1G_03148 [Botryotinia fuckeliana B05.10] gi|150844322|gb|EDN19515.1| BC1G_03148 [Botryotinia fuckeliana B05.10]
  misc_feature (6)..(266): NCBI GI: 145254010 Blast Desc: An18g00230 [Aspergillus niger] gi|134084069|emb|CAK43099.1| protein product [Aspergillus niger]
  misc_feature (2)..(289): NCBI GI: 156049501 Blast Desc: SS1G_08457 [Sclerotinia sclerotiorum 1980] gi|154692856|gb|EDN92594.1| SS1G_08457 [Sclerotinia sclerotiorum 1980]
  misc_feature (6)..(291): NCBI GI: 154297154 Blast Desc: BC1G_12236 [Botryotinia fuckeliana B05.10] gi|150843065|gb|EDN18258.1| BC1G_12236 [Botryotinia fuckeliana B05.10]
  misc_feature (6)..(264): NCBI GI: 256727397 Blast Desc: NECHADRAFT_90830 [Nectria haematococca mpVI 77-13-4]
  misc_feature (15)..(275): NCBI GI: 156057173 Blast Desc: SS1G_04317 [Sclerotinia sclerotiorum 1980] gi|154702103|gb|EDO01842.1| SS1G_04317 [Sclerotinia sclerotiorum 1980]
  misc_feature (6)..(260): NCBI GI: 256723231 Blast Desc: NECHADRAFT_86494 [Nectria haematococca mpVI 77-13-4]
  misc_feature (4)..(290): NCBI GI: 85107683 Blast Desc: NCU07904 [Neurospora crassa OR74A] gi|28924026|gb|EAA33184.1| conserved [Neurospora crassa OR74A]
  misc_feature (6)..(290): SWISSPROT Homolog: EC 1.1.1.101 Acylglycerone-phosphate reductase
MMAPDKKIVLITGCSSGIGEALALDFHSRGHAVIATARNLAKLQKLKDLGIQTIQLDAIQVTDSQSISDSVKALDKITDKLDILINNSGIGYTSPLLDVDLTVARSVMETNLFGRVAVTQAFFPFLRIAKGTIVNIGSIAAVDPMPWASIYAASCSAVHMWNDSLRLEMRPFGIKVVLVVTGAIESSFLDNLTTPKLRPDSLYYPAHEKIEAAMAGANAGKYTPTAQYATRLVTHLLRTNVTKHIWIGKLTTRLWFVSTFLWSTVWDLLLAGPFGVTEFERILKAKESEQGGT

SEQ ID NO: 7388 - DNA, 355 bp, Muscodor strobelii
  misc_feature: SGI EST ID NO. CUFF.18310.0
  misc_feature: Variant of the nucleotide sequence at SEQ ID NO 7386
tgggcctcgatctatgctgcgtcatgttcagctgtacacatgtggaatgattcgttgagattagagatgagacctttcggtatcaaagttgtacttgttgttaccggtgccatcgaatcctcattcctggacaacctgacgacacctaagcttagacccgactccctatactatccagctcacgaaaagatcgaagcagcgagtaagtctgtcttactctctgtgtcccgatttgctctcttatattttctcccctatttactcctcaccaatttcattcaatctagaacaacatgttgacaacaccagtggccggcgcaaacgcgggaaaatatacaccaaccgcgcaatacgc

SEQ ID NO: 7389 - DNA, 1644 bp, Muscodor strobelii
  misc_feature: SGI cDNA ID NO. 562226
  misc_feature: Encodes the peptide sequence at SEQ ID NO 7390
atgaagctgggtgctgcagtatttggtgcgatagcggactactgggtcccaattgtcttgctgttaataagtgcaagactgttacgaaatcgctaccagaatggactacaccgatacccggggcctttcttggcctctttaaccgatttgtggcgattatgggaggtccgtggtgggcagttcgaggtcaccaacagaagactgcatgaaaaatatggtgatgttgttcggttaggaccaaattgcctttcgttcgcagatccgaaggcgctaaagacgatatatggtttgaacaagggctttatcaagtcagatttttatacagtccaacagggtgtctcgaaaggccgtggcttagcgactctattcagtacgaccgataacacgttccatgccaagcttcgacgatgtgttagctctgctttctcgatgtcggctctcgttcaatacgagccatttgtggacaacacactaaagttgtttttcgaacaaacggaacgcttgtttgcaggtcgccctgagggttgtgatttcgttagatggctgcaattctacgctttcgatgtcattggtgaggttacttatggcaagcgacacggattcgtagagaaaaatgaggatatagatggcattgtcagcttcctcggtaacatgtttctatatgccgcgcctgtcggccaaatgccttggctagatcgtctgttcctgaagaatcctctttacctcaagctttcggaatggggtatcgtcgacgcaacgaatccgatcgttcgcttcgctcgagtacgcatggccgaacgtcttggtaaaatggaggctgcagaacatacatcagggcccctgttgcccgtcgcaggcgctaagaataatattagcaagtcgccagaccttctatcaaagtttcttgctgcccaagaggcccgtcccgatttcatggacgataaagcggtgctagccatggctacatcaatggcattcgccggatcagaaacaacggccatctcgctatctgccgtattctacaacctcctccgcaatccgtctgcccttgcgaccctacagcgcgaactcgatgatgctgcacgtcgtggtgtgtttgctgacaatgacattggtatcgtgacatggactgaggctcaaaccctgccataccttgatgcatgcatcaaggaggcgttccgaatgtatcctgccgcaggtctacctctcgaacggatcgtaccggagcccgggatggaaatcgcaggttgctatgttagaggcggtactattgtcggatgctctgcgtggcttatacatcggcgtgctgagatatttggggacgacgttgacacatatcgaccagagagatggctcgtcgatagctcacttcctgagactgagcggtcggaacgtgaggagcatgttcgtgagatgaatggtcacatgtttcaattcggtatgggatctcggacttgtattggcaagaacatcagtcttctggagatgtacaagcttgtacccagcttcttgaggcgattcgaggtcagcttcaaagactcacgccaagactggacgaccgtgaacgcatggttcatcaaacaacaaaacttcgagactttatttgagaagaaaaggttgatacaacctgccggtcagcagtaa

SEQ ID NO: 7390 - protein, 547 aa, Muscodor strobelii
  misc_feature: SGI Peptide ID NO. 562226
  misc_feature (40)..(535): Pfam Id: PF00067 Pfam Desc: Cytochrome P450
  misc_feature (288)..(452): Pfam Id: PF00067 Pfam Desc: Cytochrome P450
  misc_feature (479)..(535): Pfam Id: PF00067 Pfam Desc: Cytochrome P450
  misc_feature (3)..(543): NCBI GI: 39973001 Blast Desc: MGG_07795 [Magnaporthe grisea 70-15] gi|145012570|gb|EDJ97224.1| MGG_07795 [Magnaporthe grisea 70-15]
  misc_feature (3)..(543): NCBI GI: 46109726 Blast Desc: FG01745.1 [Gibberella zeae PH-1]
  misc_feature (11)..(543): NCBI GI: 256730678 Blast Desc: [Nectria haematococca mpVI 77-13-4]
  misc_feature (7)..(547): NCBI GI: 85077946 Blast Desc: NCU04089 [Neurospora crassa OR74A] gi|28917130|gb|EAA26849.1| conserved [Neurospora crassa OR74A]
  misc_feature (7)..(508): NCBI GI: 171682558 Blast Desc: protein product [Podospora anserina] gi|170941238|emb|CAP66888.1| protein product [Podospora anserina]
  misc_feature (14)..(525): NCBI GI: 154312027 Blast Desc: BC1G_06047 [Botryotinia fuckeliana B05.10] gi|150850697|gb|EDN25890.1| BC1G_06047 [Botryotinia fuckeliana B05.10]
  misc_feature (30)..(541): NCBI GI: 255945695 Blast Desc: Pc20g11260 [Penicillium chrysogenum Wisconsin 54-1255] gi|211588350|emb|CAP86455.1| Pc20g11260 [Penicillium chrysogenum Wisconsin 54-1255]
  misc_feature (1)..(540): NCBI GI: 169786449 Blast Desc: [Aspergillus oryzae RIB40] gi|238507461|ref|XP_002384932.1| cytochrome P450, [Aspergillus flavus NRRL3357] gi|83776433|dbj|BAE66552.1| protein product
  misc_feature (11)..(531): NCBI GI: 116202783 Blast Desc: CHGG_09276 [Chaetomium globosum CBS 148.51] gi|88177794|gb|EAQ85262.1| CHGG_09276 [Chaetomium globosum CBS 148.51]
  misc_feature (11)..(538): NCBI GI: 259487500 Blast Desc: TPA: cytochrome P450, (Eurofung) [Aspergillus nidulans FGSC A4]
  misc_feature (36)..(512): SWISSPROT Homolog: EC 1.14.13.12 Benzoate 4-monooxygenase
MKLGAAVFGAIADYWVPIVLLLISARLLRNRYQNGLHRYPGPFLASLTDLWRLWEVRGGQFEVTNRRLHEKYGDVVRLGPNCLSFADPKALKTIYGLNKGFIKSDFYTVQQGVSKGRGLATLFSTTDNTFHAKLRRCVSSAFSMSALVQYEPFVDNTLKLFFEQTERLFAGRPEGCDFVRWLQFYAFDVIGEVTYGKRHGFVEKNEDIDGIVSFLGNMFLYAAPVGQMPWLDRLFLKNPLYLKLSEWGIVDATNPIVRFARVRMAERLGKMEAAEHTSGPLLPVAGAKNNISKSPDLLSKFLAAQEARPDFMDDKAVLAMATSMAFAGSETTAISLSAVFYNLLRNPSALATLQRELDDAARRGVFADNDIGIVTWTEAQTLPYLDACIKEAFRMYPAAGLPLERIVPEPGMEIAGCYVRGGTIVGCSAWLIHRRAEIFGDDVDTYRPERWLVDSSLPETERSEREEHVREMNGHMFQFGMGSRTCIGKNISLLEMYKLVPSFLRRFEVSFKDSRQDWTTVNAWFIKQQNFETLFEKKRLIQPAGQQ

SEQ ID NO: 7391 - DNA, 3096 bp, Muscodor strobelii
  misc_feature: SGI EST ID NO. CUFF.18324.0
  misc_feature: Variant of the nucleotide sequence at SEQ ID NO 7389
aagcttcaaagactaaccaatggcatgattcaccagtaatgcctgaaagtccactccaataaattggccacggtgggatcaatgtctccaccaaaagaagaaggcgcacatgtgcgattgagaaaagagcctatctgccttggaattaatgccgtgccccaaaaccgacatgaccagctgaggggggcaaagagtatggaagacgactaggggcgatggcactcggggaagatgcatagattcctgtcacaacatcgactggcacgatgtgtcccatatcgcatgttgggtcttcccgagagggtcggcaaatgagtattcgcagattgcagcgtgggtatttgtcagatgccgtagccatgtgaatcattacggatacataattgctgtatctttgtcattttatctcatgtgacttcctttacgaagaagcattctgagtatatcgctgcggctagctctggctcggctctgtcaatagtgccccaagcacctctcaaactcaacattccaatcgcaagcttgtacccagagctcagtctcaagagccattcagtcttcgacctaataagaccgtaaatcgcaaagtcctatcacccaaattttcgacgagacgcatagtcgctgtttggcaaaggccgatcgatcgagaacccaacacacagaatatcatcagcttcgggcggaacgagggtggatgactgaaagatgaagctgggtgctgcagtatttggtgcgatagcggactactgggtcccaattgtcttgctgttaataagtgcaagactgttacgaaatcgctaccagaatggactacaccgatacccggggcctttcttggcctctttaaccgatttgtggcgattatgggaggtccgtggtgggcagttcgaggtcaccaacagaagactgcatgaaaaatatggtgatgttgttcggttaggaccaaattgcctttcgttcgcagatccgaaggcgctaaagacgatatatggtttgaacaagggctttatcaaggtttgcagcgtgatattctgttcagtcgtaagatagtgtattaacgtgagtcttcagtcagatttttatacagtccaacagggtgtctcgaaaggccgtggcttagcgactctattcagtacgaccgataacacgttccatgccaagcttcgacgatgtgttagctctgctttctcgatgtcggctctcgttcaatacgagccatttgtggacaacacactaaagttgtttttcgaacaaacggaacgcttgtttgcaggtcgccctgagggttgtgatttcgttagatggctgcaattctacgctttcgatgtcattggtgaggttacttatggcaagcgacacggattcgtagagaaaaatgaggatatagatggcattgtcagcttcctcggtaacatgtttctatatgccgcgcctgtcggccaaatgccttggctagatcgtctgttcctgaagaatcctctttacctcaagctttcggaatggggtatcgtcgacgcaacgaatccgatcgttcgcttcgctcgagtacgcatggccgaacgtcttggtaaaatggaggctgcagaacatacatcagggcccctgttgcccgtcgcaggcgctaagaataatattagcaagtcgccagaccttctatcaaagtttcttgctgcccaagaggcccgtcccgatttcatggacgataaagcggtgctagccatggctacatcaatggcattcgccggatcagaaacaacggccatctcgctatctgccgtattctacaacctcctccgcaatccgtctgcccttgcgaccctacagcgcgaactcgatgatgctgcacgtcgtggtgtgtttgctgacaatgacattggtatcgtgacatggactgaggctcaaaccctgccataccttgatgcatgcatcaaggaggcgttccgaatgtatcctgccgcaggtctacctctcgaacggatcgtaccggagcccgggatggaaatcgcaggttgctatgttagaggcggtactattgtcggatgctctgcgtggcttatacatcggcgtgctgagatatttggggacgacgttgacacatatcgaccagagagatggctcgtcgatagctcacttcctgagactgagcggtcggaacgtgaggagcatgttcgtgagatgaatggtcacatgtttcaattcggtatgggatctcggacttgtattggcaagaacatcagtcttctggagatgtacaagcttgtacccagcttcttgaggcgattcgaggtagggagatatctctttttcactatccaccccttgacgacttgacgcgcgattggcccactaaatcatatacaggtcagcttcaaagactcacgccaagactggacgaccgtgaacgcatggttcatcaaacaacaaaacttcgagactttatttgagaagaaaaggttgatacaacctgccggtcagcagtaaacgcatggatatagatactagtaacttaatgaggtgttttcacttttctcacggctgtaatgaaacgataggtatacatgccaatttagacagaatgaatcgcaagaggaggcctctgtactctttgtagatattgaactatttcaaagtacgagtaattctctttattcactgtcgtgatcgtctagctcttgatcgcgtttcaaaattgccatgagtattcgatagactggcttactagttattagtccgtgaactcaacgctctcgaatccctattcgcatcaacgaaattatgatcagctcaaaatgaatgaatgtgagaagcctcataggttctatgttaagagttcgacgttgcaactcatgtgtaaggattggccgtgaggctgtggacttatgtgaatcatatcataactaataagattcttcttttcccgggagaacactcatcgttcttctcgatctccgcttatgtcaaggcttcgctcgtaacacaacaagggcgtacaccttgcttatcacgacagagtatgcggccatgcgtgagcttcgagaagaactcaattcgaacctgatcctacaaaggatttagagtacggcaaagtcaatt

SEQ ID NO: 7392 - DNA, 966 bp, Muscodor strobelii
  misc_feature: SGI cDNA ID NO. 562227
  misc_feature: Elevated expression when VOC is produced
  misc_feature: Encodes the peptide sequence at SEQ ID NO 7393
atgggtaaattcggcgacgaagactgcacgttcgacacttgcgatgtcaacactacatcgtactatgggtaccgaccgaacttgggtatcgatgttttctttgctgccgtatatgctgtcatcattggtcactgtctcttcatcactatcctaaagagaaaatggttgagctactcgatcgtgattcttattggttccatctttgagctcgttggttatatcgcccgtgtagagggctaccatgacccttggaagaagattggatggattgtgcagtactccgtcatcacgctcgcacccgtcttcatgactgccgctatgtacgtctgtttaggtcgaacggctgacattgttggacgaggctacttcaacatcagccctagacgctactcgcgtgtcttcatccccaccgatgtcgtcatcttgttgattcaaggtatcggtggtggtatctcagtcaaagagaccgtcaacaatgatgcagcatcctctgggatttcgacaggctcggccgtcattatcgtcggtttagttgctcaagttgtttccctgacgtccttcctcgtcctatacaccgccgtcgtatggccctctggcgtattccgcgtacagtcttcacgcctgccgctgaagcaggcaaagcgcctgcgaacattcgtcatcatcatgttcgttgccattgttctcatccttggtcgatctggctacagagttgcggagctgtcgcagggtatctctgctgacggcctggtccataacgaactattgtttattctctttgatgccatcccggtcgctgtcgctacagctctgatggttgtgttccatccctattactacctccccaacccagatgcgctcgcctcccccgaggctggcaagtcgccgagcaacatcgagcttacgggctatcctcacggtgtatataaccagagactcgactctcgtcctcctactgcctactaa

SEQ ID NO: 7393 - protein, 321 aa, Muscodor strobelii
  misc_feature: SGI Peptide ID NO. 562227
  misc_feature (60)..(292): Pfam Id: PF04479 Pfam Desc: RTA1 like protein
  misc_feature (60)..(190): Pfam Id: PF04479 Pfam Desc: RTA1 like protein
  misc_feature (7)..(277): NCBI GI: 119182161 Blast Desc: CIMG_06126 [Coccidioides immitis RS]
  misc_feature (7)..(277): NCBI GI: 240109180 Blast Desc: RTA1 like protein family [Coccidioides posadasii C735 delta SOWgp]
  misc_feature (4)..(277): NCBI GI: 238840740 Blast Desc: parasitic phase-specific protein PSP-1 [Microsporum canis CBS 113480]
  misc_feature (7)..(277): NCBI GI: 238843031 Blast Desc: sphingoid long-chain base transporter RSB1 [Microsporum canis CBS 113480]
  misc_feature (7)..(277): NCBI GI: 239607657 Blast Desc: parasitic phase-specific protein PSP-1 [Ajellomyces dermatitidis ER-3]
  misc_feature (7)..(277): NCBI GI: 261197750 Blast Desc: parasitic phase-specific protein PSP-1 [Ajellomyces dermatitidis SLH14081] gi|239595240|gb|EEQ77821.1| parasitic phase-specific protein PSP-1 [Ajellomyces dermatitidis SLH14081]
  misc_feature (7)..(277): NCBI GI: 225562020 Blast Desc: parasitic phase-specific protein PSP-1 [Ajellomyces capsulatus G186AR]
  misc_feature (9)..(298): NCBI GI: 225679363 Blast Desc: conserved [Paracoccidioides brasiliensis Pb03]
  misc_feature (7)..(277): NCBI GI: 240275627 Blast Desc: parasitic phase-specific protein PSP-1 [Ajellomyces capsulatus H143]
  misc_feature (9)..(298): NCBI GI: 226291085 Blast Desc: parasitic phase-specific protein PSP-1 [Paracoccidioides brasiliensis Pb18]
  misc_feature: Useful for introducing or modulating the production of volatile compounds
MGKFGDEDCTFDTCDVNTTSYYGYRPNLGIDVFFAAVYAVIIGHCLFITILKRKWLSYSIVILIGSIFELVGYIARVEGYHDPWKKIGWIVQYSVITLAPVFMTAAMYVCLGRTADIVGRGYFNISPRRYSRVFIPTDVVILLIQGIGGGISVKETVNNDAASSGISTGSAVIIVGLVAQVVSLTSFLVLYTAVVWPSGVFRVQSSRLPLKQAKRLRTFVIIMFVAIVLILGRSGYRVAELSQGISADGLVHNELLFILFDAIPVAVATALMVVFHPYYYLPNPDALASPEAGKSPSNIELTGYPHGVYNQRLDSRPPTAY

SEQ ID NO: 7394 - DNA, 1967 bp, Muscodor strobelii
  misc_feature: SGI EST ID NO. CUFF.18331.0
  misc_feature: Variant of the nucleotide sequence at SEQ ID NO 7392
gggttatgaggtctgttccgtggcgcaagcacggcagctggatcagcataaatccacgctgaagttatgcagtgcaagatctggagtcagctgaaacgacacagggacgccatgtgcgacgtatgtaatcgaaaccagcgaatgcgcgcctatgcgcagcgtacatgcctgttgtgctttatcaaatacctaaatacagcacagccttgtcttaccactggccagtcttatgcagatcgttgcacgatcgtgtggatgcacaattcgacaatgctgtgctgacgacccgaggccatggagcaacgtctaacaacatgcccaacaattacgggtagaaacatagaagccgttgaacactaatacgatgtcactatgatgtttcaagtcctttgcctgccgttttttgccggcactaggccacatcattgtacattccgatcccccttgcgaggctgcgcatagctgcgtatttgttggacaaatgcagttgatgagacctacactgccttgataagacaaatcaagtcagcagtcatcttgttattaatactccgggtccctcgatctgaatctgtctttcactacctggctattcaatatacaaatagtctagacccaggccaacaaccgaagcttcgactagactatcgaagacatctctagtttcaacagtatcaacagtatcagtaccagaatttcttcactactctcgatcgctctattcgcatcaactaagtcgacaaagcccttcgctataagccatgggtaaattcggcgacgaagactgcacgttcgacacttgcgatgtcaacactacatcgtactatgggtaccgaccgaacttgggtatcgatgttttctttgctgccgtatatgctgtcatcattggtcactgtctcttcatcactatcctaaagagaaaatggttgagctactcgatcgtgattcttattggttccatctttgagctcgttggttatatcgcccgtgtagagggctaccatgacccttggaagaagattggatggattgtgcagtactccgtcatcacgctcgcacccgtcttcatgactgccgctatgtacgtctgtttaggtcgaacggctgacattgttggacgaggctacttcaacatcagccctagacgctactcgcgtgtcttcatccccaccgatgtcgtcatcttgttgattcaaggtatcggtggtggtatctcagtcaaagagaccgtcaacaatgatgcagcatcctctgggatttcgacaggctcggccgtcattatcgtcggtttagttgctcaagttgtttccctgacgtccttcctcgtcctatacaccgccgtcgtatggccctctggcgtattccgcgtacagtcttcacgcctgccgctgaagcaggcaaagcgcctgcgaacattcgtcatcatcatgttcgttgccattgttctcatccttggtcgatctggctacagagttgcggagctgtcgcagggtatctctgctgacggcctggtccataacgaactattgtttattctctttgatgccatcccggtcgctgtcgctacagctctgatggttgtgttccatccctattactacctccccaacccagatgcgctcgcctcccccgaggctggcaagtcgccgagcaacatcgagcttacgggctatcctcacggtgtatataaccagagactcgactctcgtcctcctactgcctactaagcagctgtatctatattcattttgcacaggggaccaggtctggatttcggcgttagacatgggtagacatgagcgatagatgaacatcgggttcaacttgcatgattagaagagacaccggctcgggacgacattgagaactgggttagaggatcctaacattagataccacacactaaacgtgtagaaaatgcatttcattcaaagtttgattcaaatgactctcaatctgattccgca

SEQ ID NO: 7395 - DNA, 855 bp, Muscodor strobelii
  misc_feature: SGI cDNA ID NO. 562228
  misc_feature: Encodes the peptide sequence at SEQ ID NO 7396
atggtacctgaaccagagtcgagacaatactataacacagctatggaactatatgatcgagcaagtcgttcattccgcacacatttaggtaaaatgaatccagaaacacatcatatgttatacatgttctcctcgatggcggcttttatcaacattgcgttttcgcagtgtaatttcacagatggtgatgagttgaacacgttatcaaccgtagccattgctttcgatctattgaatggcagcgccaacatcgcacaagctgattttcaacgtctgctggaaagtcccgtgcctgtgcgggcatacatgagctacggtactgcacgaagtgacacgctggacatcgacacacgggccgcactcgcccgtctcgggatcctcaatgaaatatatcatagttaccgttacaagagcagcacgcctctatctcgcgatgatgcaagtggcgcaaatacaccgcgaagtggctcaccccctataccaataacaccatggaacactgccgtgggactgctacagcggtgtttcgctgaagacttgcgaggcgtttttcgcggtttctgttttgtgttcccaggcgcagctggcccggatttcgcagcagccgtcaaagcagctgatcccatggccttaatgattctcatgcattggactgtcctgcttggtcgcgttcaaggggagtattggtgggcaaaggatcttggtccgagactagcagtcggtatctggaaggcaatgcaactcgctgcgctctcgccgtccgtgtcgtctatcatgctgtcaccagaatggacgcagagcatcgattgggtttgctcaaagttagatctaccagagtttctacatgggtgctaa

SEQ ID NO: 7396 - protein, 284 aa, Muscodor strobelii
  misc_feature: SGI Peptide ID NO. 562228
  misc_feature (10)..(277): NCBI GI: 256732297 Blast Desc: NECHADRAFT_80749 [Nectria haematococca mpVI 77-13-4]
  misc_feature (4)..(278): NCBI GI: 154285990 Blast Desc: [Ajellomyces capsulatus NAm1] gi|150407431|gb|EDN02972.1| [Ajellomyces capsulatus NAm1]
  misc_feature (4)..(278): NCBI GI: 225558310 Blast Desc: conserved [Ajellomyces capsulatus G186AR]
  misc_feature (6)..(278): NCBI GI: 261358754 Blast Desc: conserved [Verticillium albo-atrum VaMs.102]
  misc_feature (15)..(278): NCBI GI: 240277265 Blast Desc: C6 transcription factor [Ajellomyces capsulatus H143]
  misc_feature (6)..(284): NCBI GI: 116205886 Blast Desc: [Chaetomium globosum CBS 148.51] gi|88182833|gb|EAQ90301.1| [Chaetomium globosum CBS 148.51]
  misc_feature (3)..(242): NCBI GI: 238506353 Blast Desc: C6 transcription factor, [Aspergillus flavus NRRL3357] gi|220689091|gb|EED45442.1| C6 transcription factor, [Aspergillus flavus NRRL3357]
  misc_feature (4)..(277): NCBI GI: 261201774 Blast Desc: C6 transcription factor [Ajellomyces dermatitidis SLH14081] gi|239590198|gb|EEQ72779.1| C6 transcription factor [Ajellomyces dermatitidis SLH14081] gi|239611911|gb|EEQ88898.1|
  misc_feature (5)..(247): NCBI GI: 121700364 Blast Desc: C6 transcription factor, [Aspergillus clavatus NRRL 1] gi|119396589|gb|EAW07021.1| C6 transcription factor, [Aspergillus clavatus NRRL 1]
  misc_feature (5)..(270): NCBI GI: 240111780 Blast Desc: Fungal Zn binuclear cluster domain containing protein [Coccidioides posadasii C735 delta SOWgp]
MVPEPESRQYYNTAMELYDRASRSFRTHLGKMNPETHHMLYMFSSMAAFINIAFSQCNFTDGDELNTLSTVAIAFDLLNGSANIAQADFQRLLESPVPVRAYMSYGTARSDTLDIDTRAALARLGILNEIYHSYRYKSSTPLSRDDASGANTPRSGSPPIPITPWNTAVGLLQRCFAEDLRGVFRGFCFVFPGAAGPDFAAAVKAADPMALMILMHWTVLLGRVQGEYWWAKDLGPRLAVGIWKAMQLAALSPSVSSIMLSPEWTQSIDWVCSKLDLPEFLHGC

SEQ ID NO: 7397 - DNA, 2496 bp, Muscodor strobelii
  misc_feature: SGI EST ID NO. CUFF.18335.0
  misc_feature: Variant of the nucleotide sequence at SEQ ID NO 7395
gatcttttcgttatagctctcagtaacggttctcgtttgtcgacacaaacgcggcttaattataccattctttgagaacctaataccaggcagcagatctcatgcagctgaggctctgagccacgaccgccttgctgatgctggtcgaacccataacgaagaagtaccaaacagcaaatcttcccacaagcgcacccgcatgttatatggcggctgattcgtccaacgttgactgccgagcgcggatgatgtgagaaagtcgaggttttcaacatcttgagcttagtgtcggcctgcctcatcagcaacacataacccatttctactcgtgttatgctcaagcgctctaatctcaccccaggccttagcctcagccctatctttggtcctcaagtcaccctaccagctcgcatgaaaagcgagcggtgtcgtcgtccgggaaagtcggcggagactaaaagacaagttgtgccaagcgtctatagtgctcactgctggcagtcaatttttagtattagacagacccttagtgtagtgttgcagaaagggactctgcatatgagtcttatttcttttcggccgacggcaccacaccaattgattcccactctataatcccagcgttgcacccctgcgccacccacgccattgtctgctcattgaggagaaggggttgctcagctgaggtaaaggtttataactacccttcagccttgacaattgacgcgcgcatgttcctgttggtattgcagacgcctccaataacgacatctaattacacgcgtagacatacggacgcgcacatacatatacggttctgcatatacggacacgtgtaaaaggacgtactcaggactcaatggccatgcaaaaaagaagatcgcacaagaaatcccggcgcggatgtttgaattgtaaaaagtggcacaccaagtgcgacgaatcaggcccgccctgcaataactgcacgctgcgaaatgcaaaatgcgaatacagttggatgacagtcgacaaaactgtcactctggcacagagtaggaaatcacagtcgcgcaaatcttcaacttgcagctcggaagaacgcagtgttttgggagatccgggcgatttggtcctgagtgaatgccggaggcggttagagctcgatttgatgcactgctggtccacgacgacatacaagagcctctgcagcgtgcccgaggatcaccattatatgcaactcatattacctcaagaggcgcttcgctatgacttcctcatgaacgggattttcgtcgcgtccgccctccatcgggccaccatggtacctgaaccagagtcgagacaatactataacacagctatggaactatatgatcgagcaagtcgttcattccgcacacatttaggtaaaatgaatccagaaacacatcatatgttatacatgttctcctcgatggcggcttttatcaacattgcgttttcgcagtgtaatttcacagatggtgatgagttgaacacgttatcaaccgtagccattgctttcgatctattgaatggcagcgccaacatcgcacaagctgattttcaacgtctgctggaaagtcccgtgcctgtgcgggcatacatgagctacggtactgcacgaagtgacacgctggacatcgacacacgggccgcactcgcccgtctcgggatcctcaatgaaatatatcatagttaccgttacaagagcagcacgcctctatctcgcgatgatgcaagtggcgcaaatacaccgcgaagtggctcaccccctataccaataacaccatggaacactgccgtgggactgctacagcggtgtttcgctgaagacttgcgaggcgtttttcgcggtttctgttttgtgttcccaggcgcagctggcccggatttcgcagcagccgtcaaagcagctgatcccatggccttaatgattctcatgcattggactgtcctgcttggtcgcgttcaaggggagtattggtgggcaaaggatcttggtccgagactagcagtcggtatctggaaggcaatgcaactcgctgcgctctcgccgtccgtgtcgtctatcatgctgtcaccagaatggacgcagagcatcgattgggtttgctcaaagttagatctaccagagtttctacatgggtgctaacttgcacatttggcttatcacactcttcttattgttttttttttttttttggagttgaagggttaggattactggatatatacccaatagcattgcgatggtcttgtcacgagaatgctcaaggaatagcacatgttgaacttgcacattcgtatttgtcacttcattgacgaatctatgatacattacgatgttaaacggctcagtgaaccactagatagtgcggtagtaccacttcactggtaacttgctctagaatgatgcaatgtaatccactcaatcataatggagctcaccaaccctgtcgagctggctcgaaaggattcttgaatagacgcccg

SEQ ID NO: 7398 - DNA, 2382 bp, Muscodor strobelii
  misc_feature: SGI cDNA ID NO. 562229
  misc_feature: Reduced expression when VOC is produced
  misc_feature: Encodes the peptide sequence at SEQ ID NO 7399
atgttcgctacattcgatggcggaaagcaggaggaacacaaagcagacctcaaagatgagaacaaatctgaagcatcggcgtcaaatgctaggtcatttgatgcctcaataagaccgaagcggcagcaggtcgctcgcgcctgtgactcatgtcgaatgcaccgcataaaatgtgacaacagtgtgccttgcaaaaattgtgttagccgaggagagcaatgtatcaacaaaagcccaggtgaaaggcgtacacttcctcaagcgtatcgtgagatcgataggctaaagcaaaaggtcaaagagttggaggagcagcttgcaaaagagcgcagcactccgcgcgttgcctccacgccggcagggacacaatcaattatcttgacgcctcctggtagcctggactcagtctcgacaccagacgcaacttgcataaatccaaacgtggtaaagccacaacaagtatggggcggtattctcaccaaaactggacagtcaccgcaaaagacttggtacggaccgtcatctcaattctactacatttaccgtatgaacaagtacatctccacggtatttgaacaattaggtccagatgatcagatccaacttcaatctgccgccaaaacatttgccactccagactgtacccccgcggacgacgtgagcagattagatttgaaagatgctgaacagccagtatcgaacgaaaatttcttaactccatctcaagaggaatatttcctcaacctattttggcaatcgtaccaccctatattagtaattctcgatgaatccgagttcaggcaacattatcgatcactattgacgaaacctgggaagcctcgcaaaccgtccgctctagttgacattgtgatcgccgtgagcatgcaggtgggcatggctgtcgctaagcgtaacaatcccaatgtaccaacaacgagatctgccgaagtaggcagagatgatccaagcattgcgggaagactatattatcgtcgatgccagaggttgcttcataacgaacaagaagcgccaaccctgatgaccgtaagaggtcacattctctcagcagtttacacatgctgtgctgcatttcaaaatatgtgctacgtcgccttgtctatggccgtgcgagcggcccatatgcttgggttacattgtgaaccgtctagtgacctccctgtcgctactcaagaaatgcgcagacgtctttggtggactttatatgcttttgagagcaaaacatgcatgaaactgggtcgtccgttctatgcgaatgtttattcgacctcatgcagtctaccagcgcatgatcatcttgctgccagccaagcgggatctgacttcgcccttcttgacgagaatactacatggctcacatacaccatttacaattccaagctactactagcggcacgcgaaacgcacactgccttttacgacaaatatccagatatttttaatgaaacaaatggagatctgatctataacgacccggaagcattggagaggtacgccgaattcctaacggttgctttgaagcctatgaatgtctgggtagattcggtaccgaatgccctgaggactatgcgcaaagggaacggcaaatcgttgtcaaccgaacaatctcgatttcccttggtgattgaacaatttgcacccctttggttacaacgccagcgtttgctcctcgaaattctctatcataatatcgcgataaatctctatcgacccttcatttcattcccttcggtcgttacaaattattcgccattgggaaatatggctcaagcgcacgctgcgtcggccgcacagcacggtgtaatattaacacaaatcatgcatcaggctgtgatagagaagcctgagctgcttgccggatttcatgaagcattccagtggcagtggaatgctgccctagctcttgccggctatctattcgcacatcctaacagtagtatctcgccatctgttcgcgcagctattgatcttgcaaacgtcgtattcgaggacttcggacggagttttggcacatgttatagcgctacaagcgtaatgaatagtttggcggccaaaattgatttcctagcggcattcctacgtaacaacgaagcccaagcgcaaccatcatccttgccaagcgccgatgcaccagctacagttcccgaagcgcagcctgtgagtcaggttcaaaacgaactctttgccaatggaatcacattgccacaagatatggcaactggcccaatggatttagcgtactctgtcgacaatgcgggtgatttagacatgctatggccgccgattggcaatatgtctgatcaatactggtatctgaaccagccgtcgaacatgaatggcatgaatgggcaatttgcgggatga

SEQ ID NO: 7399 - protein, 793 aa, Muscodor strobelii
  misc_feature: SGI Peptide ID NO. 562229
  misc_feature (46)..(83): Pfam Id: PF00172 Pfam Desc: Fungal Zn(2)-Cys(6) binuclear cluster domain
  misc_feature (345)..(439): Pfam Id: PF04082 Pfam Desc: Fungal specific transcription factor domain
  misc_feature (345)..(422): Pfam Id: PF04082 Pfam Desc: Fungal specific transcription factor domain
  misc_feature (10)..(780): NCBI GI: 261192695 Blast Desc: fungal specific transcription factor domain-containing protein [Ajellomyces dermatitidis SLH14081] gi|239589236|gb|EEQ71879.1| fungal specific transcription factor
  misc_feature (36)..(780): NCBI GI: 154280669 Blast Desc: conserved [Ajellomyces capsulatus NAm1] gi|150411326|gb|EDN06714.1| conserved [Ajellomyces capsulatus NAm1]
  misc_feature (38)..(780): NCBI GI: 226287663 Blast Desc: fungal specific transcription factor domain-containing protein [Paracoccidioides brasiliensis Pb18]
  misc_feature (36)..(780): NCBI GI: 240273333 Blast Desc: fungal specific transcription factor [Ajellomyces capsulatus H143]
  misc_feature (90)..(780): NCBI GI: 239610229 Blast Desc: fungal specific transcription factor domain-containing protein [Ajellomyces dermatitidis ER-3]
  misc_feature (38)..(701): NCBI GI: 238845984 Blast Desc: fungal specific transcription factor domain-containing protein [Microsporum canis CBS 113480]
  misc_feature (43)..(771): NCBI GI: 156065443 Blast Desc: SS1G_00732 [Sclerotinia sclerotiorum 1980] gi|154691591|gb|EDN91329.1| SS1G_00732 [Sclerotinia sclerotiorum 1980]
  misc_feature (80)..(780): NCBI GI: 225558092 Blast Desc: fungal specific transcription factor domain-containing protein [Ajellomyces capsulatus G186AR]
  misc_feature (28)..(756): NCBI GI: 242783604 Blast Desc: conserved [Talaromyces stipitatus ATCC 10500] gi|218720367|gb|EED19786.1| conserved [Talaromyces stipitatus ATCC 10500]
  misc_feature (28)..(780): NCBI GI: 226279505 Blast Desc: fungal specific transcription factor domain-containing protein [Paracoccidioides brasiliensis Pb01]
  misc_feature: Useful for introducing or modulating the production of volatile compounds
MFATFDGGKQEEHKADLKDENKSEASASNARSFDASIRPKRQQVARACDSCRMHRIKCDNSVPCKNCVSRGEQCINKSPGERRTLPQAYREIDRLKQKVKELEEQLAKERSTPRVASTPAGTQSIILTPPGSLDSVSTPDATCINPNVVKPQQVWGGILTKTGQSPQKTWYGPSSQFYYIYRMNKYISTVFEQLGPDDQIQLQSAAKTFATPDCTPADDVSRLDLKDAEQPVSNENFLTPSQEEYFLNLFWQSYHPILVILDESEFRQHYRSLLTKPGKPRKPSALVDIVIAVSMQVGMAVAKRNNPNVPTTRSAEVGRDDPSIAGRLYYRRCQRLLHNEQEAPTLMTVRGHILSAVYTCCAAFQNMCYVALSMAVRAAHMLGLHCEPSSDLPVATQEMRRRLWWTLYAFESKTCMKLGRPFYANVYSTSCSLPAHDHLAASQAGSDFALLDENTTWLTYTIYNSKLLLAARETHTAFYDKYPDIFNETNGDLIYNDPEALERYAEFLTVALKPMNVWVDSVPNALRTMRKGNGKSLSTEQSRFPLVIEQFAPLWLQRQRLLLEILYHNIAINLYRPFISFPSVVTNYSPLGNMAQAHAASAAQHGVILTQIMHQAVIEKPELLAGFHEAFQWQWNAALALAGYLFAHPNSSISPSVRAAIDLANVVFEDFGRSFGTCYSATSVMNSLAAKIDFLAAFLRNNEAQAQPSSLPSADAPATVPEAQPVSQVQNELFANGITLPQDMATGPMDLAYSVDNAGDLDMLWPPIGNMSDQYWYLNQPSNMNGMNGQFAG

SEQ ID NO: 7400 - DNA, 2920 bp, Muscodor strobelii
  misc_feature: SGI EST ID NO. CUFF.18520.4
  misc_feature: Variant of the nucleotide sequence at SEQ ID NO 7398
cctggatacgtaatcaacccactttggtcgctgaaacgcgccacttcatcaattcagcataatccttattctcataaatatcaagcgcaataagtctaggcgtattgtgtcaacatctaccaccctcggcgagtcaaactgagggcgacgaggggggcgcgctgaggtgtccataaatgcgggggcgtcacgcatagctacagccataatgttcgctacattcgatggcggaaagcaggaggaacacaaagcagacctcaaagatgagaacaaatctgaagcatcggcgtcaaatgctaggtcatttgatgcctcaataagaccgaagcggcagcaggtcgctcgcgcctgtgactcatgtcgaatgcaccgcataaaatgtgacaacagtgtgccttgcaaaaattgtgttagccgaggagagcaatgtatcaacaaaagcccaggtgaaaggcgtacacttcctcaagcgtatcgtgagatcgataggctaaagcaaaaggtcaaagagttggaggagcagcttgcaaaagagcgcagcactccgcgcgttgcctccacgccggcagggacacaatcaattatcttgacgcctcctggtagcctggactcagtctcgacaccagacgcaacttgcataaatccaaacgtggtaaagccacaacaagtatggggcggtattctcaccaaaactggacagtcaccgcaaaagacttggtacggaccgtcatctcaattctactacatttaccgtatgaacaagtacatctccacggtatttgaacaattaggtccagatgatcagatccaacttcaatctgccgccaaaacatttgccactccagactgtacccccgcggacgacgtgagcagattagatttgaaagatgctgaacagccagtatcgaacgaaaatttcttaactccatctcaagaggaatatttcctcaacctattttggcaatcgtaccaccctatattagtaattctcgatgaatccgagttcaggcaacattatcgatcactattgacgaaacctgggaagcctcgcaaaccgtccgctctagttgacattgtgatcgccgtgagcatgcaggtgggcatggctgtcgctaagcgtaacaatcccaatgtaccaacaacgagatctgccgaagtaggcagagatgatccaagcattgcgggaagactatattatcgtcgatgccagaggttgcttcataacgaacaagaagcgccaaccctgatgaccgtaagaggtcacattctctcagcagtttacacatgctgtgctgcatttcaaaatatgtgctacgtcgccttgtctatggccgtgcgagcggcccatatgcttgggttacattgtgaaccgtctagtgacctccctgtcgctactcaagaaatgcgcagacgtctttggtggactttatatgcttttgagagcaaaacatgcatgaaactgggtcgtccgttctatgcgaatgtttattcgacctcatgcagtctaccagcgcatgatcatcttgctgccagccaagcgggatctgacttcgcccttcttgacgagaatactacatggctcacatacaccatttacaattccaagctactactagcggcacgcgaaacgcacactgccttttacgacaaatatccagatatttttaatgaaacaaatggagatctgatctataacgacccggaagcattggagaggtacgccgaattcctaacggttgctttgaagcctatgaatgtctgggtagattcggtaccgaatgccctgaggactatgcgcaaagggaacggcaaatcgttgtcaaccgaacaatctcgatttcccttggtgattgaacaatttgcacccctttggttacaacgccagcgtttgctcctcgaaattctctatcataatatcgcgataaatctctatcgacccttcatttcattcccttcggtcgttacaaattattcgccattgggaaatatggctcaagcgcacgctgcgtcggccgcacagcacggtgtaatattaacacaaatcatgcatcaggctgtgatagagaagcctgagctgcttgccggatttcatgaagcattccagtggcagtggaatgctgccctagctcttgccggctatctattcgcacatcctaacagtagtatctcgccatctgttcgcgcagctattgatcttgcaaacgtcgtattcgaggacttcggacggagttttggcacatgttatagcgctacaagcgtaatgaatagtttggcggccaaaattgatttcctagcggcattcctacgtaacaacgaagcccaagcgcaaccatcatccttgccaagcgccgatgcaccagctacagttcccgaagcgcagcctgtgagtcaggttcaaaacgaactctttgccaatggaatcacattgccacaagatatggcaactggcccaatggatttagcgtactctgtcgacaatgcgggtgatttagacatgctatggccgccgattggcaatatgtctgatcaatactggtatctgaaccagccgtcgaacatgaatggcatgaatgggcaatttgcgggatgagatatttgctcctatatttgtatgtaatacggaaatctgggagtatgaatttgtccggggaatgggggtctcaatatttctttggcgtatcaggaaaatgatagtttcgtgaggagataggattcttgggctgcgtacataccgttactggatccaggaggcaaagaacacgtcaaaagataccaaagttgtatatctgtcaatctgtcaatattcacatctaaacaatttaccatattgctgcaagcgcattcttacttcgagttgagttttacagccccaggtgccccggtgtgaatggcaccgtgacctaaggatgggaagtatcac

SEQ ID NO: 7401 - DNA, 1176 bp, Muscodor strobelii
  misc_feature: SGI cDNA ID NO. 562230
  misc_feature: Encodes the peptide sequence at SEQ ID NO 7402
atgcaagtgttttccgcacctcgatcaaatgataaactcaacaagatgccaggcttgaccaaagcgcagaagaagcaggctcaagctgcagaggattcgttcaaccgtacatatgccgtacaatatggcgaggaaagatggcaaaattcgttgaacccggcgctcgcagccggcacacgctacgctgccctgatcaatggctttgcagccaatggtgcagatgaggtattcactcaggagcagattgcacgaatgcagaatatcgcatttccccacagcacatctgatccgaaatctctcatgtcctatcaatggtctgcattagaagacatcgaagcgacattccctcaaccccagaccgattcgtcaagcagtcttatgagccattggaaccttgatgctgcatcattgttagctgtcacagttatggggcccaagcccggcgataaagtacttgatctgtgcgcggcaccgggaggcaagagtgtcgcattagcacaatgcatacggccagagagctatgaccggacatcaccatcgttgggaggaggttgtctgcacagcaatgaagtaaacaatgggcgaaataagcgacttgctgccaacctgcagtcttaccttcccgaacctctgtttaaaagcggcgatgtgagggtattgaagttcgacggcaccgaagcgtttagcatacagagcttaccaatgggtcctggaggatatgacaaagttctgctcgatgctccatgttcgagcgagcgacatgtgattcatgcccacgtgaaagcgacgaaaagcgggagaattgcggatgaaatggcatcgtggcgctcaggtcagtcgaagaagatggcgaagacgcaggctgcccttctcatgacggcgctcaaggctgttcgggtcggtggacatgtcttgtatgccacttgttctctgagcaatgaagagaatgacggcgtcattgagaaaggggtagaattggttcaaaaagaacacaagaaattcgggatcaagtggaacttcgcaatacgcagcgctgaattggccgagaaaggactcgccgactgggctgaaccgacaaagcatggttggttggtgctaccagatcacccttctggtgggaaatggggaccgctgttcctcgccttgctggagaaggttgaatcgtcgtcatcttga

SEQ ID NO: 7402 - protein, 391 aa, Muscodor strobelii
  misc_feature: SGI Peptide ID NO. 562230
  misc_feature (76)..(384): Pfam Id: PF01189 Pfam Desc: NOL1/NOP2/sun family
  misc_feature (241)..(321): Pfam Id: PF01189 Pfam Desc: NOL1/NOP2/sun family
  misc_feature (133)..(167): Pfam Id: PF01189 Pfam Desc: NOL1/NOP2/sun family
  misc_feature (18)..(385): NCBI GI: 164662793 Blast Desc: MGL_0293 [Malassezia globosa CBS 7966] gi|159106421|gb|EDP45304.1| MGL_0293 [Malassezia globosa CBS 7966]
  misc_feature (14)..(386): NCBI GI: 50729750 Blast Desc: [Gallus gallus]
  misc_feature (20)..(386): NCBI GI: 157821259 Blast Desc: NOL1/NOP2/Sun domain family, member 4 [Rattus norvegicus] gi|149035614|gb|EDL90295.1| NOL1/NOP2/Sun domain family, member 4 () [Rattus norvegicus]
  misc_feature (21)..(389): NCBI GI: 224044197 Blast Desc: : NOL1/NOP2/Sun domain family, member 3 [Taeniopygia guttata]
  misc_feature (27)..(386): NCBI GI: 260804499 Blast Desc: BRAFLDRAFT_279290 [Branchiostoma floridae] gi|229282388|gb|EEN53137.1| BRAFLDRAFT_279290 [Branchiostoma floridae]
  misc_feature (30)..(331): NCBI GI: 194665826 Blast Desc: : NOL1/NOP2/Sun domain family, member 4 [Bos taurus] gi|148887182|sp|Q0V8R7.2|NSUN4_BOVIN RecName: Full= methyltransferase NSUN4; AltName: Full=NOL1/NOP2/Sun domain 4
  misc_feature (30)..(331): NCBI GI: 110331769 Blast Desc: NOL1/NOP2/Sun domain family 4 protein [Bos taurus]
  misc_feature (20)..(386): NCBI GI: 148698677 Blast Desc: NOL1/NOP2/Sun domain family, member 4 [Mus musculus]
  misc_feature (20)..(386): NCBI GI: 21312358 Blast Desc: NOL1/NOP2/Sun domain family, member 4 [Mus musculus] gi|81904498|sp|Q9CZ57.1|NSUN4_MOUSE RecName: Full= methyltransferase NSUN4; AltName: Full=NOL1/NOP2/Sun domain 4; 4
  misc_feature (115)..(385): NCBI GI: 167534415 Blast Desc: [Monosiga brevicollis MX1] gi|163772563|gb|EDQ86213.1| [Monosiga brevicollis MX1]
  misc_feature (133)..(360): SWISSPROT Homolog: EC 2.1.1.29 tRNA (cytosine-5-)-methyltransferase
MQVFSAPRSNDKLNKMPGLTKAQKKQAQAAEDSFNRTYAVQYGEERWQNSLNPALAAGTRYAALINGFAANGADEVFTQEQIARMQNIAFPHSTSDPKSLMSYQWSALEDIEATFPQPQTDSSSSLMSHWNLDAASLLAVTVMGPKPGDKVLDLCAAPGGKSVALAQCIRPESYDRTSPSLGGGCLHSNEVNNGRNKRLAANLQSYLPEPLFKSGDVRVLKFDGTEAFSIQSLPMGPGGYDKVLLDAPCSSERHVIHAHVKATKSGRIADEMASWRSGQSKKMAKTQAALLMTALKAVRVGGHVLYATCSLSNEENDGVIEKGVELVQKEHKKFGIKWNFAIRSAELAEKGLADWAEPTKHGWLVLPDHPSGGKWGPLFLALLEKVESSSS

SEQ ID NO: 7403 - DNA, 3522 bp, Muscodor strobelii
  misc_feature: SGI EST ID NO. CUFF.18363.0
  misc_feature: Variant of the nucleotide sequence at SEQ ID NO 7401
gcgcagaagaagcaggctcaagctgcagaggattcgttcaaccgtacatatgccgtacaatatggcgaggaaagatggcaaaattcgttgaacccggcgctcgcagccggcacacgctacgctgccctgatcaatggctttgcagccaatggtgcagatgaggtattcactcaggagcagattgcacgaatgcagaatatcgcatttccccacagcacatctgatccgaaatctctcatgtcctatcaatggtctgcattagaagacatcgaagcgacattccctcaaccccagaccgattcgtcaagcagtcttatgagccattggaaccttgatgctgcatcattgttagctgtcacagttatggggcccaagcccggcgataaagtacttgatctgtgcgcggcaccgggaggcaagagtgtcgcattagcacaatgcatacggccagagagctatgaccggacatcaccatcgttgggaggaggttgtctgcacagcaatgaagtaaacaatgggcgaaataagcgacttgctgccaacctgcagtcttaccttcccgaacctctgtttaaaagcggcgatgtgagggtattgaagttcgacggcaccgaagcgtttagcatacagagcttaccaatgggtcctggaggatatgacaaagttctgctcgatgctccatgttcgagcgagcgacatgtgattcatgcccacgtgaaagcgacgaaaagcgggagaattgcggatgaaatggcatcgtggcgctcaggtcagtcgaagaagatggcgaagacgcaggctgcccttctcatgacggcgctcaaggctgttcgggtcggtggacatgtcttgtatgccacttgttctctgagcaatgaagagaatgacggcgtcattgagaaaggggtagaattggttcaaaaagaacacaagaaattcgggatcaagtggaacttcgcaatacgcagcgctgaattggccgagaaaggactcgccgactgggctgaaccgacaaagcatggttggttggtgctaccagatcacccttctggtgggaaatggggaccgctgttcctcgccttgctggagaaggttgaatcgtcgtcatcttgaggcttgaaactcacctgcgaacaagccatcgttcataacgtctcaaggcataatctcagtaactcatcaacgagagttattctcgatttctgttcgtgttgctccacatcaacgtgtgcgagcgttgacgcgcgctgcagaagaccatacgctgcggtcgctctagatgacctgcatcttccgcaatccacattacggattgccttgactttggcaacgcgatcagaatgcaatcacatggcatataaactcacttcgccttaccttgagccctctcgacacgcttttcgacatccgcacgcgacagggaatccgcaaaaccaaggtcgcgttttgcgagggcgtctaaaactgcccggtcattgacaagattgaaagaacacattctgtcacgctaaaattatgccaggttgaatgactgaagtccagggggaaaaataaacattcaaatgcttcgagatgcaaggtgaaaaaaatgttcactacgaactttttttttttcgagccgcggattcgaacaggtattctaaagatacattctagtattaaaacacaccattcgaccatccaattagataagcccactacgggtgatgactggccatgttattgggattgatacggtcttgtgtttctggggtggttgtcgtgggaagttgggtggttgctggggatcacctaattgcggcgagcaacagctcgaaaacgcgacacgcgccgattgtctgcacctaacgtaggtgatctgagatcatgaagatgaggatctagtgcattttagatcggttgaccgggtaaaatgtagagatgcgatgaacggcgacattatacatgtgcagaaaatgaaatgactgtcaagttcaccatgtatgctctcacatgaaattcaatacgtagctaaagacatgctgcagcagacgaccgaagcactagaatcttacgttgcatgggctagacattgacaacgaccttcttaactcagatatttgatattgcctcgccaacactagagctagagaccagcggctgccgcattgcatatgcaggttgggggccgcgacccggtgtgctgggccataataagcacatttgatatgcttcaaacacaatgcgtctctgcgtcggaattttcataaactccttcaggttgagggacttaatataagtcaagtagaagactcataactcaacacattttcggaacaaatcgttctcctcagtcaaccatactgaaacaatgcctctcgaccctggaagcacatcaatcccagaattccacgccaaacttcaaacctcaaaacgcatcatcgcgctttgcggcgccggactttccgcctcatccggcatcccaacataccggacaagtcaaggtttatggaccaacgaacgagccgacttcttagcctctgcagaagcttttgagaaagagcccgatcaagcctggttgttcttctcacatcgaagacatgaagtgctcaaagctcaacccaatgcggggcatttcgcgcttgtggagttggcaaggaagaatggggagtttctgtgtttgacgcagaatgttgatggtctttcgcagagagccggtcatccgacggagcagattcgtactctccatggctctcttatggatctgaagtgtaatgatccgaagtgcgattacatacaacgcaacaacctggataatccgctctgtcccgcgctcgaatctgcatcgcgggatttagaaggaggtctcatggctatgccgttgatacagtcagatcatgagataacgcgcattccggaagaagaattactacaatgtccgaagtgcgggacactgcttcgacctggtgttgtgcgatttagggaggacctcgatgggaatatgttagatgagattagggagtggatcgatgagaagaaggtcgatttgatgttggttattggcacaggagcggaagtttggcctgctgctggattcgttgtgcaggcgaggaaacagggcgcggcgttggcggtggtcaatatgtctacggagaacttgggcagtgcgagggatttgaaaatgggcgatttttactttattggtgatgcgactgagcttttgcctaggttgttggagcctattttacagaagtctgaggagtagatgtgcttgggaaatacacagctaaatacttggaaatcaagccaacgacgaaatctccggcgttgcggtacgtatatggtctagagcatgttccgctggctagcaacccacatggccgcaaaggaagccgtaagcatgacagagcagatagagaatactctatgtgtgttgtcgttgtcccttgccatgagcagagataccactacgaagatgttgagtgggatacgcactgaaatttctcggttagtattcatcagctcagcaatacaacactctct

SEQ ID NO: 7404 - DNA, 894 bp, Muscodor strobelii
  misc_feature: SGI cDNA ID NO. 562231
  misc_feature: Elevated expression when VOC is produced
  misc_feature: Encodes the peptide sequence at SEQ ID NO 7405
atgcctctcgaccctggaagcacatcaatcccagaattccacgccaaacttcaaacctcaaaacgcatcatcgcgctttgcggcgccggactttccgcctcatccggcatcccaacataccggacaagtcaaggtttatggaccaacgaacgagccgacttcttagcctctgcagaagcttttgagaaagagcccgatcaagcctggttgttcttctcacatcgaagacatgaagtgctcaaagctcaacccaatgcggggcatttcgcgcttgtggagttggcaaggaagaatggggagtttctgtgtttgacgcagaatgttgatggtctttcgcagagagccggtcatccgacggagcagattcgtactctccatggctctcttatggatctgaagtgtaatgatccgaagtgcgattacatacaacgcaacaacctggataatccgctctgtcccgcgctcgaatctgcatcgcgggatttagaaggaggtctcatggctatgccgttgatacagtcagatcatgagataacgcgcattccggaagaagaattactacaatgtccgaagtgcgggacactgcttcgacctggtgttgtgcgatttagggaggacctcgatgggaatatgttagatgagattagggagtggatcgatgagaagaaggtcgatttgatgttggttattggcacaggagcggaagtttggcctgctgctggattcgttgtgcaggcgaggaaacagggcgcggcgttggcggtggtcaatatgtctacggagaacttgggcagtgcgagggatttgaaaatgggcgatttttactttattggtgatgcgactgagcttttgcctaggttgttggagcctattttacagaagtctgaggagtag

SEQ ID NO: 7405 - protein, 297 aa, Muscodor strobelii
  misc_feature: SGI Peptide ID NO. 562231
  misc_feature (28)..(238): Pfam Id: PF02146 Pfam Desc: Sir2 family
  misc_feature (5)..(296): NCBI GI: 256727712 Blast Desc: NECHADRAFT_105923 [Nectria haematococca mpVI 77-13-4]
  misc_feature (13)..(291): NCBI GI: 46134931 Blast Desc: FG09314.1 [Gibberella zeae PH-1]
  misc_feature (7)..(294): NCBI GI: 156060299 Blast Desc: SS1G_02288 [Sclerotinia sclerotiorum 1980] gi|154699696|gb|EDN99434.1| SS1G_02288 [Sclerotinia sclerotiorum 1980]
  misc_feature (1)..(297): NCBI GI: 154292636 Blast Desc: BC1G_14644 [Botryotinia fuckeliana B05.10] gi|150845858|gb|EDN21051.1| BC1G_14644 [Botryotinia fuckeliana B05.10]
  misc_feature (10)..(292): NCBI GI: 171682306 Blast Desc: protein product [Podospora anserina] gi|170941112|emb|CAP66762.1| protein product [Podospora anserina]
  misc_feature (13)..(292): NCBI GI: 121699526 Blast Desc: SIR2 family histone deacetylase, [Aspergillus clavatus NRRL 1] gi|119396191|gb|EAW06623.1| SIR2 family histone deacetylase, [Aspergillus clavatus NRRL 1]
  misc_feature (7)..(291): NCBI GI: 67522651 Blast Desc: AN1782.2 [Aspergillus nidulans FGSC A4] gi|40744802|gb|EAA63958.1| AN1782.2 [Aspergillus nidulans FGSC A4] gi|259487127|tpe|CBF85551.1| TPA: SIR2 family histone FGSC
  misc_feature (12)..(292): NCBI GI: 115400545 Blast Desc: conserved [Aspergillus terreus NIH2624] gi|114191527|gb|EAU33227.1| conserved [Aspergillus terreus NIH2624]
  misc_feature (1)..(292): NCBI GI: 242764403 Blast Desc: SIR2 family histone deacetylase, [Talaromyces stipitatus ATCC 10500] gi|218723961|gb|EED23378.1| SIR2 family histone deacetylase, [Talaromyces stipitatus ATCC 10500]
  misc_feature (1)..(292): NCBI GI: 212529120 Blast Desc: SIR2 family histone deacetylase, [Penicillium marneffei ATCC 18224] gi|210074115|gb|EEA28202.1| SIR2 family histone deacetylase, [Penicillium marneffei ATCC 18224]
  misc_feature: Useful for introducing or modulating the production of volatile compounds
MPLDPGSTSIPEFHAKLQTSKRIIALCGAGLSASSGIPTYRTSQGLWTNERADFLASAEAFEKEPDQAWLFFSHRRHEVLKAQPNAGHFALVELARKNGEFLCLTQNVDGLSQRAGHPTEQIRTLHGSLMDLKCNDPKCDYIQRNNLDNPLCPALESASRDLEGGLMAMPLIQSDHEITRIPEEELLQCPKCGTLLRPGVVRFREDLDGNMLDEIREWIDEKKVDLMLVIGTGAEVWPAAGFVVQARKQGAALAVVNMSTENLGSARDLKMGDFYFIGDATELLPRLLEPILQKSEE

SEQ ID NO: 7406 - DNA, 3522 bp, Muscodor strobelii; identical to SEQ ID NO: 7403
  misc_feature: SGI EST ID NO. CUFF.18363.0
  misc_feature: Variant of the nucleotide sequence at SEQ ID NO 7404

SEQ ID NO: 7407 - DNA, 1314 bp, Muscodor strobelii
  misc_feature: SGI cDNA ID NO. 562232
  misc_feature: Encodes the peptide sequence at SEQ ID NO 7408
atgactttctacaaaataagtctcgccggcctcgttgttctctgcggagctctgctcgtccgccagccaactcgaagactagaactcgagcgtcgaggtcgttcgcgaaagcaagtttcccgggatgacgggcatcctgagttgcaatggtttcaagcctacggccttgccatggcagcagattggatccaaggcccatatctcttttccctttacagagacgagtataatctaacacccggccaagtctcatcactcttcattaccgacttcctctccaccgctctgagcgcctacctcatgggcgccctcgcagataaatacgggcgaaagctatactgcatgatatactgtctcctctacaccttatcctgcttcatgaccattgtccctatcacacctctcctcttccttgggcgaattctcggcggcatcagcacgacgattctgttcacttcttttgagagttggatggtgaccaacttccgcgaacagaagctggccgaggatggatgtgatctttcaagaacatttgcaactaacagcgttgtcaatggccttgcagctatcctgagcggcgtgacgggtcagatcttggtcgaggtcactggttcaaagaaagccccattcatactagctgttgtgttgctttggtcttcgttacagatcatctggtctcgatggactgagaactacggcgccgaggcaccctccatatcagacaatcccatagagcgcaggtccatatcagcaatattcagacagccagccatccttaccctggcattcgcatcgacaatgttcgaaggttccatgtatctcttcgtcttctactgggtgcctactatgacctccgtccagaaaacgacgggcgatctgccgtacggggtgatcttctcgtgtttcatggccgctaccatggctgcagcgttatcttgcaacataatcctcgataggggaacgattaagcatgcccagattctagccggtgtcttactcattgcagatctatgctttgtgggcctcgccactccgaggaccgaaggcgtagtcttctggttattctgtttatttgaggcgtgtgttggcatgtactggccttgtattgggtacttgaaaggtcggcatgtcgatgacgatgttcgtacgaaggtgtatagcatcatgcgtatcccactcaacatcttcgtagtggtatctctgctcatggcaagggacaacgacaacacacatagagtattctctatctgctctgtcatgcttacggcttcctttgcggccatgtgggttgctagccagcggaacatgctctag

SEQ ID NO: 7408 - protein, 437 aa, Muscodor strobelii
  misc_feature: SGI Peptide ID NO. 562232
  misc_feature (3)..(358): Pfam Id: PF05631 Pfam Desc: Domain of function (DUF791)
  misc_feature (50)..(401): Pfam Id: PF07690 Pfam Desc: Major Facilitator Superfamily
  misc_feature (54)..(159): Pfam Id: PF05631 Pfam Desc: Domain of function (DUF791)
  misc_feature (185)..(307): Pfam Id: PF05631 Pfam Desc: Domain of function (DUF791)
  misc_feature (1)..(423): NCBI GI: 154301357 Blast Desc: BC1G_10348 [Botryotinia fuckeliana B05.10] gi|150856088|gb|EDN31280.1| BC1G_10348 [Botryotinia fuckeliana B05.10]
  misc_feature (1)..(423): NCBI GI: 156060259 Blast Desc: SS1G_02268 [Sclerotinia sclerotiorum 1980] gi|154699676|gb|EDN99414.1| SS1G_02268 [Sclerotinia sclerotiorum 1980]
  misc_feature (1)..(421): NCBI GI: 189200815 Blast Desc: major facilitator superfamily domain containing protein 5 [Pyrenophora tritici-repentis Pt-1C-BFP] gi|187983843|gb|EDU49331.1| major facilitator superfamily domain
  misc_feature (1)..(425): NCBI GI: 261353103 Blast Desc: major facilitator superfamily domain-containing protein [Verticillium albo-atrum VaMs.102]
  misc_feature (49)..(402): NCBI GI: 169850740 Blast Desc: CC1G_07433 [Coprinopsis cinerea okayama7#130] gi|116506813|gb|EAU89708.1| CC1G_07433 [Coprinopsis cinerea okayama7#130]
  misc_feature (49)..(424): NCBI GI: 170108676 Blast Desc: [Laccaria bicolor S238N-H82] gi|164639422|gb|EDR03693.1| [Laccaria bicolor S238N-H82]
  misc_feature (4)..(424): NCBI GI: 119182447 Blast Desc: CIMG_06249 [Coccidioides immitis RS] gi|240109276|gb|EER27445.1| Major Facilitator Superfamily protein [Coccidioides posadasii C735 delta SOWgp]
  misc_feature (36)..(408): NCBI GI: 238845044 Blast Desc: major facilitator superfamily domain-containing protein 5 [Microsporum canis CBS 113480]
  misc_feature (30)..(421): NCBI GI: 258571621 Blast Desc: [Uncinocarpus reesii 1704] gi|237904884|gb|EEP79285.1| [Uncinocarpus reesii 1704]
  misc_feature (27)..(421): NCBI GI: 18417054 Blast Desc: [Arabidopsis thaliana] gi|13272473|gb|AAK17175.1|AF325107_1 [Arabidopsis thaliana] gi|16930439|gb|AAL31905.1|AF419573_1 AT4g27720/T29A15_210
MTFYKISLAGLVVLCGALLVRQPTRRLELERRGRSRKQVSRDDGHPELQWFQAYGLAMAADWIQGPYLFSLYRDEYNLTPGQVSSLFITDFLSTALSAYLMGALADKYGRKLYCMIYCLLYTLSCFMTIVPITPLLFLGRILGGISTTILFTSFESWMVTNFREQKLAEDGCDLSRTFATNSVVNGLAAILSGVTGQILVEVTGSKKAPFILAVVLLWSSLQIIWSRWTENYGAEAPSISDNPIERRSISAIFRQPAILTLAFASTMFEGSMYLFVFYWVPTMTSVQKTTGDLPYGVIFSCFMAATMAAALSCNIILDRGTIKHAQILAGVLLIADLCFVGLATPRTEGVVFWLFCLFEACVGMYWPCIGYLKGRHVDDDVRTKVYSIMRIPLNIFVVVSLLMARDNDNTHRVFSICSVMLTASFAAMWVASQRNML

SEQ ID NO: 7409 - DNA, 5217 bp, Muscodor strobelii
  misc_feature: SGI EST ID NO. CUFF.18364.1
  misc_feature: Variant of the nucleotide sequence at SEQ ID NO 7407
tgtcgatctgggtataaccatgttgtcatcttgcaaggcaatgttgtgatgctttttctatctaagcgaggccgctccaacgactttcttttcctcgactttcgaatcaacggtgaattgaacgcgaggaagaaatttctagcgagaaaataacgtaaatcgactcattttgggatttccccaatgccaattttgttcattacttccatattatccaatttgccaaatgcaaacagtatcctgcctggattcggagtatgccattacgtagtacctcatctctgtgcgcctacagctaccacccgggtaataacaattgaccaagtgtcaaaggcctgtttgtttcaataactgagctggttataatctgagatcgtgcaaaatggccacgtcgtgtcttccgtctctgaaatgtccagcacctgcgatatcttgtgttgaaatactggtgatcttgtgaaaataactgtccaaaatcttcaattgcttttttctctgctaatttgatcatcatgactttctacaaaataagtctcgccggcctcgttgttctctgcggagctctgctcgtccgccagccaactcgaagactagaactcgagcgtcgaggtcgttcgcgaaagcaagtttcccgggatgacgggcatcctgagttgcaatggtttcaagcctacggccttgccatggcagcagattggatccaaggcccatatctcttttccctttacagagacgagtataatctaacacccggccaagtctcatcactcttcattaccgacttcctctccaccgctctgagcgcctacctcatgggcgccctcgcagataaatacgggcgaaagctatactgcatgatatactgtctcctctacaccttatcctgcttcatgaccattgtccctatcacacctctcctcttccttgggcgaattctcggcggcatcagcacgacgattctgttcacttcttttgagagttggatggtgaccaacttccgcgaacagaagctggccgaggatggatgtgatctttcaagaacatttgcaactaacagcgttgtcaatggccttgcagctatcctgagcggcgtgacgggtcagatcttggtcgaggtcactggttcaaagaaagccccattcatactagctgttgtgttgctttggtcttcgttacagatcatctggtctcgatggactgagaactacggcgccgaggcaccctccatatcagacaatcccatagagcgcaggtccatatcagcaatattcagacagccagccatccttaccctggcattcgcatcgacaatgttcgaaggttccatgtatctcttcgtcttctactgggtgcctactatgacctccgtccagaaaacgacgggcgatctgccgtacggggtgatcttctcgtgtttcatggccgctaccatggctgcagcgttatcttgcaacataatcctcgataggggaacgattaagcatgcccagattctagccggtgtcttactcattgcagatctatgctttgtgggcctcgccactccgaggaccgaaggcgtagtcttctggttattctgtttatttgaggcgtgtgttggcatgtactggccttgtattgggtacttgaaaggtcggcatgtcgatgacgatgttcgtacgaaggtgtatagcatcatgcgtatcccactcaacatcttcgtagtggtatctctgctcatggcaagggacaacgacaacacacatagagtattctctatctgctctgtcatgcttacggcttcctttgcggccatgtgggttgctagccagcggaacatgctctagaccatatacgtaccgcaacgccggagatttcgtcgttggcttgatttccaagtatttagctgtgtatttcccaagcacatctactcctcagacttctgtaaaataggctccaacaacctaggcaaaagctcagtcgcatcaccaataaagtaaaaatcgcccattttcaaatccctcgcactgcccaagttctccgtagacatattgaccaccgccaacgccgcgccctgtttcctcgcctgcacaacgaatccagcagcaggccaaacttccgctcctgtgccaataaccaacatcaaatcgaccttcttctcatcgatccactccctaatctcatctaacatattcccatcgaggtcctccctaaatcgcacaacaccaggtcgaagcagtgtcccgcacttcggacattgtagtaattcttcttccggaatgcgcgttatctcatgatctgactgtatcaacggcatagccatgagacctccttctaaatcccgcgatgcagattcgagcgcgggacagagcggattatccaggttgttgcgttgtatgtaatcgcacttcggatcattacacttcagatccataagagagccatggagagtacgaatctgctccgtcggatgaccggctctctgcgaaagacctatgtctctcatcatcaatcttcaccaattattccattacgcaatcaaacgcaatacaacactcaccatcaacattctgcgtcaaacacagaaactccccattcttccttgccaactccacaagcgcgaaatgccccgcattgggttgagctttgagcacttcatgtcttcgatgtgagaagaacaaccaggcttgatcgggctctttctcaaaagcttctgcagaggctaagaagtcggctcgttcgttggtccataaaccttgacttgtccggtatgttgggatgccggatgaggcggaaagtccggcgccgcaaagcgcgatgatgcgttttgaggtttgaagtttggcgtggaattctgggattgatgtgcttccagggtcgagaggcattgtttcagtatggttgactgaggagaacgatttgttccgaaaatgtgttgagttatgagtcttctacttgacttatattaagtccctcaacctgaaggagtttatgaaaattccgacgcagagacgcattgtgtttgaagcatatcaaatgtgcttattatggcccagcacaccgggtcgcggcccccaacctgcatatgcaatgcggcagccgctggtctctagctctagtgttggcgaggcaatatcaaatatctgagttaagaaggtcgttgtcaatgtctagcccatgcaacgtaagattctagtgcttcggtcgtctgctgcagcatgtctttagctacgtattgaatttcatgtgagagcatacatggtgaacttgacagtcatttcattttctgcacatgtataatgtcgccgttcatcgcatctctacattttacccggtcaaccgatctaaaatgcactagatcctcatcttcatgatctcagatcacctacgttaggtgcagacaatcggcgcgtgtcgcgttttcgagctgttgctcgccgcaattaggtgatccccagcaaccacccaacttcccacgacaaccaccccagaaacacaagaccgtatcaatcccaataacatggccagtcatcacccgtagtgggcttatctaattggatggtcgaatggtgtgttttaatactagaatgtatctttagaatacctgttcgaatccgcggctcgaaaaaaaaaaagttcgtagtgaacatttttttcaccttgcatctcgaagcatttgaatgtttatttttccccctggacttcagtcattcaacctggcataattttagcgtgacagaatgtgttctttcaatcttgtcaatgaccgggcagttttagacgccctcgcaaaacgcgaccttggttttgcggattccctgtcgcgtgcggatgtcgaaaagcgtgtcgagagggctcaaggtaaggcgaagtgagtttatatgccatgtgattgcattctgatcgcgttgccaaagtcaaggcaatccgtaatgtggattgcggaagatgcaggtcatctagagcgaccgcagcgtatggtcttctgcagcgcgcgtcaacgctcgcacacgttgatgtggagcaacacgaacagaaatcgagaataactctcgttgatgagttactgagattatgccttgagacgttatgaacgatggcttgttcgcaggtgagtttcaagcctcaagatgacgacgattcaaccttctccagcaaggcgaggaacagcggtccccatttcccaccagaagggtgatctggtagcaccaaccaaccatgctttgtcggttcagcccagtcggcgagtcctttctcggccaattcagcgctgcgtattgcgaagttccacttgatcccgaatttcttgtgttctttttgaaccaattctacccctttctcaatgacgccgtcattctcttcattgctcagagaacaagtggcatacaagacatgtccaccgacccgaacagccttgagcgccgtcatgagaagggcagcctgcgtcttcgccatcttcttcgactgacctgagcgccacgatgccatttcatccgcaattctcccgcttttcgtcgctttcacgtgggcatgaatcacatgtcgctcgctcgaacatggagcatcgagcagaactttgtcatatcctccaggacccattggtaagctctgtatgctaaacgcttcggtgccgtcgaacttcaataccctcacatcgccgcttttaaacagaggttcgggaaggtaagactgcaggttggcagcaagtcgcttatttcgcccattgtttacttcattgctgtgcagacaacctcctcccaacgatggtgatgtccggtcatagctctctggccgtatgcattgtgctaatgcgacactcttgcctcccggtgccgcgcacagatcaagtactttatcgccgggcttgggccccataactgtgacagctaacaatgatgcagcatcaaggttccaatggctcataagactgcttgacgaatcggtctggggttgagggaatgtcgcttcgatgtcttctaatgcagaccattgataggacatgagagatttcggatcagatgtgctgtggggaaatgcgatattctgcattcgtgcaatctgctcctgagtgaatacctcatctgcaccattggctgcaaagccattgatcagggcagcgtagcgtgtgccggctgcgagcgccgggttcaacgaattttgccatctttcctcgccatattgtacggcatatgtacggttgaacgaatcctctgcagcttgagcctgcttcttctgcgc

SEQ ID NO: 7410 - DNA, 1830 bp, Muscodor strobelii
  misc_feature: SGI cDNA ID NO. 562233
  misc_feature: Reduced expression when VOC is produced
  misc_feature: Encodes the peptide sequence at SEQ ID NO 7411
atggagagggacaacagcacctcccaatcgccccaagcaccaccacaaccgcagcaccaatcgcaggctctgtcgcgctcacattcccagctgtcgtccaaacagcagcgcccgtccatcggtcgccacacgagcgactcgcaggtctcgcagacgagcagcgacacgcactcgcaccacggccgcccgaaacctcagaaacatgtcgtaggaggcggcgccggtcgctctcacgccctcggccacgctcacgctcgtgtgccctcctccaaggctctgcacagacagcacagcactcagtcttccgcaaagctcaacaaccggcgcgcgccctctcccgaccctgaccccaacgtagatccttaccgtctccccatgctcaataacaacaccggcaacaacgcaagcaactctgctcaccgccgtgtcaagtcggatctgcgtctcaccagtcatgacgccagcaaccagcagcagtctttccaccccaatctagccaccaagcgcaaccgttcccacgtcgaaatcggcaagcggccaaagtctaccgccaacatcaagcgctcctcttcccacaaggaggtcaacaagctcaagggccagaagacccaggtgcacttcgatctgggcaacgacgggaacgacgacgaatgggtggatgctagtgcctccgcctcgccctacctatccaggcgtggctctgttatgagcggtggccagtcgccggcgaagcccagcgaggacgagaaagacaacgagaacgacaaggacgaacacgataacgaggacaagagacgaccacatacccctcctaattttaataccgatcctcgcgactcttcccccagccgcgagaccgcccagcacaaccaccgcatcacctcccgcttgttacagcgcactccctcccacggtgctcctccccagatgtctaccgaaaccgctgccgtaccgccgccttcgggctcgcctacgttaggagccaggagcggccctcccagtcttttcggcacccccaagacatctgccctcggcgcaagcggtcctgaagaactgacatctcgctttgtcaacggcgacggtggctcgggccctggctccaatagtaataggaacagcgactacttcgcttctgggcacatccccgcaaacctaagtcgcgccgaggatctacgacgcccgcgctcgctcatcgacctcagccagaaccgcagagagtcgacaagcgacgacgaagatggcactgctctagcgccccggtccaggagatcgcgacagcctgccagccagtcgcgaacacagcagaaactcaatctccaacgtgcaagctcctccatggaaccaacacaggctagagcaggagcaggcgggcccggtgttagtctgttagtcggtagtagcgactacgaagaccgcgacccaagaatcggaaagctcctcgagcgaacaggcatggagtatcttgtagtaaggcgatatcagaatcccatcgcacggtctatagcacggctggcgcatcttccaggagcgcacaagaaccagcgcataccgaagcagaatggcgcaaacggaacacattccaaagcaccgtctgaaagtggacggctggggttgagccagagtatgtcggatgttacgcggtcaaggcctgttacgcctgggcgaacgacgagcattaggacggccggcgctaggtcgagttatgagggggatgaggatcgacaacttgagcgtgaggaggaggggaatgggaatggtgatgagatcgcggcactgctgaggaatctttgggataagaataatttagatttgagtgctagccaggactag

SEQ ID NO: 7411 - protein, 609 aa, Muscodor strobelii
  misc_feature: SGI Peptide ID NO. 562233
  misc_feature (36)..(609): NCBI GI: 46128013 Blast Desc: FG08384.1 [Gibberella zeae PH-1]
  misc_feature (80)..(609): NCBI GI: 256733447 Blast Desc: [Nectria haematococca mpVI 77-13-4]
  misc_feature (32)..(609): NCBI GI: 261360736 Blast Desc: conserved [Verticillium albo-atrum VaMs.102]
  misc_feature (62)..(607): NCBI GI: 116202111 Blast Desc: CHGG_08940 [Chaetomium globosum CBS 148.51] gi|88177458|gb|EAQ84926.1| CHGG_08940 [Chaetomium globosum CBS 148.51]
  misc_feature (36)..(609): NCBI GI: 171681894 Blast Desc: protein product [Podospora anserina] gi|170940906|emb|CAP66556.1| protein product [Podospora anserina]
  misc_feature (32)..(609): NCBI GI: 39954108 Blast Desc: MGG_08893 [Magnaporthe grisea 70-15] gi|145021163|gb|EDK05292.1| MGG_08893 [Magnaporthe grisea 70-15]
  misc_feature (11)..(599): NCBI GI: 154292648 Blast Desc: BC1G_14650 [Botryotinia fuckeliana B05.10] gi|150845864|gb|EDN21057.1| BC1G_14650 [Botryotinia fuckeliana B05.10]
  misc_feature (289)..(609): NCBI GI: 85097312 Blast Desc: NCU04795 [Neurospora crassa OR74A] gi|28921912|gb|EAA31185.1| [Neurospora crassa OR74A]
  misc_feature (39)..(599): NCBI GI: 156060287 Blast Desc: [Sclerotinia sclerotiorum 1980] gi|154699690|gb|EDN99428.1| [Sclerotinia sclerotiorum 1980]
  misc_feature (205)..(598): NCBI GI: 189201479 Blast Desc: conserved [Pyrenophora tritici-repentis Pt-1C-BFP] gi|187984175|gb|EDU49663.1| conserved [Pyrenophora tritici-repentis Pt-1C-BFP]
  misc_feature: Useful for introducing or modulating the production of volatile compounds
MERDNSTSQSPQAPPQPQHQSQALSRSHSQLSSKQQRPSIGRHTSDSQVSQTSSDTHSHHGRPKPQKHVVGGGAGRSHALGHAHARVPSSKALHRQHSTQSSAKLNNRRAPSPDPDPNVDPYRLPMLNNNTGNNASNSAHRRVKSDLRLTSHDASNQQQSFHPNLATKRNRSHVEIGKRPKSTANIKRSSSHKEVNKLKGQKTQVHFDLGNDGNDDEWVDASASASPYLSRRGSVMSGGQSPAKPSEDEKDNENDKDEHDNEDKRRPHTPPNFNTDPRDSSPSRETAQHNHRITSRLLQRTPSHGAPPQMSTETAAVPPPSGSPTLGARSGPPSLFGTPKTSALGASGPEELTSRFVNGDGGSGPGSNSNRNSDYFASGHIPANLSRAEDLRRPRSLIDLSQNRRESTSDDEDGTALAPRSRRSRQPASQSRTQQKLNLQRASSSMEPTQARAGAGGPGVSLLVGSSDYEDRDPRIGKLLERTGMEYLVVRRYQNPIARSIARLAHLPGAHKNQRIPKQNGANGTHSKAPSESGRLGLSQSMSDVTRSRPVTPGRTTSIRTAGARSSYEGDEDRQLEREEEGNGNGDEIAALLRNLWDKNNLDLSASQD

SEQ ID NO: 7412 - DNA, 2965 bp, Muscodor strobelii
  misc_feature: SGI EST ID NO. CUFF.18357.0
  misc_feature: Variant of the nucleotide sequence at SEQ ID NO 7410
gcatcaccagcttactgggcgatgggacgaatgtaggagtagatcgggtgaatgataacaagccgaactttattatgacaaagcgatcgtgcgctactcacaattggattcccttactcattctcgctagctcagtcatatcttcgacctcctctcctctgttcatttgggacgctcctcaccttttgcacccgcaaaggctcccatgcgcttctagctcggtgatgtgctcgtctgcgtcgcgacatatcccgtatggccggcctccactaatacccgcactgaggaggtctaacaactagtcgatatcggagtcgagattgacagctcttaattcgtatttgtcttctttcctttttacatatccagacattcaatactcgttcgcattgggatctactggctctgcatatacgcatgcaagtgcgctcgtcgcaaaccgcgcccgaattaggaaacaaagattgcatagaatgccggtcagacagtgattgatacctacacacgcctcttattacacacacactgccctcctatctcctcagccgcgggtgagcagtcacctgctcactcaccgactgcagcaagccgagacacgccccccagagtccccaatcagacgggcggtgttcttgggagttgcgcgaaaggatcgcccgcacaggctacagtaccatcaatactgcctgcctgcggctgcctgcctatgcacacccctaggcattaattcatacagcagcaatagcacacattaatagcacggattacctgcatgatggagagggacaacagcacctcccaatcgccccaagcaccaccacaaccgcagcaccaatcgcaggctctgtcgcgctcacattcccagctgtcgtccaaacagcagcgcccgtccatcggtcgccacacgagcgactcgcaggtctcgcagacgagcagcgacacgcactcgcaccacggccgcccgaaacctcagaaacatgtcgtaggaggcggcgccggtcgctctcacgccctcggccacgctcacgctcgtgtgccctcctccaaggctctgcacagacagcacagcactcagtcttccgcaaagctcaacaaccggcgcgcgccctctcccgaccctgaccccaacgtagatccttaccgtctccccatgctcaataacaacaccggcaacaacgcaagcaactctgctcaccgccgtgtcaagtcggatctgcgtctcaccagtcatgacgccagcaaccagcagcagtctttccaccccaatctagccaccaagcgcaaccgttcccacgtcgaaatcggcaagcggccaaagtctaccgccaacatcaagcgctcctcttcccacaaggaggtcaacaagctcaagggccagaagacccaggtgcacttcgatctgggcaacgacgggaacgacgacgaatgggtggatgctagtgcctccgcctcgccctacctatccaggcgtggctctgttatgagcggtggccagtcgccggcgaagcccagcgaggacgagaaagacaacgagaacgacaaggacgaacacgataacgaggacaagagacgaccacatacccctcctaattttaataccgatcctcgcgactcttcccccagccgcgagaccgcccagcacaaccaccgcatcacctcccgcttgttacagcgcactccctcccacggtgctcctccccagatgtctaccgaaaccgctgccgtaccgccgccttcgggctcgcctacgttaggagccaggagcggccctcccagtcttttcggcacccccaagacatctgccctcggcgcaagcggtcctgaagaactgacatctcgctttgtcaacggcgacggtggctcgggccctggctccaatagtaataggaacagcgactacttcgcttctgggcacatccccgcaaacctaagtcgcgccgaggatctacgacgcccgcgctcgctcatcgacctcagccagaaccgcagagagtcgacaagcgacgacgaagatggcactgctctagcgccccggtccaggagatcgcgacagcctgccagccagtcgcgaacacagcagaaactcaatctccaacgtgcaagctcctccatggaaccaacacaggctagagcaggagcaggcgggcccggtgttagtctgttagtcggtagtagcgactacgaagaccgcgacccaagaatcggaaagctcctcgagcgaacaggcatggagtatcttgtagtaaggcgatatcagaatcccatcgcacggtctatagcacggctggcgcatcttccaggagcgcacaagaaccagcgcataccgaagcagaatggcgcaaacggaacacattccaaagcaccgtctgaaagtggacggctggggttgagccagagtatgtcggatgttacgcggtcaaggcctgttacgcctgggcgaacgacgagcattaggacggccggcgctaggtcgagttatgagggggatgaggatcgacaacttgagcgtgaggaggaggggaatgggaatggtgatgagatcgcggcactgctgaggaatctttgggataagaataatttagatttgagtgctagccaggactagagcgcacgatgcatgaggaaaggggagagagtttggaggggaataagttagggcggatgccggttgagatgtgcttttgcttgcattttgagcgctttgggtgggtttatgggtttaatatgcatatttactaatgagctgaggggtggctaagatggttgaatggtaatgtctagagacactaatacgatggttgcgttgtgttgcatacggtagcttgagagaaagagagaggttgtggttgttaataggagatgttgtcatagtataatggcgctgcgttctgtatggtttgtcttacgggcttgttgtctattgtgtgttgatgagatacctcgtgtgctggaagtgaaatgcttg

SEQ ID NO: 7413 - DNA, 912 bp, Muscodor strobelii
  misc_feature: SGI cDNA ID NO. 562234
  misc_feature: Encodes the peptide sequence at SEQ ID NO 7414
atgccttcattccaatccctcttcctgctctcaacagcagcagcgctggcgcaaggctcaccgctacgaaagaatgacagttgcgactgctggaaagcctccgactcctcggaagtgatcttctctaatagaaaattcttcgacttccgaagtatcgccaacccatccacaccggatctaatcaacgacaaaaataccgacgctgacgcaccgacgacaaatgaatacttcacatctacggagtggacggacacgtggagtatccagacttggagcacggagggagagggcgtagcaagacaaaactcggcaaacaatgtattcattgggcaggacgaggggagctcctcaacatacctctcaatgcgtactgccaggcatgaagactaccagacaactgctgaagttgagtccgtggctacaaactatcaatatgctaccctgcgcatgaaggcgcgcacaacgggcgcaagcggcgcctgcaccgcgttgttcacttatcttggcgatccattgcaggaagctgatatcgaaatccttaccaaacaggaccacggcattattaattacacgaaccagcctggctcaacagacggttccacggtagaagctaatatcggagcggattggacggattggttggtgtatcgctacgactggagtcctggctccagcgattggtacatcaatgacaaaaaagttgcatctatcaagcttcagacacctaccgatccactcagtattcttatgaatgtttggagcgacggtggtgagtggtcgggtgtgatggatgtcgacaaccaggctaagatggatgtccagtggcttgatgtcacttacaacactccgtcgcagggttcggccacttgccagaatgtttgctctcttgacggtgaactgcctcagaattga

SEQ ID NO: 7414 - protein, 303 aa, Muscodor strobelii
  misc_feature: SGI Peptide ID NO. 562234
  misc_feature (94)..(277): Pfam Id: PF00722 Pfam Desc: Glycosyl hydrolases family 16
  misc_feature (3)..(302): NCBI GI: 50844258 Blast Desc: xylanase 3 [Gibberella zeae]
  misc_feature (9)..(302): NCBI GI: 46124571 Blast Desc: FG06663.1 [Gibberella zeae PH-1]
  misc_feature (1)..(287): NCBI GI: 256733293 Blast Desc: NECHADRAFT_38694 [Nectria haematococca mpVI 77-13-4]
  misc_feature (6)..(298): NCBI GI: 171686736 Blast Desc: protein product [Podospora anserina] gi|170943329|emb|CAP68982.1| protein product [Podospora anserina]
  misc_feature (9)..(302): NCBI GI: 116192113 Blast Desc: CHGG_05774 [Chaetomium globosum CBS 148.51] gi|88181687|gb|EAQ89155.1| CHGG_05774 [Chaetomium globosum CBS 148.51]
  misc_feature (21)..(297): NCBI GI: 116203333 Blast Desc: CHGG_09551 [Chaetomium globosum CBS 148.51] gi|88178069|gb|EAQ85537.1| CHGG_09551 [Chaetomium globosum CBS 148.51]
  misc_feature (21)..(288): NCBI GI: 39953354 Blast Desc: MGG_08823 [Magnaporthe grisea 70-15] gi|145021245|gb|EDK05374.1| MGG_08823 [Magnaporthe grisea 70-15]
  misc_feature (1)..(302): NCBI GI: 164428797 Blast Desc: NCU00061 [Neurospora crassa OR74A] gi|157072284|gb|EAA27135.2| conserved [Neurospora crassa OR74A]
  misc_feature (1)..(297): NCBI GI: 156062738 Blast Desc: SS1G_01485 [Sclerotinia sclerotiorum 1980] gi|154696821|gb|EDN96559.1| SS1G_01485 [Sclerotinia sclerotiorum 1980]
  misc_feature (1)..(297): NCBI GI: 256732374 Blast Desc: NECHADRAFT_106160 [Nectria haematococca mpVI 77-13-4]
MPSFQSLFLLSTAAALAQGSPLRKNDSCDCWKASDSSEVIFSNRKFFDFRSIANPSTPDLINDKNTDADAPTTNEYFTSTEWTDTWSIQTWSTEGEGVARQNSANNVFIGQDEGSSSTYLSMRTARHEDYQTTAEVESVATNYQYATLRMKARTTGASGACTALFTYLGDPLQEADIEILTKQDHGIINYTNQPGSTDGSTVEANIGADWTDWLVYRYDWSPGSSDWYINDKKVASIKLQTPTDPLSILMNVWSDGGEWSGVMDVDNQAKMDVQWLDVTYNTPSQGSATCQNVCSLDGELPQN

SEQ ID NO: 7415 - DNA, 2058 bp, Muscodor strobelii
  misc_feature: SGI EST ID NO. CUFF.18394.1
  misc_feature: Variant of the nucleotide sequence at SEQ ID NO 7413
cacgaggtgacattcatacgatgacccgcgatgaagccgagagacgattcggtgaagggaaatcgagttgcgacggcttaccatttgctcacgatggattttgcgaaatcgcagaaatctaagctgcgtagtagttggtgcgccatggacatggacacagtcaggcgcaccatgaagctagatgcgggcgtttagcacggcgttctgacatcaaataagcttacatcctttcgttatactaaatcctttccctccgaacaagccgttccaatcccgacgccccggatttgttagaaacagtcgaataaacacgccatgtatgacagtattcctcgcgtttctatttgaagggttctaatatttccttaacatcaccccgtacccttgccccgtacgacctgcgccgtataacatctcacgtttcctacagagaattttgcaaattgggctgggaattagaggactggacaccatgtttcattcactcgaggcatgaaacattcactcaaattccgttacgtatcgtataattgtattaggtcacctgctatttcgagactatcaggccaggatgtggccagttacccacccacccgtgctcaggggcgccaacttgtgccgcattaggaaggaatccagatgaactacattgctagctacggtacaagtcaaattcgtatatataatgaggaaaatcacttcgtgatgtttggaagaatattgaattcaatgcgggcttgttgtttactccggccggccgttgattaaaacccttcgaacgatcattacacacttttgtttcttgcctcaaatctcacgatgccttcattccaatccctcttcctgctctcaacagcagcagcgctggcgcaaggctcaccgctacgaaagaatgacagttgcgactgctggaaagcctccgactcctcggaagtgatcttctctaatagaaaattcttcgacttccgaagtatcgccaacccatccacaccggatctaatcaacgacaaaaataccgacgctgacgcaccgacgacaaatgaatacttcacatctacggagtggacggacacgtggagtatccagacttggagcacggagggagagggcgtagcaagacaaaactcggcaaacaatgtattcattgggcaggacgaggggagctcctcaacatacctctcaatgcgtactgccaggcatgaagactaccagacaactgctgaagttgagtccgtggctacaaactatcaatatgctaccctgcgcatgaaggcgcgcacaacgggcgcaagcggcgcctgcaccgcgttgttcacttatcttggcgatccattgcaggaagctgatatcgaaatccttaccaaacaggaccacggcattattaattacacgaaccagcctggctcaacagacggttccacggtagaagctaatatcggagcggattggacggattggttggtgtatcgctacgactggagtcctggctccagcgattggtacatcaatgacaaaaaagttgcatctatcaagcttcagacacctaccgatccactcagtattcttatgaatgtttggagcgacggtggtgagtggtcgggtgtgatggatgtcgacaaccaggctaagatggatgtccagtggcttgatgtcacttacaacactccgtcgcagggttcggccacttgccagaatgtttgctctcttgacggtgaactgcctcagaattgaagcatagtgaagcgtggcagccgaattgatggactgtatgagtaaggtggcgagcaacacacggctttagttcgcattagattgggttggttattgttactttcttgtacatagcctttctcgcgttggttcgatcgagggcggtgcagcagcgattccatctgggtatagatgagtcagtgtattattaacgttttgtcactgagttgaatgcgcctatcgacataaatgtttgaaggcaccccaaaaagcttcgagatttccctttccaagttatggattcgaatatgtattctaaagatacattctagtattgaaatgcgccat

SEQ ID NO: 7416 - DNA, 336 bp, Muscodor strobelii
  misc_feature: SGI cDNA ID NO. 562235
  misc_feature: Encodes the peptide sequence at SEQ ID NO 7417
ggcatcacgctacctctgatggacgacaccagtgacgtgctggcgccagccccaggccggaagctagaagaccgcgtgacggtgcccggccaggcccgactgacgggccgcgtgagcagcgccgacgcggaatccacctcgacttttaacatccgcggcgccgcaagccagaaagaccgggagcggcaaggctttgcgatcaagggtggtgctggcaagtcggtcaaggaactgttccccgacaagttcggcagcaatgcgggcaaagagctgtttgccgatggagctggcggccgggcgaggcagagaaggaaagccggcgacttgtttgactag

SEQ ID NO: 7417 - protein, 111 aa, Muscodor strobelii
  misc_feature: SGI Peptide ID NO. 562235
  misc_feature (2)..(110): NCBI GI: 145229215 Blast Desc: An01g04900 [Aspergillus niger] gi|134055017|emb|CAK37024.1| protein product [Aspergillus niger]
  misc_feature (46)..(110): NCBI GI: 256728479 Blast Desc: NECHADRAFT_101878 [Nectria haematococca mpVI 77-13-4]
  misc_feature (24)..(110): NCBI GI: 116206638 Blast Desc: CHGG_02612 [Chaetomium globosum CBS 148.51] gi|88183209|gb|EAQ90677.1| CHGG_02612 [Chaetomium globosum CBS 148.51]
  misc_feature (47)..(110): NCBI GI: 46110026 Blast Desc: FG01895.1 [Gibberella zeae PH-1]
  misc_feature (21)..(110): NCBI GI: 85102816 Blast Desc: NCU01310 [Neurospora crassa OR74A] gi|11595675|emb|CAC18296.1| conserved [Neurospora crassa] gi|28922941|gb|EAA32160.1| [Neurospora crassa OR74A]
  misc_feature (2)..(110): NCBI GI: 225562945 Blast Desc: conserved [Ajellomyces capsulatus G186AR]
  misc_feature (42)..(110): NCBI GI: 119497137 Blast Desc: NFIA_021460 [Neosartorya fischeri NRRL 181] gi|119413496|gb|EAW23437.1| conserved [Neosartorya fischeri NRRL 181]
  misc_feature (42)..(110): NCBI GI: 70990428 Blast Desc: conserved [Aspergillus fumigatus Af293] gi|66847695|gb|EAL88025.1| conserved [Aspergillus fumigatus Af293] gi|159130544|gb|EDP55657.1| conserved [Aspergillus A1163]
  misc_feature (2)..(110): NCBI GI: 240279769 Blast Desc: conserved [Ajellomyces capsulatus H143]
  misc_feature (50)..(110): NCBI GI: 115388399 Blast Desc: conserved [Aspergillus terreus NIH2624] gi|114195789|gb|EAU37489.1| conserved [Aspergillus terreus NIH2624]
GITLPLMDDTSDVLAPAPGRKLEDRVTVPGQARLTGRVSSADAESTSTFNIRGAASQKDRERQGFAIKGGAGKSVKELFPDKFGSNAGKELFADGAGGRARQRRKAGDLFD

SEQ ID NO: 7418 - DNA, 849 bp, Muscodor strobelii
  misc_feature: SGI EST ID NO. CUFF.18370.0
  misc_feature: Variant of the nucleotide sequence at SEQ ID NO 7416
aggcatcacgctacctctgatggacgacaccagtgacgtgctggcgccagccccaggccggaagctagaagaccgcgtgacggtgcccggccaggcccgactgacgggccgcgtgagcagcgccgacgcggaatccacctcgacttttaacatccgcggcgccgcaagccagaaagaccgggagcggcaaggctttgcgatcaagggtggtgctggcaagtcggtcaaggaactgttccccgacaagttcggcagcaatgcgggcaaagagctgtttgccgatggagctggcggccgggcgaggcagagaaggaaagccggcgacttgtttgactaggcccgcatcgggaatggggcggataggagggaatgacgcgcctgccgggtcgggatagacacagatgagcgcgaagaagccgtgatgaggctctgcgcgaggcgcatcgtggccaggcaagcctgcgttcgcccgtgtggatgcagcaacagcaagcaagatcagcgttagggttcggcgttggggttcagcgttacgttcatacacggcgacattcgcgtcaatcaagaagggggctagtcattgcgcatggttcctcgcgtgcataaatctactgggttgggctgggctggacatagatgatatttacaagatatcaacgctacttatcaatgcaaacatggaatgccatcactattgttgccatcgccatagattatgcagacttatcatacaatacatcacagccgtcacgctagacctgtgaatatatggccatgtgaataagattaggcaggtacgcgaagacactggactgcagccagtaccttcccccaacgagtagcacgctc

SEQ ID NO: 7419 - DNA, 1299 bp, Muscodor strobelii
  misc_feature: SGI cDNA ID NO. 562236
  misc_feature: Encodes the peptide sequence at SEQ ID NO 7420
atgtccgatccattgagctggctaaggctgggccaacgctcccgcacgcccaccctctctcgctcgccggcctctgagcctgtctccgaacgccaacatggccgccagtcgcaggccagtgactgctacccttccgagtccgacctgttccccatcagcgaggacgaccaccaccgtctccccgtccccgattgggacccgatttggtcgctcgatcagatggtagagaccctccaagcctatttcatgtcaaagagtgtgcttgagccaatacctgtcgaatacaacgcctacgttctgcatctgatcgagggctttggaaagttcaaagcggagatacgggatgcgaacaaggcacgtgatgaggccaaggtttctctcgagcagaacctcgagcagatccgccaaattagcgatgaatggctacagagggaggagcaataccaagctgagctgaagaggcttgaagttctttgtggaagccacccttgcttccaggccttcccaccgctccgtgccaaccgatgtgtaaatagcaaagtcaccatgactgattccatccgtgtagtcgaaaacctctcgcgatggtctcgaggcggtcaccttagcgaggacacacagtgtcgtagaccgcagctgccacgggcgaaaatcgttcgcgtcgagactcaaaaggttcatagaaccacggcgaccccatcgggctctaaggatgcttcactccccatgattctcgacaatgataatgattatatcaagagtgagaagattcgtaggcagtacgctgctgcagacgtcaacccaaagagggcaaggaacacacgtccctatagatatggtgacgcaattagagatctactggacactgaagctggtccaacttccaccttgatggttcgtggcgatcacaatcgaagcatcgatatggaggcgcaaggggcgcagggggctacaaagaggcttctcaccactagtccggcaatactccatcgagatgatagaccggagtcacgggatggtctatccataggtgcggttcagaattggcatccgcacaacatggaccacccagacgaagtggacgataagaaagccgagtttgagcgcagtatctcggccttctctttcgagctcggagacgacatcggcgtaccgtgtcaagaccccggccgaaagatgcaccccggcgctacgcggaagatgaacccattcaaatgggtgggacaatatcttcccgcgaatttcgccgaccagcgccgtctgtccttcggtagccagttcttcgtcggccagacctga

SEQ ID NO: 7420 - protein, 432 aa, Muscodor strobelii
  misc_feature: SGI Peptide ID NO. 562236
  misc_feature (70)..(159): NCBI GI: 11595676 Blast Desc: conserved [Neurospora crassa]
  misc_feature (70)..(159): NCBI GI: 85102820 Blast Desc: NCU01311 [Neurospora crassa OR74A] gi|28922942|gb|EAA32161.1| [Neurospora crassa OR74A]
  misc_feature (70)..(158): NCBI GI: 261360789 Blast Desc: conserved [Verticillium albo-atrum VaMs.102]
  misc_feature (70)..(199): NCBI GI: 154316233 Blast Desc: [Botryotinia fuckeliana B05.10] gi|150846488|gb|EDN21681.1| [Botryotinia fuckeliana B05.10]
  misc_feature (52)..(180): NCBI GI: 256728652 Blast Desc: NECHADRAFT_85810 [Nectria haematococca mpVI 77-13-4]
  misc_feature (69)..(160): NCBI GI: 171692159 Blast Desc: protein product [Podospora anserina] gi|170946028|emb|CAP72829.1| protein product [Podospora anserina]
  misc_feature (70)..(157): NCBI GI: 116206636 Blast Desc: CHGG_02611 [Chaetomium globosum CBS 148.51] gi|88183208|gb|EAQ90676.1| CHGG_02611 [Chaetomium globosum CBS 148.51]
  misc_feature (68)..(159): NCBI GI: 46110064 Blast Desc: FG01914.1 [Gibberella zeae PH-1]
  misc_feature (71)..(193): NCBI GI: 145605724 Blast Desc: MGG_06900 [Magnaporthe grisea 70-15] gi|145013532|gb|EDJ98173.1| MGG_06900 [Magnaporthe grisea 70-15]
MSDPLSWLRLGQRSRTPTLSRSPASEPVSERQHGRQSQASDCYPSESDLFPISEDDHHRLPVPDWDPIWSLDQMVETLQAYFMSKSVLEPIPVEYNAYVLHLIEGFGKFKAEIRDANKARDEAKVSLEQNLEQIRQISDEWLQREEQYQAELKRLEVLCGSHPCFQAFPPLRANRCVNSKVTMTDSIRVVENLSRWSRGGHLSEDTQCRRPQLPRAKIVRVETQKVHRTTATPSGSKDASLPMILDNDNDYIKSEKIRRQYAAADVNPKRARNTRPYRYGDAIRDLLDTEAGPTSTLMVRGDHNRSIDMEAQGAQGATKRLLTTSPAILHRDDRPESRDGLSIGAVQNWHPHNMDHPDEVDDKKAEFERSISAFSFELGDDIGVPCQDPGRKMHPGATRKMNPFKWVGQYLPANFADQRRLSFGSQFFVGQT

SEQ ID NO: 7421 - DNA, 4236 bp, Muscodor strobelii
  misc_feature: SGI cDNA ID NO. 562237
  misc_feature: Reduced expression when VOC is produced
  misc_feature: Encodes the peptide sequence at SEQ ID NO 7422
cccgacccctccggtctcgcccacctggatctcagcgcggccctgcccccgcccaacacccagcagaacaagccctaccaggatctgggcccggctttggcgctggactgtgcgccgagtcgcccgctagccgcccatcaccagtctcacaacagctttcttcgcgtgcccacggccctgcagcctctgtaccagcaggcccccgcgcccgccttgttccacaatggcgccgtctttccgcccgacgcctggcccgagcccggcctggccaactacgcctacagcgtgacgccccgctttgcgccctaccatagcctacagccgccgccgcccggtcaccacgccgccgacatgtacctgccgacaggcgcgacgctgggtgggcaacccccgtacgatccttccttggcgggcgggatccaggtgccgtcccagcggttggagtctctgaccctcgagtccgcacattaccagacgagcggctcgcacggcggtgacacgtcctcgcccgccaggttcagggagaaggccctggcgcaggcccaccggacctatgtcgagctcctggcctacatgcatcagaggccgcggcctggtcaccgtgctgccgcgagcgccaaggccccctccaaagtcatcatcatgcccaagcttcccaagccgtcagcctacgcctcggcggccgtgcctccccaccacaaccctgccgacttgcattatcctactgctgctggccgtcacgctgacccgcagatcctcgctcgcggcacgtccctcgccgagcacgggagagggcctgagatgcccagtcctgccttctaccacgtgttcggaggcagccatccccggttccacgatgtcagtggcccgcctcgtggctcggtccttcctacgcccgtggcgggggccaaggccgccattgagatcatgacgcacctctgcgagcagagcgactggaaatggatcgacggcattctgctaggcggctgtcttcactacggcctggagcactacgagcagtcgctcgagtggttccagaggatcgtctctctcgatcccagtcatgtcgaggctgtgtccaatgtggccgcttcgctctactgtctacatcgccaagaggaggcagaaacccactggatgcgcgccatccgccagcgaccggcgtatctggaagcggtagagcacctggtccacctcctgtgtggcagtcagcgcagtaaagaagcggtcgagatcatcggctttgtgcagcggtcactccagctcgacgacagcactaagtccgctgtcgccaacgccgagggtgccagctggcacacgggacagtcccgctctatgcttcctttggcagtggcccccggatcggataagatgcgggatcccgaaatccccggctttggcttgagtggctacgcggttcccgccagcgaaaacggccgtatggtggccctcattcacgccaagggcaatatgctttatgccctgaaggacatcaaccgagcagcggaggccttcgaggaggctgtgctcatcagtacgggcaagtcgctcaagtgtattcactctctgatcaataaggtacacgccgtcctggctggtcccgcaggccccagccacaccgtgccgtcgtccagcggcccgctactgcttccgccggatagggctcgacacactgcccaactcgtgtttgccgtgaacggtgaactgcccggattaagatttgtacccgaaggcatacccaagaagtcagccatctccacgaccagcaactcgcttctgtcgctcgccaagatcttccaagatgccatgtccaacggtggttcctatcccaagcttctccgtcaacctccgggcgtcggcgatattctggcgctctattacctttcactgtccttgtccgagagtccttccactgctaataacgtcggcattctcctcgccagtattcagcacaccggagccgcgcctccggtccacatgatggacactctcaacactcctcattttcctggcatcacaccaggcagcggacttcacctagctctcgcctactacaattacggcctcaaactcgacactaaacatgttcatcttcataccaaccttggcagcctactcaaggacataggacaactagacttggctattcaaatgtacgagcgagctgtggcatgtgacggcaacttcgacatcgcgctcactaatctggccaacgccgtcaaagatcgcggccgtatcagtgatgccatcatgtactacaagcgtgctgtcaactccaacccgcacttcgcggaggcggtgtgcgggctgtctactgccctcaactcggtctgcgattggagaggtcgaggtggcgtgatgcttgatcagggccgatacgatcgatggcatgtcgatgacgagggcatgctgaaagatgcgagagatgagggcatagccagcggtctcgcccagagagtggctggtattgtctctaagcaactcgccgactcgtctcaatggggcgcgggtattcttcgccatggcgagctagatatgcttatccggcaaatcaaaatatctgcggaggacgacgtcagagacggtttggatcttacgcgagaaataggcggctggatcggtcgtccctgggaaggatctcgagtactacggctggttgagcgctctaccaaagctttgatgcgccgttggtacgtggatcagtatatggctaagcccgtcaccaccactcgatatctcagacccaaactcccagctcagctagctgtgccttctgcgcctacggtcctcccgtttcacacgttcacttgccctttaactgccaaggacatccggatgatctcccagcgcaatgcggctcggatcgcctgctcgactctgaaatcgccctggttacctgatacagtttatcctcccccaccgccacctaggccgcagctcaacatcggttatatttcgtcggacttcaataatcacccgcttgctcaccttatgcagtccgtttttggcttccacgacccccgtcgcgccacggccatctgctacgcgaccaccgccagtgacaagtcttctcatcgtcaacaaatcgagcgcgaagcaccggtcttccgtgacgttagtggttggtccgccgagcagactatcaaccagattgtcaaagatgggattcacattcttgtcaacctgaatggttacactcggggtgcaagaaacgagatatttgctgcacggccagcgcccatccagatgtcattcatgggattcgccggtacattgggtgctgaatggtgtgattacctactggccgatgagaccgccattcctcggtcgacgttgcgaccccaccgcaataacctcggcttggccgacttgtttcgagacgaagaactcaatgaggcggaggactgggtgtactcggaaaatatcatcttctgccgtgatacattcttctgttgtgaccatgcgcagtcatgcgatgccggtgagcggcaaatcacttggcaggatgaacaacgacgacgttggcagatgcgtaaagacctctttcctgatctcgccgatgacaccatcatcatggggaatttcaatcagctctacaagatcgatcctgctacgctccgtacttggctgcgtattctttcaaacgtgcctaaagctgtcttgtggcttctgagatttcccgaactcggggagaataatctcagacggacagccaaagcatgggctggtgaagatgtggctaaacgcatcattttcacggatgtggctcccaaaaggcagcacatctcacgtgcgcgcgtctgcgacatctttctagatacgcccgagtgtaacgctcacacgaccgcagctgatgtgttgtggtccagcacgccgctcctcactttacctcgctacccttataagatgtgttcgcggatggcggcctccattctcaaaggcgccctacccaaaacgcctcaaggctaccaagcggctcgggaactcatcgcgtctgatgactcggactatgagcttctcgccactcggctggccggaggtctaacatatgaacgcgttgacgacgagtactgcgaaggacgaggtcgtcttgctgacctccgcaagctcctcttcgaagccaagtggacgtgcgccttgttcgatacgcatcggtgggtgtccgacctggaggacgccttcgaggaagcatggcggcgctgggttgcaggtgaatcgggagatatctatctctag

SEQ ID NO: 7422 - protein, 1411 aa, Muscodor strobelii
  misc_feature: SGI Peptide ID NO. 562237
  misc_feature (696)..(729): Pfam Id: PF00515 Pfam Desc: Tetratricopeptide repeat
  misc_feature (730)..(763): Pfam Id: PF00515 Pfam Desc: Tetratricopeptide repeat
  misc_feature (168)..(1411): NCBI GI: 256728467 Blast Desc: NECHADRAFT_105493 [Nectria haematococca mpVI 77-13-4]
  misc_feature (165)..(1411): NCBI GI: 164426318 Blast Desc: NCU01315 [Neurospora crassa OR74A] gi|157071287|gb|EAA32165.2| conserved [Neurospora crassa OR74A]
  misc_feature (148)..(1411): NCBI GI: 171692141 Blast Desc: protein product [Podospora anserina] gi|170946019|emb|CAP72820.1| protein product [Podospora anserina]
  misc_feature (168)..(1411): NCBI GI: 46110068 Blast Desc: FG01916.1 [Gibberella zeae PH-1]
  misc_feature (54)..(1411): NCBI GI: 154316161 Blast Desc: BC1G_03666 [Botryotinia fuckeliana B05.10] gi|150846452|gb|EDN21645.1| BC1G_03666 [Botryotinia fuckeliana B05.10]
  misc_feature (42)..(1411): NCBI GI: 156037528 Blast Desc: SS1G_12478 [Sclerotinia sclerotiorum 1980] gi|154697886|gb|EDN97624.1| SS1G_12478 [Sclerotinia sclerotiorum 1980]
  misc_feature (239)..(1411): NCBI GI: 116206628 Blast Desc: CHGG_02607 [Chaetomium globosum CBS 148.51] gi|88183204|gb|EAQ90672.1| CHGG_02607 [Chaetomium globosum CBS 148.51]
  misc_feature (55)..(1411): NCBI GI: 39978023 Blast Desc: MGG_06896 [Magnaporthe grisea 70-15] gi|145013536|gb|EDJ98177.1| MGG_06896 [Magnaporthe grisea 70-15]
  misc_feature (171)..(1411): NCBI GI: 119189521 Blast Desc: CIMG_04808 [Coccidioides immitis RS]
  misc_feature (171)..(1411): NCBI GI: 240111204 Blast Desc: TPR Domain containing protein [Coccidioides posadasii C735 delta SOWgp]
  misc_feature: Useful for introducing or modulating the production of volatile compounds
PDPSGLAHLDLSAALPPPNTQQNKPYQDLGPALALDCAPSRPLAAHHQSHNSFLRVPTALQPLYQQAPAPALFHNGAVFPPDAWPEPGLANYAYSVTPRFAPYHSLQPPPPGHHAADMYLPTGATLGGQPPYDPSLAGGIQVPSQRLESLTLESAHYQTSGSHGGDTSSPARFREKALAQAHRTYVELLAYMHQRPRPGHRAAASAKAPSKVIIMPKLPKPSAYASAAVPPHHNPADLHYPTAAGRHADPQILARGTSLAEHGRGPEMPSPAFYHVFGGSHPRFHDVSGPPRGSVLPTPVAGAKAAIEIMTHLCEQSDWKWIDGILLGGCLHYGLEHYEQSLEWFQRIVSLDPSHVEAVSNVAASLYCLHRQEEAETHWMRAIRQRPAYLEAVEHLVHLLCGSQRSKEAVEIIGFVQRSLQLDDSTKSAVANAEGASWHTGQSRSMLPLAVAPGSDKMRDPEIPGFGLSGYAVPASENGRMVALIHAKGNMLYALKDINRAAEAFEEAVLISTGKSLKCIHSLINKVHAVLAGPAGPSHTVPSSSGPLLLPPDRARHTAQLVFAVNGELPGLRFVPEGIPKKSAISTTSNSLLSLAKIFQDAMSNGGSYPKLLRQPPGVGDILALYYLSLSLSESPSTANNVGILLASIQHTGAAPPVHMMDTLNTPHFPGITPGSGLHLALAYYNYGLKLDTKHVHLHTNLGSLLKDIGQLDLAIQMYERAVACDGNFDIALTNLANAVKDRGRISDAIMYYKRAVNSNPHFAEAVCGLSTALNSVCDWRGRGGVMLDQGRYDRWHVDDEGMLKDARDEGIASGLAQRVAGIVSKQLADSSQWGAGILRHGELDMLIRQIKISAEDDVRDGLDLTREIGGWIGRPWEGSRVLRLVERSTKALMRRWYVDQYMAKPVTTTRYLRPKLPAQLAVPSAPTVLPFHTFTCPLTAKDIRMISQRNAARIACSTLKSPWLPDTVYPPPPPPRPQLNIGYISSDFNNHPLAHLMQSVFGFHDPRRATAICYATTASDKSSHRQQIEREAPVFRDVSGWSAEQTINQIVKDGIHILVNLNGYTRGARNEIFAARPAPIQMSFMGFAGTLGAEWCDYLLADETAIPRSTLRPHRNNLGLADLFRDEELNEAEDWVYSENIIFCRDTFFCCDHAQSCDAGERQITWQDEQRRRWQMRKDLFPDLADDTIIMGNFNQLYKIDPATLRTWLRILSNVPKAVLWLLRFPELGENNLRRTAKAWAGEDVAKRIIFTDVAPKRQHISRARVCDIFLDTPECNAHTTAADVLWSSTPLLTLPRYPYKMCSRMAASILKGALPKTPQGYQAARELIASDDSDYELLATRLAGGLTYERVDDEYCEGRGRLADLRKLLFEAKWTCALFDTHRWVSDLEDAFEEAWRRWVAGESGDIYL

SEQ ID NO: 7423 - DNA, 5538 bp, Muscodor strobelii
  misc_feature: SGI EST ID NO. CUFF.18792.1
  misc_feature: Variant of the nucleotide sequence at SEQ ID NO 7421
gcccgacccctccggtctcgcccacctggatctcagcgcggccctgcccccgcccaacacccagcagaacaagccctaccaggatctgggcccggctttggcgctggactgtgcgccgagtcgcccgctagccgcccatcaccagtctcacaacagctttcttcgcgtgcccacggccctgcagcctctgtaccagcaggcccccgcgcccgccttgttccacaatggcgccgtctttccgcccgacgcctggcccgagcccggcctggccaactacgcctacagcgtgacgccccgctttgcgccctaccatagcctacagccgccgccgcccggtcaccacgccgccgacatgtacctgccgacaggcgcgacgctgggtgggcaacccccgtacgatccttccttggcgggcgggatccaggtgccgtcccagcggttggagtctctgaccctcgagtccgcacattaccagacgagcggctcgcacggcggtgacacgtcctcgcccgccaggttcagggagaaggccctggcgcaggcccaccggacctatgtcgagctcctggcctacatgcatcagaggccgcggcctggtcaccgtgctgccgcgagcgccaaggccccctccaaagtcatcatcatgcccaagcttcccaagccgtcagcctacgcctcggcggccgtgcctccccaccacaaccctgccgacttgcattatcctactgctgctggccgtcacgctgacccgcagatcctcgctcgcggcacgtccctcgccgagcacgggagagggcctgagatgcccagtcctgccttctaccacgtgttcggaggcagccatccccggttccacgatgtcagtggcccgcctcgtggctcggtccttcctacgcccgtggcgggggccaaggccgccattgagatcatgacgcacctctgcgagcagagcgactggaaatggatcgacggcattctgctaggcggctgtcttcactacggcctggagcactacgagcagtcgctcgagtggttccagaggatcgtctctctcgatcccagtcatgtcgaggctgtgtccaatgtggccgcttcgctctactgtctacatcgccaagaggaggcagaaacccactggatgcgcgccatccgccagcgaccggcgtatctggaagcggtagagcacctggtccacctcctgtgtggcagtcagcgcagtaaagaagcggtcgagatcatcggctttgtgcagcggtcactccagctcgacgacagcactaagtccgctgtcgccaacgccgagggtgccagctggcacacgggacagtcccgctctatgcttcctttggcagtggcccccggatcggataagatgcgggatcccgaaatccccggctttggcttgagtggctacgcggttcccgccagcgaaaacggccgtatggtggccctcattcacgccaagggcaatatgctttatgccctgaaggacatcaaccgagcagcggaggccttcgaggaggctgtgctcatcagtacgggcaagtcgctcaagtgtattcactctctgatcaataaggtacacgccgtcctggctggtcccgcaggccccagccacaccgtgccgtcgtccagcggcccgctactgcttccgccggatagggctcgacacactgcccaactcgtgtttgccgtgaacggtgaactgcccggattaagatttgtacccgaaggcatacccaagaagtcagccatctccacgaccagcaactcgcttctgtcgctcgccaagatcttccaagatgccatgtccaacggtggttcctatcccaagcttctccgtcaacctccgggcgtcggcgatattctggcgctctattacctttcactgtccttgtccgagagtccttccactgctaataacgtcggcattctcctcgccagtattcagcacaccggagccgcgcctccggtccacatgatggacactctcaacactcctcattttcctggcatcacaccaggcagcggacttcacctagctctcgcctactacaattacggcctcaaactcgacactaaacatgttcatcttcataccaaccttggcagcctactcaaggacataggacaactagacttggctattcaaatgtacgagcgagctgtggcatgtgacggcaacttcgacatcgcgctcactaatctggccaacgccgtcaaagatcgcggccgtatcagtgatgccatcatgtactacaagcgtgctgtcaactccaacccgcacttcgcggaggcggtgtgcgggctgtctactgccctcaactcggtctgcgattggagaggtcgaggtggcgtgatgcttgatcagggccgatacgatcgatggcatgtcgatgacgagggcatgctgaaagatgcgagagatgagggcatagccagcggtctcgcccagagagtggctggtattgtctctaagcaactcgccgactcgtctcaatggggcgcgggtattcttcgccatggcgagctagatatgcttatccggcaaatcaaaatatctgcggaggacgacgtcagagacggtttggatcttacgcgagaaataggcggctggatcggtcgtccctgggaaggatctcgagtactacggctggttgagcgctctaccaaagctttgatgcgccgttggtacgtggatcagtatatggctaagcccgtcaccaccactcgatatctcagacccaaactcccagctcagctagctgtgccttctgcgcctacggtcctcccgtttcacacgttcacttgccctttaactgccaaggacatccggatgatctcccagcgcaatgcggctcggatcgcctgctcgactctgaaatcgccctggttacctgatacagtttatcctcccccaccgccacctaggccgcagctcaacatcggttatatttcgtcggacttcaataatcacccgcttgctcaccttatgcagtccgtttttggcttccacgacccccgtcgcgccacggccatctgctacgcgaccaccgccagtgacaagtcttctcatcgtcaacaaatcgagcgcgaagcaccggtcttccgtgacgttagtggttggtccgccgagcagactatcaaccagattgtcaaagatgggattcacattcttgtcaacctgaatggttacactcggggtgcaagaaacgagatatttgctgcacggccagcgcccatccagatgtcattcatgggattcgccggtacattgggtgctgaatggtgtgattacctactggccgatgagaccgccattcctcggtcgacgttgcgaccccaccgcaataacctcggcttggccgacttgtttcgagacgaagaactcaatgaggcggaggactgggtgtactcggaaaatatcatcttctgccgtgatacattcttctgttgtgaccatgcgcagtcatgcgatgccggtgagcggcaaatcacttggcaggatgaacaacgacgacgttggcagatgcgtaaagacctctttcctgatctcgccgatgacaccatcatcatggggaatttcaatcagctctacaagatcgatcctgctacgctccgtacttggctgcgtattctttcaaacgtgcctaaagctgtcttgtggcttctgagatttcccgaactcggggagaataatctcagacggacagccaaagcatgggctggtgaagatgtggctaaacgcatcattttcacggatgtggctcccaaaaggcagcacatctcacgtgcgcgcgtctgcgacatctttctagatacgcccgagtgtaacgctcacacgaccgcagctgatgtgttgtggtccagcacgccgctcctcactttacctcgctacccttataagatgtgttcgcggatggcggcctccattctcaaaggcgccctacccaaaacgcctcaaggctaccaagcggctcgggaactcatcgcgtctgatgactcggactatgagcttctcgccactcggctggccggaggtctaacatatgaacgcgttgacgacgagtactgcgaaggacgaggtcgtcttgctgacctccgcaagctcctcttcgaagccaagtggacgtgcgccttgttcgatacgcatcggtgggtgtccgacctggaggacgccttcgaggaagcatggcggcgctgggttgcaggtgaatcgggagatatctatctctagagcgccttgtccgccgcccttgagatgtggatacgtcccatcgtaatgaacgagatgactctcgtactgtttcttcttccggggtcaggagtcggaatcgggtcatttctttttctccttggtctttctctctcacctgtattccagccgttcatgtttttccttcctgcttgctcctttttcgtcggtgttttatttttcctattgtaaggcgactagggaactcagtgaaatgggaccatgttatagaagtaatggcgactcggaccaagtgctgggcaaggtcgcgttactcgaagagcttgctttaaagaaagggaaaaaatcatcaagttcgcttcgatgcgacgggaaatgggcgttcggcaataatatagtagcacaatgtgcctacaccatgcgatgatttcagatatacccgagccttctggatgggctagcgagcgagcacaaacggatgaatcaatctgccacgtccagatttggacgagcgatcttgcattaccattgacagcttgagctggagtgtgtctacctgatcaaaagcgtgttgtagtagactgcgaggctcttgcctctgttcctatatgcatacctcggtacgaaagtgattcagcaatgcgtgtagaaaatacgaagaacccggctaatgagcatagttcatactctaaaagactatgaattgtgcggctgcccgtgtttggagccatacataaaaagaacatcatcgatgtcagaaaggctctacctctgttaacgtcagttcgacgaccatggccatatttcgtcaatttccgcacagccactgaaaccaaggcaccataacattgtcccatatggtttatagtacatctaattataatttgacctttctcatgaaccaccaaatccgctggctgttgtcctagcccgaaaccacttgagttcatcatcagacacgaacagagaccgtgtgggaaaaaattatcttaaaatcacgcgattggtattcatgcatctctgtttttagaaatcagctcgtcacgctgcttcggctgctgtgaggccataggattgtagagatgtttgcaccacacatgttcacgacctgagcggacttcaggctcgcttgccgctgcccttttggtcgtcgccgtattcgccaaccacttcccagccgatagcaacaccagatacgcgaggcaagacatgcaagccagcaagccagcaacggttcgtgctcagcacgtctctcgcgttctcagcgttgtagaatgaatccaggacatgagaaacgacacccgcataatgcaggatgttcg

SEQ ID NO: 7424 - DNA, 330 bp, Muscodor strobelii
  misc_feature: SGI cDNA ID NO. 562238
  misc_feature: Elevated expression when VOC is produced
  misc_feature: Encodes the peptide sequence at SEQ ID NO 7425
atgtgttcgcggatggcggcctccattctcaaaggcgccctacccaaaacgcctcaaggctaccaagcggctcgggaactcatcgcgtctgatgactcggactatgagcttctcgccactcggctggccggaggtctaacatatgaacgcgttgacgacgagtactgcgaaggacgaggtcgtcttgctgacctccgcaagctcctcttcgaagccaagtggacgtgcgccttgttcgatacgcatcggtgggtgtccgacctggaggacgccttcgaggaagcatggcggcgctgggttgcaggtgaatcgggagatatctatctctag

SEQ ID NO: 7425 - protein, 109 aa, Muscodor strobelii
  misc_feature: SGI Peptide ID NO. 562238
  misc_feature (1)..(109): NCBI GI: 39978023 Blast Desc: MGG_06896 [Magnaporthe grisea 70-15] gi|145013536|gb|EDJ98177.1| MGG_06896 [Magnaporthe grisea 70-15]
  misc_feature (1)..(109): NCBI GI: 116206628 Blast Desc: CHGG_02607 [Chaetomium globosum CBS 148.51] gi|88183204|gb|EAQ90672.1| CHGG_02607 [Chaetomium globosum CBS 148.51]
  misc_feature (1)..(109): NCBI GI: 256728467 Blast Desc: NECHADRAFT_105493 [Nectria haematococca mpVI 77-13-4]
  misc_feature (1)..(109): NCBI GI: 46110068 Blast Desc: FG01916.1 [Gibberella zeae PH-1]
  misc_feature (1)..(109): NCBI GI: 12718407 Blast Desc: related to UDP-N-ACETYLGLUCOSAMINE--PEPTIDE N-ACETYLGLUCOSAMINYLTRANSFERASE [Neurospora crassa]
  misc_feature (1)..(109): NCBI GI: 164426318 Blast Desc: NCU01315 [Neurospora crassa OR74A] gi|157071287|gb|EAA32165.2| conserved [Neurospora crassa OR74A]
  misc_feature (1)..(109): NCBI GI: 154316161 Blast Desc: BC1G_03666 [Botryotinia fuckeliana B05.10] gi|150846452|gb|EDN21645.1| BC1G_03666 [Botryotinia fuckeliana B05.10]
  misc_feature (1)..(109): NCBI GI: 189197921 Blast Desc: UDP-N-acetylglucosaminyltransferase [Pyrenophora tritici-repentis Pt-1C-BFP] gi|187981246|gb|EDU47872.1| UDP-N-acetylglucosaminyltransferase [Pyrenophora tritici-repentis
  misc_feature (1)..(109): NCBI GI: 261360787 Blast Desc: UDP-N-acetylglucosamine-peptide N-acetylglucosaminyltransferase [Verticillium albo-atrum VaMs.102]
  misc_feature (1)..(109): NCBI GI: 171692141 Blast Desc: protein product [Podospora anserina] gi|170946019|emb|CAP72820.1| protein product [Podospora anserina]
  misc_feature: Useful for introducing or modulating the production of volatile compounds
MCSRMAASILKGALPKTPQGYQAARELIASDDSDYELLATRLAGGLTYERVDDEYCEGRGRLADLRKLLFEAKWTCALFDTHRWVSDLEDAFEEAWRRWVAGESGDIYL

SEQ ID NO: 7426 - DNA, 5538 bp, Muscodor strobelii; identical to SEQ ID NO: 7423
  misc_feature: SGI EST ID NO. CUFF.18792.1
  misc_feature: Variant of the nucleotide sequence at SEQ ID NO 7424

SEQ ID NO: 7427 - DNA, 618 bp, Muscodor strobelii
  misc_feature: SGI cDNA ID NO. 562239
  misc_feature: Reduced expression when VOC is produced
  misc_feature: Encodes the peptide sequence at SEQ ID NO 7428
atgaagtaccagctctccgccgcattaatgggccttgctgccaccactgtttgtgcacaggacaaacagacgggaccttggaacttgcatatcaaaggcactgccgccaacactaaaatcgatggatatggctcgtcctgtcatgctggtgcagctcttgaaggcctctgctacacgaaaggaaccattgacggctcctcggaatactacttcaactacacgacctacaacaaggttgaaggccacaataccggaattctgacctggaacctaccttacaccggcgaagacaacatgctccactatgtttcgcagggaatgagcctggaatatcaacccaacagcaatgttgctggagcgttgtttggcttcgataatggcttccaagtcggatggaatagccagaatgagctattcggatttggttatgaggacgactctacattcaagccaaacacgccgcctaagccgaccgatagcaaagccttatatcaatgggctgtctgctggcaataccttggtggatattactatcaatccgttgcatggatccaaagtgggaagccacacaaccctacatgcgagacggtcgaaatcaccagaaagaaggcgacataa

SEQ ID NO: 7428 - protein, 205 aa, Muscodor strobelii
  misc_feature: SGI Peptide ID NO. 562239
  misc_feature (23)..(194): NCBI GI: 164423958 Blast Desc: NCU07569 [Neurospora crassa OR74A] gi|157070305|gb|EAA29378.2| NCU07569 [Neurospora crassa OR74A]
  misc_feature (23)..(201): NCBI GI: 171686266 Blast Desc: protein product [Podospora anserina] gi|170943094|emb|CAP68747.1| protein product [Podospora anserina]
  misc_feature (1)..(193): NCBI GI: 209570344 Blast Desc: [Glomerella graminicola]
  misc_feature (12)..(201): NCBI GI: 154321738 Blast Desc: BC1G_01016 [Botryotinia fuckeliana B05.10] gi|150850263|gb|EDN25456.1| BC1G_01016 [Botryotinia fuckeliana B05.10]
  misc_feature (24)..(201): NCBI GI: 189193267 Blast Desc: conserved [Pyrenophora tritici-repentis Pt-1C-BFP] gi|187978536|gb|EDU45162.1| conserved [Pyrenophora tritici-repentis Pt-1C-BFP]
  misc_feature (27)..(201): NCBI GI: 169606284 Blast Desc: SNOG_06180 [Phaeosphaeria nodorum SN15] gi|111064891|gb|EAT86011.1| SNOG_06180 [Phaeosphaeria nodorum SN15]
  misc_feature (22)..(201): NCBI GI: 156045912 Blast Desc: SS1G_09232 [Sclerotinia sclerotiorum 1980] gi|154693628|gb|EDN93366.1| SS1G_09232 [Sclerotinia sclerotiorum 1980]
  misc_feature (10)..(201): NCBI GI: 116192765 Blast Desc: CHGG_06100 [Chaetomium globosum CBS 148.51] gi|88182013|gb|EAQ89481.1| CHGG_06100 [Chaetomium globosum CBS 148.51]
  misc_feature (46)..(201): NCBI GI: 169597451 Blast Desc: SNOG_01511 [Phaeosphaeria nodorum SN15] gi|160707524|gb|EAT91160.2| SNOG_01511 [Phaeosphaeria nodorum SN15]
  misc_feature: Useful for introducing or modulating the production of volatile compounds
MKYQLSAALMGLAATTVCAQDKQTGPWNLHIKGTAANTKIDGYGSSCHAGAALEGLCYTKGTIDGSSEYYFNYTTYNKVEGHNTGILTWNLPYTGEDNMLHYVSQGMSLEYQPNSNVAGALFGFDNGFQVGWNSQNELFGFGYEDDSTFKPNTPPKPTDSKALYQWAVCWQYLGGYYYQSVAWIQSGKPHNPTCETVEITRKKAT

SEQ ID NO: 7429 - DNA, 1121 bp, Muscodor strobelii
  misc_feature: SGI EST ID NO. CUFF.19080.1
  misc_feature: Variant of the nucleotide sequence at SEQ ID NO 7427
cagtcaacatataatctctcattccttcacaagaaatcgttctcttcatcctgcaatcacatcttcaacgatttctatttggtcatcattttttagcagaaccgtctatcaacttcattttcttcgcttctgccacatcgcaatgaagtaccagctctccgccgcattaatgggccttgctgccaccactgtttgtgcacaggacaaacagacgggaccttggaacttgcatatcaaaggcactgccgccaacactaaaatcgatggatatggctcgtcctgtcatgctggtgcagctcttgaaggcctctgctacacgaaaggaaccattgacggctcctcggaatactacttcaactacacgacctacaacaaggttgaaggccacaataccggaattctgacctggaacctaccttacaccggcgaagacaacatgctccactatgtttcgcagggaatgagcctggaatatcaacccaacagcaatgttgctggagcgttgtttggcttcgataatggcttccaagtcggatggaatagccagaatgagctattcggatttggttatgaggacgactctacattcaagccaaacacgccgcctaagccgaccgatagcaaagccttatatcaatgggctgtctgctggcaataccttggtggatattactatcaatccgttgcatggatccaaagtgggaagccacacaaccctacatgcgagacggtcgaaatcaccagaaagaaggcgacataagtcaatctgatactgtccgcctgtgcaacgcccgggaccgttcgaggtcgttgtacatcgatattcttactggaatgaccacgcgtagacagttcctgaagaggggagtcgatatgttaatgtttaatgaaggaatgttggactcactagattaggcaaagcaacataatgtcatagccggagtagcccatagtagctcttgtacattagtctagcgaacaagaattgcttttgtcatagaacattgaagttcatccattagtagtagtcgtgaagcgatatgtacccaaagtgatcgtcttggctcagaattgacgcagaaaccatcccaaacgaacacatagaaacccctcacgatcaa

SEQ ID NO: 7430 - DNA, 717 bp, Muscodor strobelii
  misc_feature: SGI cDNA ID NO. 562240
  misc_feature: Encodes the peptide sequence at SEQ ID NO 7431
atgtcgtcattcaaccgcagcgaacgcgcccccgtcgttcgggagaataatattgtggacaggctagtccagctcgtctattcctcgaattttatcgaattgacaggaaccacttacgaaattactgatcaactttgccgcaaagtgttcactgacgagaaagtcgaagcacaagtcgacaagacatcatcagactatcacgtttcactcgatggattgctaaagctcaagcacaatgcagactggaaatctatcagttatgaagacgtcattcgtagtagacgagaggtcataaatcacgctgtggctctccgttttgctatcgatcaatttgttttgaacttaccggagtacatggcggctctcgtacaagatctcgagaacgacttggctacggttgagaagaccgacgagtttgacgtttatgatctggcgagtcggtattgtcatcgcttcgtatgtatccatccgtttggcgatggcaatgggagggtgtgcaggatcattctcaatataatattgctgaaatacggcggcttcgtcacccccttcggtggctcggaggaagaacgtcgtgagtatctcgaccttgctcaacgcgcaagccagaagttttacgcagaagatatggaagtacctgaaagccaaaaaactgggcatcgcgagctcaccgcgtacatcgtcaagaagtcttcgagtaaattgacagaaggttga

SEQ ID NO: 7431 - protein, 238 aa, Muscodor strobelii
  misc_feature: SGI Peptide ID NO. 562240
  misc_feature (74)..(204): Pfam Id: PF02661 Pfam Desc: Fic protein family
  misc_feature (116)..(204): Pfam Id: PF02661 Pfam Desc: Fic protein family
  misc_feature (7)..(235): NCBI GI: 255936977 Blast Desc: Pc13g10950 [Penicillium chrysogenum Wisconsin 54-1255] gi|211584135|emb|CAP92164.1| Pc13g10950 [Penicillium chrysogenum Wisconsin 54-1255]
  misc_feature (4)..(235): NCBI GI: 46123435 Blast Desc: FG06095.1 [Gibberella zeae PH-1]
  misc_feature (18)..(235): NCBI GI: 46124381 Blast Desc: FG06568.1 [Gibberella zeae PH-1]
  misc_feature (15)..(236): NCBI GI: 256725627 Blast Desc: NECHADRAFT_43746 [Nectria haematococca mpVI 77-13-4]
  misc_feature (22)..(237): NCBI GI: 256726539 Blast Desc: NECHADRAFT_93055 [Nectria haematococca mpVI 77-13-4]
  misc_feature (20)..(231): NCBI GI: 46124355 Blast Desc: FG06555.1 [Gibberella zeae PH-1]
  misc_feature (123)..(204): NCBI GI: 56419287 Blast Desc: huntingtin interacting protein E-like protein [Geobacillus kaustophilus HTA426] gi|56379129|dbj|BAD75037.1| huntingtin interacting protein E-like protein [Geobacillus
  misc_feature (23)..(204): NCBI GI: 67459700 Blast Desc: Fic [Rickettsia felis URRWXCal2] gi|67005233|gb|AAY62159.1| Fic [Rickettsia felis URRWXCal2]
  misc_feature (23)..(202): NCBI GI: 255524954 Blast Desc: filamentation induced by cAMP protein Fic [Clostridium carboxidivorans P7] gi|255511326|gb|EET87619.1| filamentation induced by cAMP protein Fic [Clostridium carboxidivorans P7]
  misc_feature (110)..(204): NCBI GI: 66811064 Blast Desc: DDB_G0283145 [Dictyostelium discoideum AX4] gi|60467888|gb|EAL65902.1| DDB_G0283145 [Dictyostelium discoideum AX4]
MSSFNRSERAPVVRENNIVDRLVQLVYSSNFIELTGTTYEITDQLCRKVFTDEKVEAQVDKTSSDYHVSLDGLLKLKHNADWKSISYEDVIRSRREVINHAVALRFAIDQFVLNLPEYMAALVQDLENDLATVEKTDEFDVYDLASRYCHRFVCIHPFGDGNGRVCRIILNIILLKYGGFVTPFGGSEEERREYLDLAQRASQKFYAEDMEVPESQKTGHRELTAYIVKKSSSKLTEG

SEQ ID NO: 7432 - DNA, 1614 bp, Muscodor strobelii
  misc_feature: SGI cDNA ID NO. 562241
  misc_feature: Encodes the peptide sequence at SEQ ID NO 7433
atgtcgggcttcgctgaaggcgttgaagtcaaagagtccgcgatcgacggcgctggtcgaggcctgtttgctacgaaggacttttcacctggagatgtcgtcttctcggcggaccgcccacttgtggccgagcttagtgccgagcgaatgctagacacatgtggatggtgtactcagcgcgcggcgaccgacccaatggagcgcaccgcgtccgctgccatgggccttccgagcggtctcatcgaggtaaaaagctgcgtcggctgtaagagagtcgcgtattgctccaagaagtgccagtccaaagcttggaagagagagcacaagtacgagtgcaaggccatcagccccgatgacagagaccagctctctgcgcatgtgcgtgcagtcatcaaaatgttaggccgcctgaaagcagaatacgagaaagagatttttacggtatcagaaattatgaagtttctgcctgcgagagataaagatttcaaggaggagtataagaagcaagatgaggagagatacaaggagctgtatcttcttggtaacggagcctgggtcttcagcgacaggccgaaaatcagggaccacgacagtctcgctatttcattcgccatcttagtgactatcttcttcaatgcctttgacatcgggagtccgctagacaacatgaccgtaggcttcggcttcgatcccactgtctgtagtgcaaatcactcttgcgagccaaatgttgcgcttgtgcaccttcagcctcgtatcgaacttcgggctcttcaaccgatcaagataggccaagagatactaatggagtatacccaggtcacgaacccatttactctacgccaagcagatctaaaaaagaggtacctatttgattgcaagtgctccaagtgcatcaagggcttcagcccagatcagtttctccagccgcaggacaaattgcaaggcatctatctcaagacagcaaagaaacttgtcgaacagcaccaagcggacatagcaaaacacttgatgccaggaagcgatgaggagctgcaaaagcaactcgctgccatccaagcagctgcgtatgcagttctcgaagaccacgacgccagttcagatgatttgaaggagatgctacagctatgtctcgggtccggaaagtggaggtggacgcgccagcctgtgcccgctctctgtcgccgtctctttgagaaatacatgaatactggcgacctctacaaagcattccggataggtctcaagctgcacttagagataatgcccattttataccctgccccgtttcattctgaccgcattatactcgcgtggacgatctcatatatcactaatatactctccagtccggctatgtcagagatctacaagtctttcttgcaaagcgggttggagatgagactgatctactatggattcttgttctatgcctacgagaatatcccttcgatgtacgggtgggactctccggttggaaggctgatcgaatacactcataagcagatcatggctggtacaacagcctcgagggcagatattgaggcatctctggtgaacgtgtggccatcgctggaaacgctggctcgtagtgttgccgccaccactatctag

SEQ ID NO: 7433 - protein, 537 aa, Muscodor strobelii
  misc_feature: SGI Peptide ID NO. 562241
  misc_feature (79)..(112): Pfam Id: PF01753 Pfam Desc: MYND finger
  misc_feature (237)..(278): Pfam Id: PF00856 Pfam Desc: SET domain
  misc_feature (84)..(112): Pfam Id: PF01753 Pfam Desc: MYND finger
  misc_feature (17)..(484): NCBI GI: 121715400 Blast Desc: SET and MYND domain protein, [Aspergillus clavatus NRRL 1] gi|119403466|gb|EAW13883.1| SET and MYND domain protein, [Aspergillus clavatus NRRL 1]
  misc_feature (6)..(448): NCBI GI: 238845222 Blast Desc: histone methyltransferase SmyD1b [Microsporum canis CBS 113480]
  misc_feature (17)..(446): NCBI GI: 119480927 Blast Desc: SET and MYND domain protein, [Neosartorya fischeri NRRL 181] gi|119408646|gb|EAW18595.1| SET and MYND domain protein, [Neosartorya fischeri NRRL 181]
  misc_feature (17)..(448): NCBI GI: 71001320 Blast Desc: SET and MYND domain protein [Aspergillus fumigatus Af293] gi|66852979|gb|EAL93303.1| SET and MYND domain protein, [Aspergillus fumigatus Af293]
  misc_feature (17)..(448): NCBI GI: 159129417 Blast Desc: SET and MYND domain protein, [Aspergillus fumigatus A1163]
  misc_feature (10)..(487): NCBI GI: 255950300 Blast Desc: Pc22g20170 [Penicillium chrysogenum Wisconsin 54-1255] gi|211592934|emb|CAP99305.1| Pc22g20170 [Penicillium chrysogenum Wisconsin 54-1255]
  misc_feature (19)..(442): NCBI GI: 225561846 Blast Desc: MYND finger family protein [Ajellomyces capsulatus G186AR]
  misc_feature (19)..(478): NCBI GI: 240275453 Blast Desc: MYND finger family protein [Ajellomyces capsulatus H143]
  misc_feature (19)..(455): NCBI GI: 239607850 Blast Desc: SET and MYND domain-containing protein [Ajellomyces dermatitidis ER-3]
  misc_feature (19)..(455): NCBI GI: 261198320 Blast Desc: SET and MYND domain-containing protein [Ajellomyces dermatitidis SLH14081] gi|239595525|gb|EEQ78106.1| SET and MYND domain-containing protein [Ajellomyces dermatitidis SLH14081]
  misc_feature (6)..(298): SWISSPROT Homolog: EC 2.1.1.43 Histone-lysine N-methyltransferase
MSGFAEGVEVKESAIDGAGRGLFATKDFSPGDVVFSADRPLVAELSAERMLDTCGWCTQRAATDPMERTASAAMGLPSGLIEVKSCVGCKRVAYCSKKCQSKAWKREHKYECKAISPDDRDQLSAHVRAVIKMLGRLKAEYEKEIFTVSEIMKFLPARDKDFKEEYKKQDEERYKELYLLGNGAWVFSDRPKIRDHDSLAISFAILVTIFFNAFDIGSPLDNMTVGFGFDPTVCSANHSCEPNVALVHLQPRIELRALQPIKIGQEILMEYTQVTNPFTLRQADLKKRYLFDCKCSKCIKGFSPDQFLQPQDKLQGIYLKTAKKLVEQHQADIAKHLMPGSDEELQKQLAAIQAAAYAVLEDHDASSDDLKEMLQLCLGSGKWRWTRQPVPALCRRLFEKYMNTGDLYKAFRIGLKLHLEIMPILYPAPFHSDRIILAWTISYITNILSSPAMSEIYKSFLQSGLEMRLIYYGFLFYAYENIPSMYGWDSPVGRLIEYTHKQIMAGTTASRADIEASLVNVWPSLETLARSVAATTI

SEQ ID NO: 7434 - DNA, 2026 bp, Muscodor strobelii
  misc_feature: SGI EST ID NO. CUFF.18450.0
  misc_feature: Variant of the nucleotide sequence at SEQ ID NO 7432
tccaggtattcaccgccgggaatgggattgtcgatcatgcacctgctcatcaacatgattgaatcaaagctataaaatacaacaaaattcttcgctcacattgacgttgcaagatcacactgcccatttggaatcgcagccagcccaaagcgcggaaccggagtattggcgatgtcgggcttcgctgaaggcgttgaagtcaaagagtccgcgatcgacggcgctggtcgaggcctgtttgctacgaaggacttttcacctggagatgtcgtcttctcggcggaccgcccacttgtggccgagcttagtgccgagcgaatgctagacacatgtggatggtgtactcagcgcgcggcgaccgacccaatggagcgcaccgcgtccgctgccatgggccttccgagcggtctcatcgaggtaaaaagctgcgtcggctgtaagagagtcgcgtattgctccaagaagtgccagtccaaagcttggaagagagagcacaagtacgagtgcaaggccatcagccccgatgacagagaccagctctctgcgcatgtgcgtgcagtcatcaaaatgttaggccgcctgaaagcagaatacgagaaagagatttttacggtatcagaaattatgaagtttctgcctgcgagagataaagatttcaaggaggagtataagaagcaagatgaggagagatacaaggagctgtatcttcttggtaacggagcctgggtcttcagcgacaggccgaaaatcagggaccacgacagtctcgctatttcattcgccatcttagtgactgtatgcatgaaaatcccacctcttcgtattaagctcacgggtgcattttcttagatcttcttcaatgcctttgacatcgggagtccgctagacaacatgaccgtaggcttcggcttcgatcccactgtctgtagtgcaaatcactcttgcgagccaaatgttgcgcttgtgcaccttcagcctcgtatcgaacttcgggctcttcaaccgatcaagataggccaagagatactaatggagtatacccaggtcacgaacccatttactctacgccaagcagatctaaaaaagaggtacctatttgattgcaagtgctccaagtgcatcaagggcttcagcccagatcagtttctccagccgcaggacaaattgcaaggcatctatctcaagacagcaaagaaacttgtcgaacagcaccaagcggacatagcaaaacacttgatgccaggaagcgatgaggagctgcaaaagcaactcgctgccatccaagcagctgcgtatgcagttctcgaagaccacgacgccagttcagatgatttgaaggagatgctacagctatgtctcgggtccggaaagtggaggtggacgcgccagcctgtgcccgctctctgtcgccgtctctttgagaaatacatgaatactggcgacctctacaaagcattccggataggtctcaagctgcacttagagataatgcccattttataccctgccccgtttcattctgaccgcattatactcgcgtggacgatctcatatatcactaatatactctccagtccggctatgtcagagatctacaagtctttcttgcaaagcgggttggagatgagactgatctactatggattcttgttctatgcctacgagaatatcccttcgatgtacgggtgggactctccggttggaaggctgatcgaatacactcataagcagatcatggctggtacaacagcctcgagggcagatattgaggcatctctggtgaacgtgtggccatcgctggaaacgctggctcgtagtgttgccgccaccactatctagaggacggttgcttttatgagatgataattactatcttgaacatgggatgtttggtgatcatcgccttaaataaacattcgttatccgtaattatggagggcttggtccacgggtggctgcctctggtatatccagccgaggaaataacattacgacgtgacgccaataatcaatcattacattcatg

SEQ ID NO: 7435 - DNA, 1644 bp, Muscodor strobelii
  misc_feature: SGI cDNA ID NO. 562242
  misc_feature: Encodes the peptide sequence at SEQ ID NO 7436
atgactgaccaagcggaaacaggcagctctactgccgaaaccgcactcgagacgggcgcggccacctcatctcatcgagcaaaacctatccgattctacatggctttcctgtccctcgtcatcatggtaatactggtgtccctagacgccactgggttgtctgtagccattccagtcatcactcgtgagctacatggcacaagtcttgatggattctgggccaatctgactttcttacttgctgtggtcgtcactcaaccattatatgtcagcgcgtcagatgtcatcggccggaagccgctactcaacgctgcttttctactctttgctattggttccatcatatttgccacagctcgctccatggcggctgttatcgtgggacgccttgtgcaaggactcggcgggggcggacttgatgttctaaacgagatactaatttgcgatatcacgaccttgaaggagcgacccctctggattggacttctttctgtgcctctcgcagtcggttccattcttggaccagtagtcggggccttgttcacgcagtttgtcagctggaggtttatcggctggattaacctgcctttggtggccattggttttggacttgctgcctacagtctccgcctcaaaccgattgaggggtcgtttctctcacgagtacgtcgcctagattggttcggaatgtcgctctttgctgtaggatgtactgctttcgcattgcccttgagctggggcggtgctctttacccatggtcgtcctggcgcaccatacttccctttataatcggtttcttagtgctagtttcattcggtatatacgaggcaaagcccaaagaaccggtcgtaccatatcgtttattccgatcgaaaacatcgatagcgaccttcgtgggcgggttcatacatgggctggtggtgtaccctcttttactgtacctcccgctattcttccaagcggtttacctagaagatccgcttcaggcagcgatttctatcctacctctagatgctgcgctcattgggttcaccgccatttccggcattcttgtcgaacatcttcgccattatcgatggcagctctgggcaggatgggccacagttgcgttaggcgttggtctgtttgctctttggggaaacaacttttcgcgcgctgagaccgcgagctttcaagttctcgccgcaatcggtcttggcattcactatgtcgtccctgcactgtctgcgcaagcgagtgcgccggcgatcaacgatcagggtctggcggtgggaacactcgtatcgtttcggctcttcggagctttgattggactggcaatcggatctgcgatctttagcaatgctttcgatcgtgccatttcatctctaggatctcttcctcagtccgtggctctgctcaatgactccgcaaatgcggttggattcattcccaatctcagagacgcagatatatctccgcagctaagagatgatatacgcatggtctatgatgaggcgatgcgcgtgatatggtatttcctaagtgccacaagtgcgttaggcttctttacttcatttcttgtagaagacctgtccatcgaaaccgaagacgttggggcacagcacatggtacagcctggttctacggaaaaaggtgtataa

SEQ ID NO: 7436 - protein, 547 aa, Muscodor strobelii
  misc_feature: SGI Peptide ID NO. 562242
  misc_feature (39)..(439): Pfam Id: PF07690 Pfam Desc: Major Facilitator Superfamily
  misc_feature (93)..(138): Pfam Id: PF00083 Pfam Desc: Sugar (and other) transporter
  misc_feature (4)..(544): NCBI GI: 238837482 Blast Desc: conserved [Microsporum canis CBS 113480]
  misc_feature (5)..(536): NCBI GI: 212541558 Blast Desc: conserved [Penicillium marneffei ATCC 18224] gi|210068233|gb|EEA22325.1| conserved [Penicillium marneffei ATCC 18224]
  misc_feature (3)..(536): NCBI GI: 242798324 Blast Desc: efflux pump antibiotic resistance protein, [Talaromyces stipitatus ATCC 10500] gi|218716491|gb|EED15912.1| efflux pump antibiotic resistance protein, [Talaromyces ATCC
  misc_feature (4)..(536): NCBI GI: 145244066 Blast Desc: An11g05550 [Aspergillus niger] gi|134079229|emb|CAK40712.1| protein product [Aspergillus niger]
  misc_feature (1)..(542): NCBI GI: 238844662 Blast Desc: conserved [Microsporum canis CBS 113480]
  misc_feature (1)..(535): NCBI GI: 189209736 Blast Desc: conserved [Pyrenophora tritici-repentis Pt-1C-BFP] gi|187977293|gb|EDU43919.1| conserved [Pyrenophora tritici-repentis Pt-1C-BFP]
  misc_feature (4)..(536): NCBI GI: 70998863 Blast Desc: MFS transporter [Aspergillus fumigatus Af293] gi|66851790|gb|EAL92115.1| MFS transporter, [Aspergillus fumigatus Af293] gi|159127171|gb|EDP52286.1| MFS transporter,
  misc_feature (1)..(536): NCBI GI: 255941930 Blast Desc: Pc16g14370 [Penicillium chrysogenum Wisconsin 54-1255] gi|211586357|emb|CAP94107.1| Pc16g14370 [Penicillium chrysogenum Wisconsin 54-1255]
  misc_feature (21)..(536): NCBI GI: 189211947 Blast Desc: conserved [Pyrenophora tritici-repentis Pt-1C-BFP] gi|187979500|gb|EDU46126.1| conserved [Pyrenophora tritici-repentis Pt-1C-BFP]
  misc_feature (28)..(536): NCBI GI: 212539886 Blast Desc: conserved [Penicillium marneffei ATCC 18224] gi|210067397|gb|EEA21489.1| conserved [Penicillium marneffei ATCC 18224]
MTDQAETGSSTAETALETGAATSSHRAKPIRFYMAFLSLVIMVILVSLDATGLSVAIPVITRELHGTSLDGFWANLTFLLAVVVTQPLYVSASDVIGRKPLLNAAFLLFAIGSIIFATARSMAAVIVGRLVQGLGGGGLDVLNEILICDITTLKERPLWIGLLSVPLAVGSILGPVVGALFTQFVSWRFIGWINLPLVAIGFGLAAYSLRLKPIEGSFLSRVRRLDWFGMSLFAVGCTAFALPLSWGGALYPWSSWRTILPFIIGFLVLVSFGIYEAKPKEPVVPYRLFRSKTSIATFVGGFIHGLVVYPLLLYLPLFFQAVYLEDPLQAAISILPLDAALIGFTAISGILVEHLRHYRWQLWAGWATVALGVGLFALWGNNFSRAETASFQVLAAIGLGIHYVVPALSAQASAPAINDQGLAVGTLVSFRLFGALIGLAIGSAIFSNAFDRAISSLGSLPQSVALLNDSANAVGFIPNLRDADISPQLRDDIRMVYDEAMRVIWYFLSATSALGFFTSFLVEDLSIETEDVGAQHMVQPGSTEKGV

SEQ ID NO: 7437 - DNA, 1179 bp, Muscodor strobelii
  misc_feature: SGI EST ID NO. CUFF.18423.0
  misc_feature: Variant of the nucleotide sequence at SEQ ID NO 7435
tgtcgctctttgctgtaggatgtactgctttcgcattgcccttgagctggggcggtgctctttacccatggtcgtcctggcgcaccatacttccctttataatcggtttcttagtgctagtttcattcggtatatacgaggcaaagcccaaagaaccggtcgtaccatatcgtttattccgatcgaaaacatcgatagcgaccttcgtgggcgggttcatacatgggctggtggtgtaccctcttttactgtacctcccgctattcttccaagcggtttacctagaagatccgcttcaggcagcgatttctatcctacctctagatgctgcgctcattgggttcaccgccatttccggcattcttgtcgaacatcttcgccattatcgatggcagctctgggcaggatgggccacagttgcgttaggcgttggtctgtttgctctttggggaaacaacttttcgcgcgctgagaccgcgagctttcaagttctcgccgcaatcggtcttggcattcactatgtcgtccctgcactgtctgcgcaagcgagtgcgccggcgatcaacgatcagggtctggcggtgggaacactcgtatcgtttcggctcttcggagctttgattggactggcaatcggatctgcgatctttagcaatgctttcgatcgtgccatttcatctctaggatctcttcctcagtccgtggctctgctcaatgactccgcaaatgcggttggattcattcccaatctcagagacgcagatatatctccgcagctaagagatgatatacgcatggtctatgatgaggcgatgcgcgtgatatggtatttcctaagtgccacaagtgcgttaggcttctttacttcatttcttgtagaagacctgtccatcgaaaccgaagacgttggggcacagcacatggtacagcctggttctacggaaaaaggtgtataagcataagcaagataacccttttgtagtgaagcgtcatttcccactcatatacgtgatggcgtgatcaggtctggatgtgacatggagagaatggcacagacctcgtgtggcaaactcaagggaacttggaacttacatactgtgcttcgtgatgagacactaggtctctttcttaatcctcagccctatttatggtcttgttggcagtcctagtcaagcaagc

SEQ ID NO: 7438 - DNA, 1944 bp, Muscodor strobelii
  misc_feature: SGI cDNA ID NO. 562243
  misc_feature: Encodes the peptide sequence at SEQ ID NO 7439
atgataagttcgccagacttccgtcgttcgaacgggagaattccggcctgcgaaccatgtaagcaaagaaaagttgcatgtgatcacaatcatcccagctgctcaagatgcgtcaaacgaggacaagaaaccgaatgcgtgtaccttgatcacgaatcttcaagaccattaagacgccgtcgtcatgatcacgatgcgtcgcggtcgacgcccgctaaccggctaagcacaagtggccaacctacaagtccggatccggcgtcgacgtcgacaggatatctcggtttcaccagcttctcttcagttttcaaggagaccggcatactgtctgatgatgttgcgagcgccgctgacaaacatcattctgtcaattcttcgatcaccataccgatccaagttcgggatgcatgcgtggcactgctgcaacgaatacctgaatcgacaagggcggcacaactcctttgcaaacgagctgccccgttggaaggctggatgaaaccagttgcggaacgacttctggaatcactgttccaaaatttcggacagtactttggccgcagccgcaaacccgccgatcttgttgcattagccgaacagctttgtgccaataccagcgccccgttttcggataacgagcagacttttgaggcttggatagcgcaattctctggatcgaaaatgcgatgggagtctatcggcatactgttctgcttctgggacgaggatagccccacctcacgagccgatattgacggttgggcttctgtgaacagagagagtctgaatatctgcgttgatatctgcagaagtctttcaagaggtaatagtcttatgctttatctgacccatcgtcgaatggttgctgaaacgttgttctctggtgacgccagcctggcaacttggagacttcatggagaggtcatttcccttctaacgttcttgggcttccacgcagaggcgaatgattccgagtatcatcccacttttgtctctgaaatgaaacgcaggctattcgcaattatttataactttcacgtaatttgtgtgtcattcactgggagacccccgttgattaacaataactatctgaccacttctctgcccctggatcttgacgacgaatacactgcttttaaccaagtcgatttggcagacaagcttgacggccgaggctggagcaaggaaggtggactgcattcaacgacattcattcgagcgtggggtatgcttgctgcaatacgggaagaaatattttgtattgcacttggcaaaagtcataatcctggcgtttcttatacgctaacgctacttaagaaacgagagctggataccgtgtctgaattcccctcatcgctggaccataacattgaggacttggttaactcacgcgaagatatcatcgcactgtatgcgagacttgtaatacggctcgaacaccttcagaacttgttttttgtcgagagattgctcctccggcatggtcaagtagacgaaggcagccttctagctgttagctttgagatggtgacttgtacgctctacttttggacacatttagatcgactgcttgcagtgcggcgtgactgcgaatggcttgtgatgtcctacgctgcgccggcaggcggaatcctttgcatggaacttctcaagcctagaccagatatagcagacaagaatggcatcaatcgatcaaagattgtccagaaacttagtttacttgttggttatcttgactgggtcaatccctctggtcccaatggaaagctttgccagacatgcaaagtggtaatcgaacacgtcctggatcaagctatcaacgatgtcaatatggacacgcgtattgcttctccggacccgtatctcaactttgaatttcctcctgaattgaatttcaatttcgatttgcttgatacattcgaatggatgcgaccggagccagcatga

SEQ ID NO: 7439 - protein, 647 aa, Muscodor strobelii
  misc_feature: SGI Peptide ID NO. 562243
  misc_feature (15)..(56): Pfam Id: PF00172 Pfam Desc: Fungal Zn(2)-Cys(6) binuclear cluster domain
  misc_feature (280)..(374): Pfam Id: PF04082 Pfam Desc: Fungal specific transcription factor domain
  misc_feature (291)..(374): Pfam Id: PF04082 Pfam Desc: Fungal specific transcription factor domain
  misc_feature (9)..(645): NCBI GI: 261360600 Blast Desc: conserved [Verticillium albo-atrum VaMs.102]
  misc_feature (135)..(645): NCBI GI: 261353905 Blast Desc: conserved [Verticillium albo-atrum VaMs.102]
  misc_feature (92)..(643): NCBI GI: 256727516 Blast Desc: NECHADRAFT_91033 [Nectria haematococca mpVI 77-13-4]
  misc_feature (1)..(538): NCBI GI: 256730689 Blast Desc: NECHADRAFT_29793 [Nectria haematococca mpVI 77-13-4]
  misc_feature (1)..(532): NCBI GI: 46109666 Blast Desc: FG01715.1 [Gibberella zeae PH-1]
  misc_feature (8)..(606): NCBI GI: 145604402 Blast Desc: MGG_13994 [Magnaporthe grisea 70-15] gi|145012402|gb|EDJ97058.1| MGG_13994 [Magnaporthe grisea 70-15]
  misc_feature (61)..(642): NCBI GI: 46136455 Blast Desc: FG09743.1 [Gibberella zeae PH-1]
  misc_feature (5)..(642): NCBI GI: 145244921 Blast Desc: An11g07610 [Aspergillus niger] gi|134079423|emb|CAK45955.1| protein product [Aspergillus niger]
  misc_feature (5)..(646): NCBI GI: 145250989 Blast Desc: An15g04740 [Aspergillus niger] gi|134082535|emb|CAK42451.1| protein product [Aspergillus niger]
  misc_feature (84)..(533): NCBI GI: 256722753 Blast Desc: NECHADRAFT_53159 [Nectria haematococca mpVI 77-13-4]
MISSPDFRRSNGRIPACEPCKQRKVACDHNHPSCSRCVKRGQETECVYLDHESSRPLRRRRHDHDASRSTPANRLSTSGQPTSPDPASTSTGYLGFTSFSSVFKETGILSDDVASAADKHHSVNSSITIPIQVRDACVALLQRIPESTRAAQLLCKRAAPLEGWMKPVAERLLESLFQNFGQYFGRSRKPADLVALAEQLCANTSAPFSDNEQTFEAWIAQFSGSKMRWESIGILFCFWDEDSPTSRADIDGWASVNRESLNICVDICRSLSRGNSLMLYLTHRRMVAETLFSGDASLATWRLHGEVISLLTFLGFHAEANDSEYHPTFVSEMKRRLFAIIYNFHVICVSFTGRPPLINNNYLTTSLPLDLDDEYTAFNQVDLADKLDGRGWSKEGGLHSTTFIRAWGMLAAIREEIFCIALGKSHNPGVSYTLTLLKKRELDTVSEFPSSLDHNIEDLVNSREDIIALYARLVIRLEHLQNLFFVERLLLRHGQVDEGSLLAVSFEMVTCTLYFWTHLDRLLAVRRDCEWLVMSYAAPAGGILCMELLKPRPDIADKNGINRSKIVQKLSLLVGYLDWVNPSGPNGKLCQTCKVVIEHVLDQAINDVNMDTRIASPDPYLNFEFPPELNFNFDLLDTFEWMRPEPA

SEQ ID NO: 7440 - DNA, 388 bp, Muscodor strobelii
  misc_feature: SGI EST ID NO. CUFF.18433.0
  misc_feature: Variant of the nucleotide sequence at SEQ ID NO 7438
gacgaaggcagccttctagctgttagctttgagatggtgacttgtacgctctacttttggacacatttagatcgactgcttgcagtgcggcgtgactgcgaatggcttgtgatgtcctacgctgcgccggcaggcggaatcctttgcatggaacttctcaagcctagaccagatatagcagacaagaatggcatcaatcgatcaaagattgtccagaaacttagtttacttgttggttatcttgactgggtcaatccctctggtcccaatggaaagctttgccagacatgcaaagtggtaatcgaacacgtcctggatcaagctatcaacgatgtcaatatggacacgcgtattgcttctccggacccgtatctcaactttgaatttc

SEQ ID NO: 7441 - DNA, 483 bp, Muscodor strobelii
  misc_feature: SGI cDNA ID NO. 562244
  misc_feature: Reduced expression when VOC is produced
  misc_feature: Encodes the peptide sequence at SEQ ID NO 7442
atgggtcacgccgcggggcttcgcgctggtactcgctatgccttctcaagaaatttccgccagaagggtatgatcgccctgtccacgtatctcagacagtacaaggtcggagacatcgtcgacatcaaagccaacgccgcagtgcagaagggcatgccccacaaggtctaccatggcaagaccggtgtcgtctacaacgtcaccaagagcgccgtcggtgtcatcatctacaagaaggtcggcaaccgctacctcgagaagcgcgtgaacctccgcgtcgagcacgtctcgctctcccgatcccgcgaggacttcatcaagcgtgtcaagagcaacgctgctgctaagaaagaggccaaggccaacggaaccaccgtcgaggtcaagagactgcccgccatgccccgcgaagccagaacggtgtcctggaaggacaaccaccccgagaccgtcgtccccctcgcctacgagacgactatctga

SEQ ID NO: 7442 - protein, 160 aa, Muscodor strobelii
  misc_feature: SGI Peptide ID NO. 562244
  misc_feature (2)..(100): Pfam Id: PF01157 Pfam Desc: Ribosomal protein L21e
  misc_feature (1)..(160): NCBI GI: 156056565 Blast Desc: 60S ribosomal protein L21 [Sclerotinia sclerotiorum 1980] gi|31790194|gb|AAP58401.1| ribosomal protein Srp1 [Sclerotinia sclerotiorum] gi|154701799|gb|EDO01538.1| 60S L21
  misc_feature (1)..(160): NCBI GI: 154291727 Blast Desc: 60S ribosomal protein L21 [Botryotinia fuckeliana B05.10] gi|150846654|gb|EDN21847.1| 60S ribosomal protein L21 [Botryotinia fuckeliana B05.10]
  misc_feature (1)..(160): NCBI GI: 261353446 Blast Desc: 60S ribosomal protein L21-A [Verticillium albo-atrum VaMs.102]
  misc_feature (1)..(160): NCBI GI: 256734235 Blast Desc: [Nectria haematococca mpVI 77-13-4]
  misc_feature (1)..(160): NCBI GI: 116193755 Blast Desc: CHGG_06595 [Chaetomium globosum CBS 148.51] gi|88182508|gb|EAQ89976.1| CHGG_06595 [Chaetomium globosum CBS 148.51]
  misc_feature (1)..(160): NCBI GI: 171676141 Blast Desc: protein product [Podospora anserina] gi|170936136|emb|CAP60796.1| protein product [Podospora anserina]
  misc_feature (1)..(160): NCBI GI: 85112051 Blast Desc: NCU01948 [Neurospora crassa OR74A] gi|28926005|gb|EAA34996.1| conserved [Neurospora crassa OR74A] gi|88866506|gb|ABD57301.1| [Neurospora crassa]
  misc_feature (1)..(160): NCBI GI: 46129439 Blast Desc: FG08895.1 [Gibberella zeae PH-1]
  misc_feature (1)..(160): NCBI GI: 169596446 Blast Desc: SNOG_00986 [Phaeosphaeria nodorum SN15] gi|111071361|gb|EAT92481.1| SNOG_00986 [Phaeosphaeria nodorum SN15]
  misc_feature (1)..(160): NCBI GI: 119192002 Blast Desc: 60S ribosomal protein [Coccidioides immitis RS] gi|240106265|gb|EER24458.1| 60S ribosomal protein L21-B, [Coccidioides posadasii C735 delta SOWgp]
  misc_feature: Useful for introducing or modulating the production of volatile compounds
MGHAAGLRAGTRYAFSRNFRQKGMIALSTYLRQYKVGDIVDIKANAAVQKGMPHKVYHGKTGVVYNVTKSAVGVIIYKKVGNRYLEKRVNLRVEHVSLSRSREDFIKRVKSNAAAKKEAKANGTTVEVKRLPAMPREARTVSWKDNHPETVVPLAYETTI

SEQ ID NO: 7443 - DNA, 1686 bp, Muscodor strobelii
  misc_feature: SGI EST ID NO. CUFF.18872.2
  misc_feature: Variant of the nucleotide sequence at SEQ ID NO 7441
cttgtacctagcgggcagaaagcagaaacctggaccagcacagtggcagagtcgggagcagcccaccaacgccaaaaaattaaccgccagccaattcctcacgaagccgtcattatcgccaacccgacaacctcacctcacctccgccgataatccccacgacaccacaacaccgtcacaatgggtcacgccgcggggcttcgcgctggtactcgctatgccttctcaagaaatttccgccagaagggtatgatcgccctgtccacgtatctcagacagtacaaggtcggagacatcgtcgacatcaaagccaacgccgcagtgcagaagggcatgccccacaaggtctaccatggcaagaccggtgtcgtctacaacgtcaccaagagcgccgtcggtgtcatcatctacaagaaggtcggcaaccgctacctcgagaagcgcgtgaacctccgcgtcgagcacgtctcgctctcccgatcccgcgaggacttcatcaagcgtgtcaagagcaacgctgctgctaagaaagaggccaaggccaacggaaccaccgtcgaggtcaagagactgcccgccatgccccgcgaagccagaacggtgtcctggaaggacaaccaccccgagaccgtcgtccccctcgcctacgagacgactatctgagcttgtggtctttttcggttgttgcggcgggaatggtgttttctgggtctgccggttgtttttctcattgcattaagggtctttttcacgtggccaggaacggaatcaatactctgagcatggcaggggaacgaatgggcatcatccacgcgaatgcctagaggaaaataaaacaaaaatataccaaatgcccataccactttggtccctcggtctgttgagctggtgatatgcagatccccggtcgagatagtgtctcatctggcacaaggctctggacttacgacaaagctggggataaggctggggattgatccggcggctgatcgcggtttatagcgcagtttgattccgagcaatcacgcgtctgaataaaatgaggctcacgatgtaccacgaaatggaccttgataaaactatgaagcaactcaaaacaagagattcccaaatgctcatgcgccgtgtctcctctctgtcctctttccaattcactgacagtaaccctctaaccattcttgacagcaatttcgtaacttggcggtggaactgtgtcctctgaagcatcatgctcaatatccccgtctttcacatcgcccttctgcagctcgtcttcttcatagtctcgagtagctccgattgaagattgactataggtatccttcaccttcgcagcctcttttgcggccctgtgctcacgaatactattgatcaagagcataactaggctacggcatgggcgttgccgttgtctgccgcagcatcgtctttggggttgagtctggacgtaagatgtaaactctgcagggttggtgtaaatgcggtttctgttgcagcacatttcgagatcgggtgcttgatgaagtgatgttacgtgagatttttttaatgagccaggtgattgttgactacagtttcaatagactttgggcccgctatgatttggtagtccttgtatttcgatgagaatggacatgaataattagtgatgagaaatctcaagttatatatatcgttctcttcgta

SEQ ID NO: 7444 - DNA, 576 bp, Muscodor strobelii
  misc_feature: SGI cDNA ID NO. 562245
  misc_feature: Reduced expression when VOC is produced
  misc_feature: Encodes the peptide sequence at SEQ ID NO 7445
atggcccctttgtcgtactccaagaccgccaaggtcccccgccgccccttcgaggccgcccgacttgactccgagttgaagctcgttggcgagtacggtctccgcaacaagcgcgaggtgtggcgcgtccagctcaccctctccaagatccgtcgtgctgcccgtcagcttcttactcttgacgagaaggaccccaagcgtctcttcgaaggcaatgccctcattcgccgtctcgtacgcatcggtgtgctcgacgagtcccgcatgaagctcgattacgtcttggccctcaaggtcgaagatttcatggagcgccgcctccagacctgcgtctacaagctcggtctcgccaagtccatccaccacgcccgtgtcctcatccgccagcgccacatccgcgtcggcaagcagatcgtcaacgtaccctccttcatcgtccgtctcgactcccagaagcacatcgacttctccctcagctcgcccttcggtggtggccgccccggccgtgtccgaagaaagaaggccaaggccgccgagaagaaggatggtgacgaggaggaagaggaagaggagtaa

SEQ ID NO: 7445 - protein, 191 aa, Muscodor strobelii
  misc_feature: SGI Peptide ID NO. 562245
  misc_feature (105)..(152): Pfam Id: PF01479 Pfam Desc: S4 domain
  misc_feature (3)..(104): Pfam Id: PF00163 Pfam Desc: Ribosomal protein S4/S9 N-terminal domain
  misc_feature (1)..(178): NCBI GI: 238845555 Blast Desc: 40S ribosomal protein S9 [Microsporum canis CBS 113480]
  misc_feature (1)..(182): NCBI GI: 261204665 Blast Desc: 40S ribosomal protein S9 [Ajellomyces dermatitidis SLH14081] gi|239587331|gb|EEQ69974.1| 40S ribosomal protein S9 [Ajellomyces dermatitidis SLH14081] gi|239614129|gb|EEQ91116.1|
  misc_feature (1)..(190): NCBI GI: 1710780 Blast Desc: RS9_PODAN RecName: Full=40S ribosomal protein S9; AltName: Full=S7 gi|1321917|emb|CAA65433.1| cytoplasmic ribosomal protein S7 [Podospora anserina]
  misc_feature (1)..(190): NCBI GI: 171676139 Blast Desc: protein product [Podospora anserina] gi|170936135|emb|CAP60795.1| protein product [Podospora anserina]
  misc_feature (1)..(180): NCBI GI: 261353445 Blast Desc: 40S ribosomal protein S9 [Verticillium albo-atrum VaMs.102]
  misc_feature (1)..(174): NCBI GI: 145234288 Blast Desc: An02g13840 [Aspergillus niger] gi|134057460|emb|CAK37968.1| protein product [Aspergillus niger]
  misc_feature (1)..(174): NCBI GI: 119492999 Blast Desc: 40S ribosomal protein S9 [Neosartorya fischeri NRRL 181] gi|119411915|gb|EAW21858.1| 40S ribosomal protein S9 [Neosartorya fischeri NRRL 181]
  misc_feature (1)..(174): NCBI GI: 115402469 Blast Desc: 40S ribosomal protein S9 [Aspergillus terreus NIH2624] gi|114189157|gb|EAU30857.1| 40S ribosomal protein S9 [Aspergillus terreus NIH2624]
  misc_feature (1)..(174): NCBI GI: 67537266 Blast Desc: RS9_PODAN 40S ribosomal protein S9 (S7) [Aspergillus nidulans FGSC A4] gi|40741183|gb|EAA60373.1| RS9_PODAN 40S ribosomal protein S9 (S7) [Aspergillus nidulans FGSC A4] TPA: to
  misc_feature (2)..(174): NCBI GI: 121704904 Blast Desc: 40S ribosomal protein S9 [Aspergillus clavatus NRRL 1] gi|119398861|gb|EAW09289.1| 40S ribosomal protein S9 [Aspergillus clavatus NRRL 1]
  misc_feature: Useful for introducing or modulating the production of volatile compounds
MAPLSYSKTAKVPRRPFEAARLDSELKLVGEYGLRNKREVWRVQLTLSKIRRAARQLLTLDEKDPKRLFEGNALIRRLVRIGVLDESRMKLDYVLALKVEDFMERRLQTCVYKLGLAKSIHHARVLIRQRHIRVGKQIVNVPSFIVRLDSQKHIDFSLSSPFGGGRPGRVRRKKAKAAEKKDGDEEEEEEE

SEQ ID NO: 7446 - DNA, 2405 bp, Muscodor strobelii
  misc_feature: SGI EST ID NO. CUFF.19293.0
  misc_feature: Variant of the nucleotide sequence at SEQ ID NO 7444
ctagcccgcacaatctcgtccactccttcacccgaccctcctcgcgaacttttttgacttcacttctccctccccgtcgcccaatcctcaccaacaccatccgacacaagtcgagccattcgtcgccatggcccctttgtcgtactccaagaccgccaaggtcccccgccgccccttcgaggccgcccgacttgactccgagttgaagctcgttggcgagtacggtctccgcaacaagcgcgaggtgtggcgcgtccagctcaccctctccaagatccgtcgtgctgcccgtcagcttcttactcttgacgagaaggaccccaagcgtctcttcgaaggcaatgccctcattcgccgtctcgtacgcatcggtgtgctcgacgagtcccgcatgaagctcgattacgtcttggccctcaaggtcgaagatttcatggagcgccgcctccagacctgcgtctacaagctcggtctcgccaagtccatccaccacgcccgtgtcctcatccgccagcgccacatccgcgtcggcaagcagatcgtcaacgtaccctccttcatcgtccgtctcgactcccagaagcacatcgacttctccctcagctcgcccttcggtggtggccgccccggccgtgtccgaagaaagaaggccaaggccgccgagaagaaggatggtgacgaggaggaagaggaagaggagtaaatgcgccgccccggactttcacgacagattagtgattagggtgggccgcttgggatacggaaaagtgatgatattatgggtgcaactaccctctcacagctcaggcgttaggccactgggaaccgaaatgcatgaacctctttcatgagaatgataccacgaaatgcgaaacagttaatgatcaaaacagtgactgaagatgtgcctcgaaatgctttttacatgtatttggtgcgatgtgccgacatggctatgatactaagtcatctctacctaggaacttggccataggatcgtccgcggctgtccgcttgcggcgatattcgtccatctcggactctgtgacaccgcccatcatctcctccatcgttcgtttcttcgcagctggcttgttgggatctgcctcttgttctgtggcaggcggctcttttccctcctcagccggtgcctcttctataaggccaaccccagtccgttgtttctcggcgttctcccaagccttcttgccatcttctcccgtgcagtagctgttcttcactgtagagtgacaacaggcataaccccatttgaaattagaccaccagctgccccaaaccgatgtgtggttgtttgagaagacgtcttctgcgtacttcgatctggcgatggctgtaggagcgcccttgatcaggccggcttcgtcgtactccacgaagtgctctgactcggtaacgaccatctctcgaagggaagacggcatcgtctgggtatcgcttccgtatttgtcttgtagagctttgagatgcgctgctttcttcttttcggcttcttccttctctttcttgcgcaggaacgctccagccgttggattggcttgtagatgctggcttgtatcgccgctcctctcttgtttttcccaggcgtactgctgtgcgttctcaaactcggcggcttcgcctgaggcgcgcagaaaaccctcttctgcgaataactgtgctgctttatctgcggttgcgccagcgtcgaccattgttctcgttttggggtcgtatttggctgattcgagatcgaggttaagcaggtatttcgcggtatcttctcttatccgtagctgcctcgtcgccgtgctctggtgccgccccatgtccgactcttcggcgtatttctcaccgtcgtgaccatcttcgtcgccgtcctctccggccttcgccttcccgtctagttggttccgtagctcctccatctgattgtatctgttgacgacgtgacggtattccttcgcttcgtagccattccagcgatcgcgcttggcatcccatcccagctgcacgtcttgaacgacggcgtcggcctggatgtccttgccgctccatcttgcgccaatcttgcgcggtcgttcgaggcagtctttcttttggtggcccatggcaccgcagttttcgcaggcgcccttcctccatttcgttgcggccgggcctagcttcttcccgcgatcgtaccattttgactggtcgtctttggacttctggaggcgctgatgctcgaggtaatcggattggtcgccttcttcgccggcgtagaagggtcgcttgctgatgaatgaggggatgtagatgttctcttctttggaagctgcggacgccttgttggaggcgtcgttacgccgggacgacggcggtggtggagggggtggcggcattttttatgtgatggttaaggttag

SEQ ID NO: 7447 - DNA, 972 bp, Muscodor strobelii
  misc_feature: SGI cDNA ID NO. 562246
  misc_feature: Elevated expression when VOC is produced
  misc_feature: Encodes the peptide sequence at SEQ ID NO 7448
atggaggagctacggaaccaactagacgggaaggcgaaggccggagaggacggcgacgaagatggtcacgacggtgagaaatacgccgaagagtcggacatggggcggcaccagagcacggcgacgaggcagctacggataagagaagataccgcgaaatacctgcttaacctcgatctcgaatcagccaaatacgaccccaaaacgagaacaatggtcgacgctggcgcaaccgcagataaagcagcacagttattcgcagaagagggttttctgcgcgcctcaggcgaagccgccgagtttgagaacgcacagcagtacgcctgggaaaaacaagagaggagcggcgatacaagccagcatctacaagccaatccaacggctggagcgttcctgcgcaagaaagagaaggaagaagccgaaaagaagaaagcagcgcatctcaaagctctacaagacaaatacggaagcgatacccagacgatgccgtcttcccttcgagagatggtcgttaccgagtcagagcacttcgtggagtacgacgaagccggcctgatcaagggcgctcctacagccatcgccagatcgaagtacgcagaagacgtcttctcaaacaaccacacatcggtttggggcagctggtggtctaatttcaaatggggttatgcctgttgtcactctacagtgaagaacagctactgcacgggagaagatggcaagaaggcttgggagaacgccgagaaacaacggactggggttggccttatagaagaggcaccggctgaggagggaaaagagccgcctgccacagaacaagaggcagatcccaacaagccagctgcgaagaaacgaacgatggaggagatgatgggcggtgtcacagagtccgagatggacgaatatcgccgcaagcggacagccgcggacgatcctatggccaagttcctaggtagagatgacttagtatcatag

SEQ ID NO: 7448 - protein, 323 aa, Muscodor strobelii
  misc_feature: SGI Peptide ID NO. 562246
  misc_feature (1)..(323): NCBI GI: 46129443 Blast Desc: FG08897.1 [Gibberella zeae PH-1]
  misc_feature (1)..(322): NCBI GI: 261353444 Blast Desc: pre-mRNA-splicing factor SLU7 [Verticillium albo-atrum VaMs.102]
  misc_feature (1)..(323): NCBI GI: 39971037 Blast Desc: MGG_02985 [Magnaporthe grisea 70-15] gi|149210581|ref|XP_001522665.1| MGCH7_ch7g764 [Magnaporthe grisea 70-15] gi|74646436|sp|Q51LA6.1|SLU7_MAGGR RecName: factor
  misc_feature (27)..(322): NCBI GI: 154291723 Blast Desc: BC1G_15152 [Botryotinia fuckeliana B05.10] gi|150846652|gb|EDN21845.1| BC1G_15152 [Botryotinia fuckeliana B05.10]
  misc_feature (16)..(323): NCBI GI: 240106249 Blast Desc: CPC735_058120 [Coccidioides posadasii C735 delta SOWgp]
  misc_feature (16)..(322): NCBI GI: 119192042 Blast Desc: CIMG_00398 [Coccidioides immitis RS]
  misc_feature (22)..(322): NCBI GI: 226294626 Blast Desc: pre-mRNA-splicing factor slu7 [Paracoccidioides brasiliensis Pb18]
  misc_feature (27)..(322): NCBI GI: 145245293 Blast Desc: An11g09560 [Aspergillus niger] gi|134079612|emb|CAK40829.1| protein product [Aspergillus niger]
  misc_feature (22)..(322): NCBI GI: 225685290 Blast Desc: pre-mRNA-splicing factor slu7 [Paracoccidioides brasiliensis Pb03]
  misc_feature (15)..(318): NCBI GI: 159127941 Blast Desc: mRNA splicing protein, [Aspergillus fumigatus A1163]
  misc_feature: Useful for introducing or modulating the production of volatile compounds
MEELRNQLDGKAKAGEDGDEDGHDGEKYAEESDMGRHQSTATRQLRIREDTAKYLLNLDLESAKYDPKTRTMVDAGATADKAAQLFAEEGFLRASGEAAEFENAQQYAWEKQERSGDTSQHLQANPTAGAFLRKKEKEEAEKKKAAHLKALQDKYGSDTQTMPSSLREMVVTESEHFVEYDEAGLIKGAPTAIARSKYAEDVFSNNHTSVWGSWWSNFKWGYACCHSTVKNSYCTGEDGKKAWENAEKQRTGVGLIEEAPAEEGKEPPATEQEADPNKPAAKKRTMEEMMGGVTESEMDEYRRKRTAADDPMAKFLGRDDLVS

SEQ ID NO: 7449 - DNA, 2594 bp, Muscodor strobelii
  misc_feature: SGI EST ID NO. CUFF.19293.1
  misc_feature: Variant of the nucleotide sequence at SEQ ID NO 7447
ctaaccttaaccatcacataaaaaatgccgccaccccctccaccaccgccgtcgtcccggcgtaacgacgcctccaacaaggcgtccgcagcttccaaagaagagaacatctacatcccctcattcatcagcaagcgacccttctacgccggcgaagaaggcgaccaatccgattacctcgagcatcagcgcctccagaagtccaaagacgaccagtcaaaatggtacgatcgcgggaagaagctaggcccggccgcaacgaaatggaggaagggcgcctgcgaaaactgcggtgccatgggccaccaaaagaaagactgcctcgaacgaccgcgcaagattggcgcaagatggagcggcaaggacatccaggccgacgccgtcgttcaagacgtgcagctgggatgggatgccaagcgcgatcgctggaatggctacgaagcgaaggaataccgtcacgtcgtcaacagatacaatcagatggaggagctacggaaccaactagacgggaaggcgaaggccggagaggacggcgacgaagatggtcacgacggtgagaaatacgccgaagagtcggacatggggcggcaccagagcacggcgacgaggcagctacggataagagaagataccgcgaaatacctgcttaacctcgatctcgaatcagccaaatacgaccccaaaacgagaacaatggtcgacgctggcgcaaccgcagataaagcagcacagttattcgcagaagagggttttctgcgcgcctcaggcgaagccgccgagtttgagaacgcacagcagtacgcctgggaaaaacaagagaggagcggcgatacaagccagcatctacaagccaatccaacggctggagcgttcctgcgcaagaaagagaaggaagaagccgaaaagaagaaagcagcgcatctcaaagctctacaagacaaatacggaagcgatacccagacgatgccgtcttcccttcgagagatggtcgttaccgagtcagagcacttcgtggagtacgacgaagccggcctgatcaagggcgctcctacagccatcgccagatcgaagtacgcagaagacgtcttctcaaacaaccacacatcggtttggggcagctggtggtctaatttcaaatggggttatgcctgttgtcactctacagtgaagaacagctactgcacgggagaagatggcaagaaggcttgggagaacgccgagaaacaacggactggggttggccttatagaagaggcaccggctgaggagggaaaagagccgcctgccacagaacaagaggcagatcccaacaagccagctgcgaagaaacgaacgatggaggagatgatgggcggtgtcacagagtccgagatggacgaatatcgccgcaagcggacagccgcggacgatcctatggccaagttcctaggtagagatgacttagtatcatagccatgtcggcacatcgcaccaaatacatgtaaaaagcatttcgaggcacatcttcagtcactgttttgatcattaactgtttcgcatttcgtggtatcattctcatgaaagaggttcatgcatttcggttcccagtggcctaacgcctgagctgtgagagggtagttgcacccataatatcatcacttttccgtatcccaagcggcccaccctaatcactaatctgtcgtgaaagtccggggcggcgcatttactcctcttcctcttcctcctcgtcaccatccttcttctcggcggccttggccttctttcttcggacacggccggggcggccaccaccgaagggcgagctgagggagaagtcgatgtgcttctgggagtcgagacggacgatgaaggagggtacgttgacgatctgcttgccgacgcggatgtggcgctggcggatgaggacacgggcgtggtggatggacttggcgagaccgagcttgtagacgcaggtctggaggcggcgctccatgaaatcttcgaccttgagggccaagacgtaatcgagcttcatgcgggactcgtcgagcacaccgatgcgtacgagacggcgaatgagggcattgccttcgaagagacgcttggggtccttctcgtcaagagtaagaagctgactgtaggttgcgagtattatgttagcatttgcatagatagttactgtgttccacagtttttgattggcacgatgaactggacttgatattgggacataccgggcagcacgacggatcttggagagggtgagctggacgcgccacacctcgcgcttgttgcggagaccgtactcgccaacgagcttcaactcggagtcactattgatcgaaaaaaaccgtgtcagtttaccatttcacaatcgacgtaagcagaggcaagctcgtgctcagtggccggtgattactgacagtcgggcggcctcgaaggggcggcgggggaccttggcggtcttggagtacgacaaaggggccatggcgacgaatggctcgacttgtgtcggatggtgttggtgaggattgggcgacggggagggagaagtgaagtcaaaaaagttcgcgaggagggtcgggtgaaggagtggacgagattgtgcgggctag

SEQ ID NO: 7450 - DNA, 1428 bp, Muscodor strobelii
  misc_feature: SGI cDNA ID NO. 562247
  misc_feature: Reduced expression when VOC is produced
  misc_feature: Encodes the peptide sequence at SEQ ID NO 7451
atgccgccaccccctccaccaccgccgtcgtcccggcgtaacgacgcctccaacaaggcgtccgcagcttccaaagaagagaacatctacatcccctcattcatcagcaagcgacccttctacgccggcgaagaaggcgaccaatccgattacctcgagcatcagcgcctccagaagtccaaagacgaccagtcaaaatggtacgatcgcgggaagaagctaggcccggccgcaacgaaatggaggaagggcgcctgcgaaaactgcggtgccatgggccaccaaaagaaagactgcctcgaacgaccgcgcaagattggcgcaagatggagcggcaaggacatccaggccgacgccgtcgttcaagacgtgcagctgggatgggatgccaagcgcgatcgctggaatggctacgaagcgaaggaataccgtcacgtcgtcaacagatacaatcagatggaggagctacggaaccaactagacgggaaggcgaaggccggagaggacggcgacgaagatggtcacgacggtgagaaatacgccgaagagtcggacatggggcggcaccagagcacggcgacgaggcagctacggataagagaagataccgcgaaatacctgcttaacctcgatctcgaatcagccaaatacgaccccaaaacgagaacaatggtcgacgctggcgcaaccgcagataaagcagcacagttattcgcagaagagggttttctgcgcgcctcaggcgaagccgccgagtttgagaacgcacagcagtacgcctgggaaaaacaagagaggagcggcgatacaagccagcatctacaagccaatccaacggctggagcgttcctgcgcaagaaagagaaggaagaagccgaaaagaagaaagcagcgcatctcaaagctctacaagacaaatacggaagcgatacccagacgatgccgtcttcccttcgagagatggtcgttaccgagtcagagcacttcgtggagtacgacgaagccggcctgatcaagggcgctcctacagccatcgccagatcgaagtacgcagaagacgtcttctcaaacaaccacacatcggtttggggcagctggtggtctaatttcaaatggggttatgcctgttgtcactctacagtgaagaacagctactgcacgggagaagatggcaagaaggcttgggagaacgccgagaaacaacggactggggttggccttatagaagaggcaccggctgaggagggaaaagagccgcctgccacagaacaagaggcagatcccaacaagccagctgcgaagaaacgaacgatggaggagatgatgggcggtgtcacagagtccgagatggacgaatatcgccgcaagcggacagccgcggacgatcctatggccaagttcctaggtagagatgacttagtatcatag

SEQ ID NO: 7451 - protein, 475 aa, Muscodor strobelii
  misc_feature: SGI Peptide ID NO. 562247
  misc_feature (84)..(101): Pfam Id: PF00098 Pfam Desc: Zinc knuckle
  misc_feature (20)..(475): NCBI GI: 46129443 Blast Desc: FG08897.1 [Gibberella zeae PH-1]
  misc_feature (20)..(474): NCBI GI: 261353444 Blast Desc: pre-mRNA-splicing factor SLU7 [Verticillium albo-atrum VaMs.102]
  misc_feature (20)..(475): NCBI GI: 39971037 Blast Desc: MGG_02985 [Magnaporthe grisea 70-15] gi|149210581|ref|XP_001522665.1| MGCH7_ch7g764 [Magnaporthe grisea 70-15] gi|74646436|sp|Q51LA6.1|SLU7_MAGGR RecName: factor
  misc_feature (1)..(474): NCBI GI: 154291723 Blast Desc: BC1G_15152 [Botryotinia fuckeliana B05.10] gi|150846652|gb|EDN21845.1| BC1G_15152 [Botryotinia fuckeliana B05.10]
  misc_feature (22)..(475): NCBI GI: 240106249 Blast Desc: CPC735_058120 [Coccidioides posadasii C735 delta SOWgp]
  misc_feature (22)..(474): NCBI GI: 119192042 Blast Desc: CIMG_00398 [Coccidioides immitis RS]
  misc_feature (1)..(405): NCBI GI: 156056561 Blast Desc: SS1G_04011 [Sclerotinia sclerotiorum 1980] gi|154701797|gb|EDO01536.1| SS1G_04011 [Sclerotinia sclerotiorum 1980]
  misc_feature (1)..(470): NCBI GI: 189202410 Blast Desc: pre-mRNA-splicing factor SLU7 [Pyrenophora tritici-repentis Pt-1C-BFP] gi|187984640|gb|EDU50128.1| pre-mRNA-splicing factor SLU7 [Pyrenophora tritici-repentis
  misc_feature (20)..(471): NCBI GI: 255944165 Blast Desc: Pc20g02970 [Penicillium chrysogenum Wisconsin 54-1255] gi|211587585|emb|CAP85626.1| Pc20g02970 [Penicillium chrysogenum Wisconsin 54-1255]
  misc_feature (1)..(470): NCBI GI: 169595884 Blast Desc: SNOG_00689 [Phaeosphaeria nodorum SN15] gi|160701179|gb|EAT92184.2| SNOG_00689 [Phaeosphaeria nodorum SN15]
  misc_feature: Useful for introducing or modulating the production of volatile compounds
MPPPPPPPPSSRRNDASNKASAASKEENIYIPSFISKRPFYAGEEGDQSDYLEHQRLQKSKDDQSKWYDRGKKLGPAATKWRKGACENCGAMGHQKKDCLERPRKIGARWSGKDIQADAVVQDVQLGWDAKRDRWNGYEAKEYRHVVNRYNQMEELRNQLDGKAKAGEDGDEDGHDGEKYAEESDMGRHQSTATRQLRIREDTAKYLLNLDLESAKYDPKTRTMVDAGATADKAAQLFAEEGFLRASGEAAEFENAQQYAWEKQERSGDTSQHLQANPTAGAFLRKKEKEEAEKKKAAHLKALQDKYGSDTQTMPSSLREMVVTESEHFVEYDEAGLIKGAPTAIARSKYAEDVFSNNHTSVWGSWWSNFKWGYACCHSTVKNSYCTGEDGKKAWENAEKQRTGVGLIEEAPAEEGKEPPATEQEADPNKPAAKKRTMEEMMGGVTESEMDEYRRKRTAADDPMAKFLGRDDLVS

SEQ ID NO: 7452 - DNA, 2594 bp, Muscodor strobelii; identical to SEQ ID NO: 7449
  misc_feature: SGI EST ID NO. CUFF.19293.1
  misc_feature: Variant of the nucleotide sequence at SEQ ID NO 7450

SEQ ID NO: 7453 - DNA, 5136 bp, Muscodor strobelii
  misc_feature: SGI cDNA ID NO. 562248
  misc_feature: Encodes the peptide sequence at SEQ ID NO 7454
atggatgtgtttcgcctacggttgaactgcattgatcactacgacgcaattcctaccaagtatgaccctatacttcggaatgatgtgcatccctcgcaattgcacaaggagcccagggtccctgtcatcagagtctttgggtcgaccgagacggggcagaaggtctgtgcccatatccatggtgcatttccatatctctatatagagtatcatggcagcttacaagctgatgatgtcaatgcatacatctaccggttacatctttccattgaccacgccttggctgtgagttatcgccgaaatgtctatgatggcaaaaatagatacgtggctagagtcacattggtgaaaggaatccctttctatggctttcacgttggttaccggttcttcctgaagatatacattctcaatcccatgttcatgaccaggctatcagagcttctgctgcagggtgtcgtcatgaagcagagatttcagccgtacgaagcacatctgcaatacttgcttcaattcatggtagattacaatctttacggctgtaactatatcaaggcgaggagaacctgcttcagagcacccgtaccaaatcatgaggaagacgagagttcgactcacctgtggcacagccagtcagtgtccaagaagctgatcacagatgatcccgaactgcctcgcgtgagccactgctcaattgaagttgatatctgtgtgcaggatattatgaatcgacatgagatcaaagagagacgacttcatcatgacttcgttgaaatgcaaaaccccctaccaaatgacatgaaattagtccacagcatggctggcctatggaaggacgaaacgaagcgacacaaacgaagaatgaatgtcacagcaccgggcagcagcccctttcctgcagaggtgctggtatctatgtctgccgatccccgcgattcgcagccccccggctgggttcacgaagaagaataccgagacgaaatcaagaacttagtgcagcaagaaagtcgcaacaagggtacgacaaaagtcaaatttgacacctttgtacaggatattccgttcgaggcaactgtgaataccttactacaatccgtggaggatttatatccgaaccaactggaatctgctcttggtttgtcgcaactatctcagctcgacgaagatccttccagtagtattatcgttgatgagaaaaggcttcgcggccttgacccaggagaagatgatttgtttctggatgattctgatgaagaaacggtgcggaatgcagtgccatctaagaacgctcctcctgagactgggaaacctctgcctacctccgtaagggacacaaatcgtaagttgcaccagccggtcgatgaatcgacgcgtcgacaacccggaaaggtagaacctcgtgttgaaataagctccaatgtcgaacaccgtatcgatccaaatctccgcgtagatggttttcctaaaggcattcaacgcagttacttacaaggtggtacccgaccaaatatggccatcactcatgctctgttagatattgcgaaatatcatgggttgacgagcaaagttccacgagatttgcagggccaagaatcaaggatcttatcacccaaacgttcgttatcgccaccaccagacggcggatcctcaaagaggcgtcgtgttgagtttgcccttgaccaaaaagctgaggtgataaacgattatcagcgcgtaacagatacggattctcagaagtccgaaaggtcgctcgtgctatctggacaaccaggaaggtccagcttaaaacaagaaaccaataaacagcacagggatcagcgactgaatttccctgtagtcaaggatcctaatgatccatataccaagttacgtctcagccagacgagctcacagaacagtaacgatggccaagcattcaaacatgtttctttcgatgcttcaactttgaatacgaagacctctaccaataacgaactgcagggctcgacactggggtcgacgagctcggaatctacggccaagggatctcagaatcagattttaagtgatgttagatgcagatccaggcgccatgctcagttctttgttttcaaccaattggcaccgccagcagaagaaattgagtcgacgtttcaaccattgaatcgccttgatgtcatctaccaagatgcttattatagcagagaaaaagatgttcctccccgtggtcgagaatttgctggcaagcactttcgtctcgaaggcaacagtctgcgtttccttccggaattcgattccaaagcagagaatcttgctagcttcggcatcaaaggcgacgaccattatgaaagcttgggaactgcacagccaactaaggagaaacgaaataaatgttctttgcggagctgggaatttacacggactccaccaaccttggaagatgtcgagacctggttagagaagcaggatgcaactgcgaaatctccagatgatagtatgacagcacaggaccatgagattcgaccgtatttatcccagatcgatggctcgacaccaaagaataagcatggattcaaatactcacaaagaaaacaatcaactagtgttcagcatgaggcacagtatatgagtactatgagtcttgagattcacgtcaatactcgaggaaaattggtcccaaatccggaagaggatgaagtgcaagccatcttctggtgttcgaagtccgatgagaatttcgctactggtgacagtgcgtctctggctgtgcagtccggaatcatcgttctttcagaagatggctcgatggcgagagctatgcaaaggcagactggcactgaggttgtcgaagaagcatcagaacttgatctgatggtcagattggttgagatcgtccgcacccatgacccagatattctcactgggtacgaggttcatggaagctcatggggctttctgattgaaagagcaaggctgaaatacgactacaatctttgcgacgaatgttctcgcatgaaatcccaatcgtttgggcgatttggcaaggaagcagataaatggggcttcaacacgacctctacaattcgcgtgactggccgccacatgatcaatatttggagggctatgcgaggagagctgaatcttctccaatacacaatggagaatgtcgtgtggcatctgcttcatcgccgtatcccgcactatccctggcgtgctttgacagattggtataaaagaggcaaaccacgagagctaagcaaactccttcgatactatctaacccgaactaagctcgacattgaaatcctcgagtcgaacgagttgattcccagaaccagcgagcaagcgcgtctactcggcgttgacttcttctcggtcttctcgcgaggatctcagttcaaagtcgaatcgatcatgttcaggattgccaaaccggagaacttcattcttgtatcacccgataggagacaagttggacaacagaatgctctcgagtgtttgcctttggtgatggaacctcaaagtgcattctataacagcccactgttagttcttgatttccaaagtctatacccaagcgtgatgatcgcatataattactgctattcgaccttccttggacggatagtcaattggcgaggcacgaacaagatgggatttacggattatcggaggcaagacagactgctggaacttcttaaggactacattaatgtcgccccaaatggcatcatgtattccaaggccgagatcagaaaatcattgctcgcaaagatgctgacagaaatactcgaaactcgagtgatggtcaaaagtggtatgaaacaagacaaagacgacaagaccttacaacagcttctcaacaaccgacagcttgcgttgaaactgcttgcaaacgtcacctacggatatacttctgcgtcattctcgggccgaatgccctgttcagaaattgccgatagtattgttcagacgggacgagagacgcttgagcgagccatggcagtgattcactcgacatccaaatggcaagctgaagttgtatatggagatacagacagtatttttgtctatcttcccggtcgcaccaaggatcaggcatttgatatcggcaacgagatcgcgaaaaaaatcacagacatgaacccgcggccaatcaagctcaagttcgaaaaagtgtatcacccctgcgttctgttagcgaagaaacgctacgtagggtataaatacgagagcaaggatcaagtcaaccccggcttcgacgcaaagggtattgagaccgtgcgaagagatggaacgcctgcagaacaaatgatcgaagagaaggcgttgaagcttctcttcgagactgctgatctcagccaaattaagacatacttccagcggcaatgcgccaagatcatgcgtggagcggtctctatacaggacttctgcttcgctcgagaagtaaagctagggacatatagcgatcgtggacccccacccgccggcgctcttatcagtacgaagaagatgctccaggacgccagagcagaaccacaatatggcgaaagagtaccgtatgttgtggtgagtggtggcccgagagctcgactcatcgatcgttgcgtagcaccagaggaggtgctgctcaactctcatctccaacttgactccgaatactacatctcgaaaaatctcattccgcctttggagcggatcttcaacctagtcggggccaatgtccggcaatggtacgacgaaatgcccaaaattcgccgcaccaatcgtttaagtagtgcaaatagtaccggggcaaagaagacgctggagtcgtacatgagagtcgcggcgtgcgtggtatgcaaccggaaaacgaagagcaagcatgagagctcaatatgcaaaaggtgtcggtcaaaaacaccgaaatcactagtcaagctacagaccagagtgaacaaggaggagacgaaactagttgatgttcacaagatttgtcagagttgctctggtcttgcgccgttggatgaggtctcatgtgatagccaggattgtcccgtcttttatacccgtatgaaacaaacggcgaggtaccgcgctgagaagagcgtgagcgagcccgctattaagtggttgttggatagaaagatgtccaggaaacacttgcagtggtga

SEQ ID NO: 7454 - protein, 1711 aa, Muscodor strobelii
  misc_feature: SGI Peptide ID NO. 562248
  misc_feature (1123)..(1579): Pfam Id: PF00136 Pfam Desc: DNA polymerase family B
  misc_feature (48)..(1049): Pfam Id: PF03104 Pfam Desc: DNA polymerase family B, exonuclease domain
  misc_feature (1123)..(1562): Pfam Id: PF00136 Pfam Desc: DNA polymerase family B
  misc_feature (48)..(241): Pfam Id: PF03104 Pfam Desc: DNA polymerase family B, exonuclease domain
  misc_feature (587)..(1579): NCBI GI: 68236020 Blast Desc: REV3 [Neurospora crassa]
  misc_feature (587)..(1579): NCBI GI: 88604876 Blast Desc: REV3 [Neurospora crassa]
  misc_feature (701)..(1711): NCBI GI: 169780382 Blast Desc: [Aspergillus oryzae RIB40] gi|83773395|dbj|BAE63522.1| protein product [Aspergillus oryzae]
  misc_feature (587)..(1518): NCBI GI: 88866509 Blast Desc: REV3 [Neurospora crassa]
  misc_feature (639)..(1680): NCBI GI: 71006944 Blast Desc: UM01931.1 [Ustilago maydis 521] gi|46097152|gb|EAK82385.1| UM01931.1 [Ustilago maydis 521]
  misc_feature (686)..(1679): NCBI GI: 134108036 Blast Desc: CNBB2010 [Cryptococcus neoformans var. neoformans B-3501A] gi|50260090|gb|EAL22753.1| CNBB2010 [Cryptococcus neoformans var. neoformans B-3501A]
  misc_feature (686)..(1679): NCBI GI: 58264096 Blast Desc: zeta DNA polymerase [Cryptococcus neoformans var. neoformans JEC21] gi|57223854|gb|AAW41897.1| zeta DNA polymerase, [Cryptococcus neoformans var. neoformans JEC21]
  misc_feature (617)..(1680): NCBI GI: 50305361 Blast Desc: protein product [Kluyveromyces lactis] gi|49641773|emb|CAH01491.1| KLLA0C09911p [Kluyveromyces lactis]
  misc_feature (1)..(1701): NCBI GI: 46129445 Blast Desc: FG08898.1 [Gibberella zeae PH-1]
  misc_feature (1)..(1711): NCBI GI: 256733733 Blast Desc: [Nectria haematococca mpVI 77-13-4]
  misc_feature (714)..(1691): SWISSPROT Homolog: EC 2.7.7.7 DNA-directed DNA polymerase
MDVFRLRLNCIDHYDAIPTKYDPILRNDVHPSQLHKEPRVPVIRVFGSTETGQKVCAHIHGAFPYLYIEYHGSLQADDVNAYIYRLHLSIDHALAVSYRRNVYDGKNRYVARVTLVKGIPFYGFHVGYRFFLKIYILNPMFMTRLSELLLQGVVMKQRFQPYEAHLQYLLQFMVDYNLYGCNYIKARRTCFRAPVPNHEEDESSTHLWHSQSVSKKLITDDPELPRVSHCSIEVDICVQDIMNRHEIKERRLHHDFVEMQNPLPNDMKLVHSMAGLWKDETKRHKRRMNVTAPGSSPFPAEVLVSMSADPRDSQPPGWVHEEEYRDEIKNLVQQESRNKGTTKVKFDTFVQDIPFEATVNTLLQSVEDLYPNQLESALGLSQLSQLDEDPSSSIIVDEKRLRGLDPGEDDLFLDDSDEETVRNAVPSKNAPPETGKPLPTSVRDTNRKLHQPVDESTRRQPGKVEPRVEISSNVEHRIDPNLRVDGFPKGIQRSYLQGGTRPNMAITHALLDIAKYHGLTSKVPRDLQGQESRILSPKRSLSPPPDGGSSKRRRVEFALDQKAEVINDYQRVTDTDSQKSERSLVLSGQPGRSSLKQETNKQHRDQRLNFPVVKDPNDPYTKLRLSQTSSQNSNDGQAFKHVSFDASTLNTKTSTNNELQGSTLGSTSSESTAKGSQNQILSDVRCRSRRHAQFFVFNQLAPPAEEIESTFQPLNRLDVIYQDAYYSREKDVPPRGREFAGKHFRLEGNSLRFLPEFDSKAENLASFGIKGDDHYESLGTAQPTKEKRNKCSLRSWEFTRTPPTLEDVETWLEKQDATAKSPDDSMTAQDHEIRPYLSQIDGSTPKNKHGFKYSQRKQSTSVQHEAQYMSTMSLEIHVNTRGKLVPNPEEDEVQAIFWCSKSDENFATGDSASLAVQSGIIVLSEDGSMARAMQRQTGTEVVEEASELDLMVRLVEIVRTHDPDILTGYEVHGSSWGFLIERARLKYDYNLCDECSRMKSQSFGRFGKEADKWGFNTTSTIRVTGRHMINIWRAMRGELNLLQYTMENVVWHLLHRRIPHYPWRALTDWYKRGKPRELSKLLRYYLTRTKLDIEILESNELIPRTSEQARLLGVDFFSVFSRGSQFKVESIMFRIAKPENFILVSPDRRQVGQQNALECLPLVMEPQSAFYNSPLLVLDFQSLYPSVMIAYNYCYSTFLGRIVNWRGTNKMGFTDYRRQDRLLELLKDYINVAPNGIMYSKAEIRKSLLAKMLTEILETRVMVKSGMKQDKDDKTLQQLLNNRQLALKLLANVTYGYTSASFSGRMPCSEIADSIVQTGRETLERAMAVIHSTSKWQAEVVYGDTDSIFVYLPGRTKDQAFDIGNEIAKKITDMNPRPIKLKFEKVYHPCVLLAKKRYVGYKYESKDQVNPGFDAKGIETVRRDGTPAEQMIEEKALKLLFETADLSQIKTYFQRQCAKIMRGAVSIQDFCFAREVKLGTYSDRGPPPAGALISTKKMLQDARAEPQYGERVPYVVVSGGPRARLIDRCVAPEEVLLNSHLQLDSEYYISKNLIPPLERIFNLVGANVRQWYDEMPKIRRTNRLSSANSTGAKKTLESYMRVAACVVCNRKTKSKHESSICKRCRSKTPKSLVKLQTRVNKEETKLVDVHKICQSCSGLAPLDEVSCDSQDCPVFYTRMKQTARYRAEKSVSEPAIKWLLDRKMSRKHLQW

SEQ ID NO: 7455 - DNA, 697 bp, Muscodor strobelii
  misc_feature: SGI EST ID NO. CUFF.18463.0
  misc_feature: Variant of the nucleotide sequence at SEQ ID NO 7453
aatcaataccttgcaatttgcttcaacacagcattttaagtgtggttctcttttgttgcttagacatcgcttctcatttcctcatttccttactcgacaagtcccagacacctatgtcatggtagctagacctgagccgtcgttatgacggatagggcaccatggatgtgtttcgcctacggttgaactgcattgatcactacgacgcaattcctaccaagtatgaccctatacttcggaatgatgtgcatccctcgcaattgcacaaggagcccagggtccctgtcatcagagtctttgggtcgaccgagacggggcagaaggtctgtgcccatatccatggtgcatttccatatctctatatagagtatcatggcagcttacaagctgatgatgtcaatgcatacatctaccggttacatctttccattgaccacgccttggctgtgagttatcgccgaaatgtctatgatggcaaaaatagatacgtggctagagtcacattggtgaaaggaatccctttctatggctttcacgttggttaccggttcttcctgaagatatacattctcaatcccatgttcatgaccaggctatcagagcttctgctgcagggtgtcgtcatgaagcagagatttcagccgtacgaagcacatctgcaatacttgcttcaattcatggtagattacaatcttta

SEQ ID NO: 7456 - DNA, 2886 bp, Muscodor strobelii
  misc_feature: SGI cDNA ID NO. 562249
  misc_feature: Encodes the peptide sequence at SEQ ID NO 7457
atgggcagttggtctgcgttcctcctgacctacctgctcggtggtgtcaccttcatccctctcgtcatcgctgctgttctgctccacgcccacttgactttccccgtccgtgaccaagatgtttctctgccgccaaccgattccgaaagcatagtccagccgggcgacgacgttcccgatttcgatatagcgcagaaggaagaagagaagcaaaagctgcttgccgactccgatgttgctgctggctactttgcagtatgccgtgaatacacacccatgggcatcaatgccaagcccatcgagcgtactactcccgtgggatccacaaccgtcgctgctccgagccctagcgtctaccagtccatgtacaggagcatattcgacaggaagcagccacctggtcctctggatgacaataagagtgtcagccagcggcccaagcgcgctggcaacgtgttctacgtcgtcctaagacacggccatctcatgttattcgatgacgacgagcagctcgaggtgcgacatgtagtctcactagtcaaccacagtgtgagcatctactcaggcggcgactgcacacccgagggcgaattgttcatcaagcggaatgcaatatgtctaacaagaagggtcgacgggaagagtctcaccccggacacccagatatcgaagcctttctatctcttctccgagaactgttccgccaaggaggacttttacttttctctgctcagaaatcaggagcagtcattttcttcccataacatcgctcccagacctctacgatttgacgttaaaaacatcatatcactggttcagaaattacactcttcagatgatcatatgcaaactcggtggctcaatgcccttataggcaggatatttcttggcctgtacaagaccaaggacatcgagaatctgatcaaggagaagctcaccaagaagatttcaagagtcaaacgcccgggtttccttaccagggtcgccattcaaggcatcaatgtcggtgaatctgcgccgtatatctccaacccacgcctcaaggaccttaatgtcgaaggagagtgcgtgatggaagccgacctaaaatacaccggtaatttcaggctggaagtagctgctaccgctcgtatcgatcttgggacccgtttcaaagctcgagaagtgaaccttgtgttagcagtcgtgctgaggaaactagagggccacgtgtttttcaagctcaaaccgcctccaagcaaccgtctttggttttcctttcagtccatgcccaagatagagatgacgatcgaaccgatcgtcagcacacgacagatcacctataccgtcattctcaggcagatcgagaaccggataaaggaggtcattgcggaaacactggtgttgccgttctgggacgatacacctttcttctctacggaacacaaacaatggcgtggtgggatattcgagggtgatgacgctgtccaacattctgctgaccatgccagtatcgctgctgagcttggaaatgtggatgaagtcagtgaaattgaacatacgccacccccaatgtctcccgatttgcctcaattcgagaagagtgcgaccgagcccaattcggataataaccagtcagccggtttttggtctcgaactttaggcaagaagaaaagcttgaatctcaatcaaaggcaacaaaattctgcatccacaaccgctctggatgcgaagagtagccccggttcccccggcgagattccgcgcatcctaaggtcagggtcattttctgcttcgagcccacttatcagcacagagcctaccaacgcagaggctagcaaaccaatcgctactcctccggacgatggagatgccgcaagcacaatggcacacatatctgcacgatctgtgacagattcaccagttcatacaccagcgggctcacctacaaaatccacgaccatactcgaggctcatggttcatcctcaaattcatcatctgaagcgataaatcaactgcaagatgcagacagtaccccaaaaagtcaattgaggagagatacagcttcgtctgtggagagcgcatccaatgatcatagtgagccagccaatccgctcgggatcgtcgggagacagtcgacggcgagctcgaccgggtctacaagcaaaagcttatttggacgaaaagagatgtcgtcacctaacacaagccacggcgttccagagaacaaaaggaacacgttagcagccgtctccaatgccgctgctacggcgaaacgatggggtttgaacgccatacagcgtcaaacaaatcaaaataataataatggacgaaaactgtcagatccgcctgttgatctcaatctaccaatgggccgtggtcaaccactcccaccgcctggcacgccgttacctagacctgggcaaaaggcaaccccactgcctgtacccaaacgaaaaccggtctcttctccgccaaaattgacccctaaaagctccactgatcttaaagagtcaagaatcgaacgacgtcctgttccgccacccccgcttccgaggagaaggagagtttctcaaatccatgacaatgataataccgaagagaaccttcttgtcgtcgaagctcctgctgactcggagcctaactcgccttctatcgaaaatacgacctcatatatagagccgtggaccgaagatgctgaggatgtagaggagaaccagccaagctcggtcactgagaaatccgttctccccaaactacccgaacgagctccagagggtctctcacaagccgctcctgagaacgcgggaggatatgaagaagacgatgactactccaattggatagataatccggaatttcaagaggacgatggcaccaaagctaagccgctgagtgaccgctag

SEQ ID NO: 7457 - protein, 961 aa, Muscodor strobelii
  misc_feature: SGI Peptide ID NO. 562249
  misc_feature (1)..(901): NCBI GI: 149210515 Blast Desc: MGCH7_ch7g732 [Magnaporthe grisea 70-15] gi|86196687|gb|EAQ71325.1| MGCH7_ch7g732 [Magnaporthe grisea 70-15]
  misc_feature (1)..(910): NCBI GI: 171676145 Blast Desc: protein product [Podospora anserina] gi|170936138|emb|CAP60798.1| protein product [Podospora anserina]
  misc_feature (1)..(943): NCBI GI: 256733738 Blast Desc: NECHADRAFT_36832 [Nectria haematococca mpVI 77-13-4]
  misc_feature (1)..(949): NCBI GI: 116193757 Blast Desc: CHGG_06596 [Chaetomium globosum CBS 148.51] gi|88182509|gb|EAQ89977.1| CHGG_06596 [Chaetomium globosum CBS 148.51]
  misc_feature (1)..(960): NCBI GI: 261353442 Blast Desc: uncharaterized PH domain-containing protein [Verticillium albo-atrum VaMs.102]
  misc_feature (1)..(901): NCBI GI: 145609828 Blast Desc: MGG_02958 [Magnaporthe grisea 70-15] gi|145017211|gb|EDK01574.1| MGG_02958 [Magnaporthe grisea 70-15]
  misc_feature (1)..(944): NCBI GI: 46130602 Blast Desc: FG08905.1 [Gibberella zeae PH-1]
  misc_feature (1)..(930): NCBI GI: 154291719 Blast Desc: BC1G_15150 [Botryotinia fuckeliana B05.10] gi|150846650|gb|EDN21843.1| BC1G_15150 [Botryotinia fuckeliana B05.10]
  misc_feature (1)..(930): NCBI GI: 156056555 Blast Desc: SS1G_04008 [Sclerotinia sclerotiorum 1980] gi|154701794|gb|EDO01533.1| SS1G_04008 [Sclerotinia sclerotiorum 1980]
  misc_feature (3)..(957): NCBI GI: 88866505 Blast Desc: [Neurospora crassa]
MGSWSAFLLTYLLGGVTFIPLVIAAVLLHAHLTFPVRDQDVSLPPTDSESIVQPGDDVPDFDIAQKEEEKQKLLADSDVAAGYFAVCREYTPMGINAKPIERTTPVGSTTVAAPSPSVYQSMYRSIFDRKQPPGPLDDNKSVSQRPKRAGNVFYVVLRHGHLMLFDDDEQLEVRHVVSLVNHSVSIYSGGDCTPEGELFIKRNAICLTRRVDGKSLTPDTQISKPFYLFSENCSAKEDFYFSLLRNQEQSFSSHNIAPRPLRFDVKNIISLVQKLHSSDDHMQTRWLNALIGRIFLGLYKTKDIENLIKEKLTKKISRVKRPGFLTRVAIQGINVGESAPYISNPRLKDLNVEGECVMEADLKYTGNFRLEVAATARIDLGTRFKAREVNLVLAVVLRKLEGHVFFKLKPPPSNRLWFSFQSMPKIEMTIEPIVSTRQITYTVILRQIENRIKEVIAETLVLPFWDDTPFFSTEHKQWRGGIFEGDDAVQHSADHASIAAELGNVDEVSEIEHTPPPMSPDLPQFEKSATEPNSDNNQSAGFWSRTLGKKKSLNLNQRQQNSASTTALDAKSSPGSPGEIPRILRSGSFSASSPLISTEPTNAEASKPIATPPDDGDAASTMAHISARSVTDSPVHTPAGSPTKSTTILEAHGSSSNSSSEAINQLQDADSTPKSQLRRDTASSVESASNDHSEPANPLGIVGRQSTASSTGSTSKSLFGRKEMSSPNTSHGVPENKRNTLAAVSNAAATAKRWGLNAIQRQTNQNNNNGRKLSDPPVDLNLPMGRGQPLPPPGTPLPRPGQKATPLPVPKRKPVSSPPKLTPKSSTDLKESRIERRPVPPPPLPRRRRVSQIHDNDNTEENLLVVEAPADSEPNSPSIENTTSYIEPWTEDAEDVEENQPSSVTEKSVLPKLPERAPEGLSQAAPENAGGYEEDDDYSNWIDNPEFQEDDGTKAKPLSDR

SEQ ID NO: 7458 - DNA, 5595 bp, Muscodor strobelii
  misc_feature: SGI EST ID NO. CUFF.18499.0
  misc_feature: Variant of the nucleotide sequence at SEQ ID NO 7456
cttatcagtacgaagaagatgctccaggacgccagagcagaaccacaatatggcgaaagagtaccgtatgttgtggtgagtggtggcccgagagctcgactcatcgatcgttgcgtagcaccagaggaggtgctgctcaactctcatctccaacttgactccgaatactacatctcgaaaaatctcattccgcctttggagcggatcttcaacctagtcggggccaatgtccggcaatggtacgacgaaatgcccaaaattcgccgcaccaatcgtttaagtagtgcaaatagtaccggggcaaagaagacgctggagtcgtacatgagagtcgcggcgtgcgtggtatgcaaccggaaaacgaagagcaagcatgagagctcaatatgcaaaaggtgtcggtcaaaaacaccgaaatcactagtcaagctacagaccagagtgaacaaggaggagacgaaactagttgatgttcacaagatttgtcagagttgctctggtcttgcgccgttggatgaggtctcatgtgatagccaggattgtcccgtcttttatacccgtatgaaacaaacggcgaggtaccgcgctgagaagagcgtgagcgagcccgctattaagtggttgttggatagaaagatgtccaggaaacacttgcagtggtgagacaggaggctaggatatcatagatgcgtcagcttgtatagacaaccaatccattatttttgaaatttgtactattgaaaaacgttgttgccgacggtgcgtctacgtacgcagatacaaggctctctccacatagataccaaataagagacagcacttcgactcatttgaaattgctaaatatccataatatgcatcccaaccacataagtccgcacatcctcaagcaacaccaaacatcattcatattcctcaccccgatccataatcagcatccctataatccatatccttcaaaaccgccctaacaaacggcaaaaaactcccaggtcccgtagtcctctccttcatgtggatattcgtatccgtgtgattcgtaatcacctctcgtacgatttctagtctggtgctgacgtctatgccgccgccgatgaagacatggtcgatcttttttgcggatgagagtgcggagagagtttcttggaggttggtggatgtgaggatttgggcgatggggagatcggagaggattgagtgtgcgctggtgaggactgtggtgtttaggccggctaggaggatcgttgacatggtgtgggagaattaggtgggatgtgggatggtacgggggagtggacgtgggagtaggagtgggagaactatggggttgaggttttgatgttgaggttttgttgttcgcgttgagatgatggttaagggctcttatatactaggcttctattaggtagaagatgttttctttctcattacgggacgacctatgggatctttataatcatgcgttggtagttggcaactatcccacgtgcgtcactctttaataaaacctactttgatagatctcaagatctacaactattaagttggcactatttgtcatctcggactacgttgctatgcgaaattccgacaaattagacaattgtaaatgtgtcctcattgtgtaagaatataaagacgaggctgaatcctggggtttcggagatgcgcggaaaatgcagcaacaacttgtaggaggttgcagtttggcggttaagacagtgcggtcaaagagtaaagacatggagtggagtagtcaggacgcactgtgaatgcagccaacgtcgtaggtcagatgggctgccttgagtgcagctggtgtgaaatttcgcaagtacatattttacatgttagcgtgtctttggtgctctatacagtgttcaggatctcggtgtgtcttggcagggaccagggagtaatgttgtccatcttgccttggcagccctggccccacggcgcctagaccccgccaaggccaagtgacagctagcctacagattaccttcagtgtgccccacgtggcttctcctccgctccagtgacgtcgagctggaatgtgaggaccgtccggaccttcaggtaggtgctgcgcaacatttcgatgctgccaatcgagacattcccgtctctaaacgccgcgtcgcgtgtccttcgctgccatcctccttgacgcgacgctactttctgggcaactcacccgtccctcgctatccgcatcattgagcagaccccaccaattcgaataactcgaccgggaagcttgtccgacacacacaccttggccaacagcttcacagattcgcattcatccatgatccttcgatatcgcctcgcctcgccctcggtggtttcgttccttgctggctgttcccgattgcagcaatgggcagttggtctgcgttcctcctgacctacctgctcggtggtgtcaccttcatccctctcgtcatcgctgctgttctgctccacgcccacttgactttccccgtccgtgaccaagatgtttctctgccgccaaccgattccgaaagcatagtccagccgggcgacgacgttcccgatttcgatatagcgcagaaggaagaagagaagcaaaagctgcttgccgactccgatgttgctgctggctactttgcagtatgccgtgaatacacacccatgggcatcaatgccaagcccatcgagcgtactactcccgtgggatccacaaccgtcgctgctccgagccctagcgtctaccagtccatgtacaggagcatattcgacaggaagcagccacctggtcctctggatgacaataagagtgtcagccagcggcccaagcgcgctggcaacgtgttctacgtcgtcctaagacacggccatctcatgttattcgatgacgacgagcagctcgaggtgcgacatgtagtctcactagtcaaccacagtgtgagcatctactcaggcggcgactgcacacccgagggcgaattgttcatcaagcggaatgcaatatgtctaacaagaagggtcgacgggaagagtctcaccccggacacccagatatcgaagcctttctatctcttctccgagaactgttccgccaaggaggacttttacttttctctgctcagaaatcaggagcagtcattttcttcccataacatcgctcccagacctctacgatttgacgttaaaaacatcatatcactggttcagaaattacactcttcagatgatcatatgcaaactcggtggctcaatgcccttataggcaggatatttcttggcctgtacaagaccaaggacatcgagaatctgatcaaggagaagctcaccaagaagatttcaagagtcaaacgcccgggtttccttaccagggtcgccattcaaggcatcaatgtcggtgaatctgcgccgtatatctccaacccacgcctcaaggaccttaatgtcgaaggagagtgcgtgatggaagccgacctaaaatacaccggtaatttcaggctggaagtagctgctaccgctcgtatcgatcttgggacccgtttcaaagctcgagaagtgaaccttgtgttagcagtcgtgctgaggaaactagagggccacgtgtttttcaagctcaaaccgcctccaagcaaccgtctttggttttcctttcagtccatgcccaagatagagatgacgatcgaaccgatcgtcagcacacgacagatcacctataccgtcattctcaggcagatcgagaaccggataaaggaggtcattgcggaaacactggtgttgccgttctgggacgatacacctttcttctctacggaacacaaacaatggcgtggtgggatattcgagggtgatgacgctgtccaacattctgctgaccatgccagtatcgctgctgagcttggaaatgtggatgaagtcagtgaaattgaacatacgccacccccaatgtctcccgatttgcctcaattcgagaagagtgcgaccgagcccaattcggataataaccagtcagccggtttttggtctcgaactttaggcaagaagaaaagcttgaatctcaatcaaaggcaacaaaattctgcatccacaaccgctctggatgcgaagagtagccccggttcccccggcgagattccgcgcatcctaaggtcagggtcattttctgcttcgagcccacttatcagcacagagcctaccaacgcagaggctagcaaaccaatcgctactcctccggacgatggagatgccgcaagcacaatggcacacatatctgcacgatctgtgacagattcaccagttcatacaccagcgggctcacctacaaaatccacgaccatactcgaggctcatggttcatcctcaaattcatcatctgaagcgataaatcaactgcaagatgcagacagtaccccaaaaagtcaattgaggagagatacagcttcgtctgtggagagcgcatccaatgatcatagtgagccagccaatccgctcgggatcgtcgggagacagtcgacggcgagctcgaccgggtctacaagcaaaagcttatttggacgaaaagagatgtcgtcacctaacacaagccacggcgttccagagaacaaaaggaacacgttagcagccgtctccaatgccgctgctacggcgaaacgatggggtttgaacgccatacagcgtcaaacaaatcaaaataataataatggacgaaaactgtcagatccgcctgttgatctcaatctaccaatgggccgtggtcaaccactcccaccgcctggcacgccgttacctagacctgggcaaaaggcaaccccactgcctgtacccaaacgaaaaccggtctcttctccgccaaaattgacccctaaaagctccactgatcttaaagagtcaagaatcgaacgacgtcctgttccgccacccccgcttccgaggagaaggagagtttctcaaatccatgacaatgataataccgaagagaaccttcttgtcgtcgaagctcctgctgactcggagcctaactcgccttctatcgaaaatacgacctcatatatagagccgtggaccgaagatgctgaggatgtagaggagaaccagccaagctcggtcactgagaaatccgttctccccaaactacccgaacgagctccagagggtctctcacaagccgctcctgagaacgcgggaggatatgaagaagacgatgactactccaattggatagataatccggaatttcaagaggacgatggcaccaaagctaagccgctgagtgaccgctagtcgccttttaacgcatagacaggagtcaaactagaggtaagaaatcagtaggcacatttacgacattttcatgcgtgatgcatggaactgccttcaaacctatacgaggcatatcataactggtacggtgttattgcaaggattggataggaggaaacacggatggcaaggtgttcaggacaatgtcaattttgcttgaacaagtacaaatactatgttgaaattctagcataataaacatcactattttctgcccgacatactcggggccaaacataaattagtatattcaatgatgtagcataaatctctacgtgaaactgtccc

SEQ ID NO: 7459 - DNA, 1242 bp, Muscodor strobelii
  misc_feature: SGI cDNA ID NO. 562250
  misc_feature: Encodes the peptide sequence at SEQ ID NO 7460
atggctgagtctcacactagcaatgcgaccggttgtgacaagaatgccgccgaggtcacaaacaatgtcgcagacagtcacaactccgctgacagtagcacatcttccaacaatgctcaactgtcagacttcgggaccgactatgccgctgcctgggcgagcattatcgaccagctgtatgacaatgacaaccctgctgggctcctcagattatcccttaccatgtacaacagcctgggagaggacggacaggagtacttctgcaggcaatgggctgctttgaccgagacggatggacaattcttcctcgtctccatgcagcttgacaaggtcttcttcggaaatgaggacgctttgttgactcattatgatgacattgaagttacctctgtcccatccagaatgttacgacgtatcacacgtgtcgcggaaaatgacgaccaggttgctaccgcaaacgctcaagagacagtcgacaagaattcggataccaatgaagagacacagggcgccaccagcgagaatgcagacgctgacgatgtcagaccgtatagctcagaaaatggtcagacaacagccaaagaggaccgaaccggtatcaagagggccaaagccacagacagtgatggtcaagctgagctccaagagagtcgcactgcaggcaaaaagcgtcgaacgccttctccttctccccatctcacgtcgcccggctcgagcatgattcctcatgtcgactcacagggccctgacgaagttgagacaaaacaagatcttccgaaaccatatgtcaatcctcccccgctcattaaggaagagcagctcgacgagtacagactcaacgacactcctaagcctccgtcgcactcggccgacgatttgggtgcttatgaagggcgtgtcatcatagggctggaaaccatattgcctcgtgaagttcctaagcgtgaggctactaagcccggtactcctcaggctaaggctaaggccggcgacccggtcccggctcaaaagaaggctcagaagacttactcggtcggaagctcaccgagaccgtctcctgaaacctcaccagaaccgcaaacggcaaagaaacagtatcaaagagagacgcctgcaggactgccaaagcagtcggaaaagagcggcgaagcctggacgtggctggatgggattcctaaagaggctgaatcaaaagagcaggagcccggtcatcaagacaagatgtataaaaagaaggaatga

SEQ ID NO: 7460 - protein, 413 aa, Muscodor strobelii
  misc_feature: SGI Peptide ID NO. 562250
MAESHTSNATGCDKNAAEVTNNVADSHNSADSSTSSNNAQLSDFGTDYAAAWASIIDQLYDNDNPAGLLRLSLTMYNSLGEDGQEYFCRQWAALTETDGQFFLVSMQLDKVFFGNEDALLTHYDDIEVTSVPSRMLRRITRVAENDDQVATANAQETVDKNSDTNEETQGATSENADADDVRPYSSENGQTTAKEDRTGIKRAKATDSDGQAELQESRTAGKKRRTPSPSPHLTSPGSSMIPHVDSQGPDEVETKQDLPKPYVNPPPLIKEEQLDEYRLNDTPKPPSHSADDLGAYEGRVIIGLETILPREVPKREATKPGTPQAKAKAGDPVPAQKKAQKTYSVGSSPRPSPETSPEPQTAKKQYQRETPAGLPKQSEKSGEAWTWLDGIPKEAESKEQEPGHQDKMYKKKE

SEQ ID NO: 7461 - DNA, 630 bp, Muscodor strobelii
  misc_feature: SGI cDNA ID NO. 562251
  misc_feature: Encodes the peptide sequence at SEQ ID NO 7462
atgcttgagaacggtgagatgttacttggatctgaagagttggacacatcgccggacacatctcacgcaacagagatttccaatgccagccccctcatgtcccctttgctgtcgccgaccttaccacccgtcgtcatggaagagttagccgagctcgatgcatcccagaccgggcctgtcactgctgaccatattgatgaagccgctgacgacaccgatgcgagcagccgatctggttcagaagaagggcatttcgaccttgttgttttcgacgacgtagttgaactcctctcgtatcctactgatccgatgcctccaggtctgactgataatctagtcgttataagcgaagattcggatgaggagatggacctcattatcatgctattggctactcgctattggtactttgacatccaaaatatgaccacgaactttgaccgctggctcgaagtcttctccatgactcgacaagagcaccgtcttcgcgccgcttcacttccaagtctcgaaagcctcggcatgattgcaagtgctaccaattacaaaatctgcagcttcgttaagacaatccctcgaaaggccctacctcctgctagcaaagcccaaaaagagctggaggctgagtga

SEQ ID NO: 7462 - protein, 209 aa, Muscodor strobelii
  misc_feature: SGI Peptide ID NO. 562251
MLENGEMLLGSEELDTSPDTSHATEISNASPLMSPLLSPTLPPVVMEELAELDASQTGPVTADHIDEAADDTDASSRSGSEEGHFDLVVFDDVVELLSYPTDPMPPGLTDNLVVISEDSDEEMDLIIMLLATRYWYFDIQNMTTNFDRWLEVFSMTRQEHRLRAASLPSLESLGMIASATNYKICSFVKTIPRKALPPASKAQKELEAE

SEQ ID NO: 7463 - DNA, 1824 bp, Muscodor strobelii
  misc_feature: SGI cDNA ID NO. 562252
  misc_feature: Encodes the peptide sequence at SEQ ID NO 7464
atggagcgaaacgaagactttcgaagtaagcctcgggtgaaacatgagtatgaaatgtcaattgacctcagtcccaaggcgatgtttgatatcctcgaggccgacatagttgtcatgcaggagactaagatccagagaaaagaccttcgcgatgacatggtcctggttccgggatgggacgtattcttcagtcttccgcgacaaaaaaagggctacgctggcgtggctgtttacacgcgaaattccgtgtgtgcgccgatcagagcagaagagggtataactggtatcctatgtccacccaattccgcaacctcgttcagagacttgcccgaggatcaacaaatcggaggctatccacgattagggcaactaaccggagtgatcgacgagactgaacttgattgtgaagggcgctgcgtcatcctggaatttccagcgtttgtgctcattggtacatacagcccggccactagagatgagacgagagacgacttcagaataggctacaacactgctttagacgcaagagttcgtaatctagttgctatgggcaaacgcgtcgttctgacaggtgatctcaatatcgtgcgagacactattgatacggcaaatatcgcagagcgattgaagaaggagggcatgtcgatacaagattacttcgcagctccgacccgacgtcttttcaaccaccttgtctttgggggcaaagtccaaggacctagggacgaagaccgagagcaaccagtattgtgggaccttggccgcctcttccatcctacacgcgaaggcatgtttacttgttgggaggtcaaaaagaaccatcgcccgggaaattatggtggccgaatagactacgtcctttgcagtgatgatatgaaggagtggttcattgattcgaacatccaggagggtctgatggggtctgatcattgtcctgtatacgctactcttgccgacaaaattcagtataacggggaggacacgcatacggtagatgtgatgaacccatcaggagtatttcaagatggcaaacgcctgagggactggtcaagcaaagatttgcttccactgtcagccaagttgatacctgaatttgatcggcgacgaaatatcaaggacatgttcttcaagaaacccactgctcccaaggcaacagccccacagtcgcaagagccttccatgtctcaacccgacgatgcagtcgggccaccgtcttccacagatacaaatgctagttcgacacagccggctactatgatccagcctccatcaccattgaagacaagcaggacaagtctcaaacgcgcaccctcaggctcaggctctcccagcaaacccacgaagaagcctaaagccagcttagcgaaggagccctcagggaagggccaaagcagtctcatgggcttcttcaagcctaaggttaccaacgattctcctaagaaacaggatgaagcgcagccgcagcccatcgacagtacggccaataaactcgaagaccccgaaccagatcctaacgatacaccaatagacgctgctgcaactaatgataacgcagcatcaatcagcccggggaaagtcttcgaccctatacaaaataaagaatcgtggtctaagttacttgggaaacggatcctgcccaaatgtgaacacgatgaggactgcataaccttgacgacaaagaaaagtggcatgaataaggggagagcgttcttcatctgtcccagaccaatagggcccagtggcgaaaaggagacgggcacacaatggcgttgccccacgttcatctggagtagcgactggaaccccaataaagactccggttga

SEQ ID NO: 7464 - protein, 607 aa, Muscodor strobelii
  misc_feature: SGI Peptide ID NO. 562252
  misc_feature (21)..(317): Pfam Id: PF03372 Pfam Desc: Endonuclease/Exonuclease/phosphatase family
  misc_feature (34)..(317): Pfam Id: PF03372 Pfam Desc: Endonuclease/Exonuclease/phosphatase family
  misc_feature (12)..(606): NCBI GI: 171676121 Blast Desc: protein product [Podospora anserina] gi|170936126|emb|CAP60786.1| protein product [Podospora anserina]
  misc_feature (28)..(606): NCBI GI: 39971027 Blast Desc: MGG_02980 [Magnaporthe grisea 70-15] gi|149210567|ref|XP_001522658.1| MGCH7_ch7g758 [Magnaporthe grisea 70-15] gi|86196713|gb|EAQ71351.1| MGCH7_ch7g758 grisea
  misc_feature (24)..(601): NCBI GI: 116193731 Blast Desc: CHGG_06583 [Chaetomium globosum CBS 148.51] gi|88182496|gb|EAQ89964.1| CHGG_06583 [Chaetomium globosum CBS 148.51]
  misc_feature (26)..(600): NCBI GI: 29420515 Blast Desc: DNA lyase [Cordyceps militaris]
  misc_feature (26)..(601): NCBI GI: 29501198 Blast Desc: DNA lyase [Isaria tenuipes]
  misc_feature (26)..(601): NCBI GI: 29420517 Blast Desc: DNA lyase [Isaria tenuipes]
  misc_feature (26)..(601): NCBI GI: 29501194 Blast Desc: DNA lyase [Isaria tenuipes]
  misc_feature (26)..(579): NCBI GI: 62085796 Blast Desc: DNA lyase [Beauveria bassiana]
  misc_feature (26)..(579): NCBI GI: 62085788 Blast Desc: DNA lyase [Beauveria bassiana] gi|62085830|gb|AAX63306.1| DNA lyase [Beauveria bassiana] gi|62085840|gb|AAX63311.1| DNA lyase [Beauveria bassiana]
  misc_feature (26)..(579): NCBI GI: 62085798 Blast Desc: DNA lyase [Beauveria bassiana] gi|62085850|gb|AAX63316.1| DNA lyase [Beauveria bassiana]
  misc_feature (24)..(326): SWISSPROT Homolog: EC 4.2.99.18 DNA-(apurinic or apyrimidinic site) lyase
MERNEDFRSKPRVKHEYEMSIDLSPKAMFDILEADIVVMQETKIQRKDLRDDMVLVPGWDVFFSLPRQKKGYAGVAVYTRNSVCAPIRAEEGITGILCPPNSATSFRDLPEDQQIGGYPRLGQLTGVIDETELDCEGRCVILEFPAFVLIGTYSPATRDETRDDFRIGYNTALDARVRNLVAMGKRVVLTGDLNIVRDTIDTANIAERLKKEGMSIQDYFAAPTRRLFNHLVFGGKVQGPRDEDREQPVLWDLGRLFHPTREGMFTCWEVKKNHRPGNYGGRIDYVLCSDDMKEWFIDSNIQEGLMGSDHCPVYATLADKIQYNGEDTHTVDVMNPSGVFQDGKRLRDWSSKDLLPLSAKLIPEFDRRRNIKDMFFKKPTAPKATAPQSQEPSMSQPDDAVGPPSSTDTNASSTQPATMIQPPSPLKTSRTSLKRAPSGSGSPSKPTKKPKASLAKEPSGKGQSSLMGFFKPKVTNDSPKKQDEAQPQPIDSTANKLEDPEPDPNDTPIDAAATNDNAASISPGKVFDPIQNKESWSKLLGKRILPKCEHDEDCITLTTKKSGMNKGRAFFICPRPIGPSGEKETGTQWRCPTFIWSSDWNPNKDSG

SEQ ID NO: 7465 - DNA, 2145 bp, Muscodor strobelii
  misc_feature: SGI EST ID NO. CUFF.18518.1
  misc_feature: Variant of the nucleotide sequence at SEQ ID NO 7463
ctcagctgccggaatactgatgtgaataacgcagcaacccatttggatacaaaccatggagcgaaacgaagactttcgaagcgatgtttgatatcctcgaggccgacatagttgtcatgcaggagactaagatccagagaaaagaccttcgcgatgacatggtcctggttccgggatgggacgtattcttcagtcttccgcgacaaaaaaagggctacgctggcgtggctgtttacacgcgaaattccgtgtgtgcgccgatcagagcagaagagggtataactggtatcctatgtccacccaattccgcaacctcgttcagagacttgcccgaggatcaacaaatcggaggctatccacgattagggcaactaaccggagtgatcgacgagactgaacttgattgtgaagggcgctgcgtcatcctggaatttccagcgtttgtgctcattggtacatacagcccggccactagagatgagacgagagacgacttcagaataggctacaacactgctttagacgcaagagttcgtaatctagttgctatgggcaaacgcgtcgttctgacaggtgatctcaatatcgtgcgagacactattgatacggcaaatatcgcagagcgattgaagaaggagggcatgtcgatacaagattacttcgcagctccgacccgacgtcttttcaaccaccttgtctttgggggcaaagtccaaggacctagggacgaagaccgagagcaaccagtattgtgggaccttggccgcctcttccatcctacacgcgaaggcatgtttacttgttgggaggtcaaaaagaaccatcgcccgggaaattatggtggccgaatagactacgtcctttgcagtgatgatatgaaggagtggttcattgattcgaacatccaggagggtctgatggggtctgatcattgtcctgtatacgctactcttgccgacaaaattcagtataacggggaggacacgcatacggtagatgtgatgaacccatcaggagtatttcaagatggcaaacgcctgagggactggtcaagcaaagatttgcttccactgtcagccaagttgatacctgaatttgatcggcgacgaaatatcaaggacatgttcttcaagaaacccactgctcccaaggcaacagccccacagtcgcaagagccttccatgtctcaacccgacgatgcagtcgggccaccgtcttccacagatacaaatgctagttcgacacagccggctactatgatccagcctccatcaccattgaagacaagcaggacaagtctcaaacgcgcaccctcaggctcaggctctcccagcaaacccacgaagaagcctaaagccagcttagcgaaggagccctcagggaagggccaaagcagtctcatgggcttcttcaagcctaaggttaccaacgattctcctaagaaacaggatgaagcgcagccgcagcccatcgacagtacggccaataaactcgaagaccccgaaccagatcctaacgatacaccaatagacgctgctgcaactaatgataacgcagcatcaatcagcccggggaaagtcttcgaccctatacaaaataaagaatcgtggtctaagttacttgggaaacggatcctgcccaaatgtgaacacgatgaggactgcataaccttgacgacaaagaaaagtggcatgaataaggggagagcgttcttcatctgtcccagaccaatagggcccagtggcgaaaaggagacgggcacacaatggcgttgccccacgttcatctggagtagcgactggaaccccaataaagactccggttgattgtttcatttcattcgatatgcggagcctcgtattcggtatattcgacgttcgggtttggcgtttggtgacaggatacttgctattaactggtaggacacagaaagtaggatgataagccttactcatgggagtgtgttctgaggtctactgctaaatgatagaatactagcggtgctgatacatttgcttgaatcagcgaatagatgtattcgtctttcgtcgtttgatcatggctgttatgtgctctaactatgacagcttccgcgttgtaaatagctgcttgcttgccgtgttatattcctccaatctatgctcg

SEQ ID NO: 7466 - DNA, 402 bp, Muscodor strobelii
  misc_feature: SGI cDNA ID NO. 562253
  misc_feature: Encodes the peptide sequence at SEQ ID NO 7467
atgcagcccatccgccagatctcccgcgcgaccccgcgcctagccgcacagctgcgcgctcccaccgtccgctcgacgctgcagcgccgtctcgcctcgacctccgacaacgccttcgtgcgcgagcgcgaggccgtcaagcaccacgccgaggagacgacggagctctggcgcaagatctcgctctacggcgtgcctccctgtctcctactcgccgggtacaacgcgtacaacctgtggaacgagcattgggagcactgggagcacatgccacctctggaggaccgcgtcgagtacccgtaccagaacatccggaccaagaactatcagtggggtgatggtgataagactttattctggaacgacaaggtcaactaccacaacaaggacaagactgcctaa

SEQ ID NO: 7467 - protein, 133 aa, Muscodor strobelii
  misc_feature: SGI Peptide ID NO. 562253
  misc_feature (31)..(132): Pfam Id: PF02046 Pfam Desc: Cytochrome c oxidase subunit VIa
  misc_feature (49)..(132): Pfam Id: PF02046 Pfam Desc: Cytochrome c oxidase subunit VIa
  misc_feature (13)..(132): NCBI GI: 85112355 Blast Desc: NCU01962 [Neurospora crassa OR74A] gi|28926104|gb|EAA35090.1| NCU01962 [Neurospora crassa OR74A]
  misc_feature (1)..(133): NCBI GI: 46129425 Blast Desc: FG08888.1 [Gibberella zeae PH-1]
  misc_feature (1)..(133): NCBI GI: 256734231 Blast Desc: NECHADRAFT_99757 [Nectria haematococca mpVI 77-13-4]
  misc_feature (1)..(132): NCBI GI: 255945067 Blast Desc: Pc20g07780 [Penicillium chrysogenum Wisconsin 54-1255] gi|211588036|emb|CAP86107.1| Pc20g07780 [Penicillium chrysogenum Wisconsin 54-1255]
  misc_feature (1)..(132): NCBI GI: 146323279 Blast Desc: cytochrome c oxidase subunit VIa [Aspergillus fumigatus Af293] gi|129558369|gb|EAL92949.2| cytochrome c oxidase subunit VIa, [Aspergillus fumigatus Af293]
  misc_feature (1)..(132): NCBI GI: 119493286 Blast Desc: cytochrome c oxidase subunit VIa, [Neosartorya fischeri NRRL 181] gi|119411993|gb|EAW21936.1| cytochrome c oxidase subunit VIa, [Neosartorya fischeri NRRL 181]
  misc_feature (1)..(132): NCBI GI: 159128002 Blast Desc: cytochrome c oxidase subunit VIa, [Aspergillus fumigatus A1163]
  misc_feature (1)..(132): NCBI GI: 145245421 Blast Desc: An11g10200 [Aspergillus niger] gi|134079678|emb|CAK97104.1| protein product [Aspergillus niger]
  misc_feature (8)..(131): NCBI GI: 145609798 Blast Desc: MGG_02983 [Magnaporthe grisea 70-15] gi|145017183|gb|EDK01546.1| MGG_02983 [Magnaporthe grisea 70-15]
  misc_feature (1)..(132): NCBI GI: 121704748 Blast Desc: cytochrome c oxidase subunit VIa, [Aspergillus clavatus NRRL 1] gi|119398783|gb|EAW09211.1| cytochrome c oxidase subunit VIa, [Aspergillus clavatus NRRL 1]
MQPIRQISRATPRLAAQLRAPTVRSTLQRRLASTSDNAFVREREAVKHHAEETTELWRKISLYGVPPCLLLAGYNAYNLWNEHWEHWEHMPPLEDRVEYPYQNIRTKNYQWGDGDKTLFWNDKVNYHNKDKTA

SEQ ID NO: 7468 - DNA, 956 bp, Muscodor strobelii
  misc_feature: SGI EST ID NO. CUFF.18505.0
  misc_feature: Variant of the nucleotide sequence at SEQ ID NO 7466
acccggtacagtccaagcttggtagagctccatccatctcgaacctgacctcatccaaacctctccaaccaaaagacgctcaatcgtcaaccacaccgcccaatctcccctccacgcacccaaaacacaaccacgatgcagcccatccgccagatctcccgcgcgaccccgcgcctagccgcacagctgcgcgctcccaccgtccgctcgacgctgcagcgccgtctcgcctcgacctccgacaacgccttcgtgcgcgagcgcgaggccgtcaagcaccacgccgaggagacgacggagctctggcgcaagatctcgctctacggcgtgcctccctgtctcctactcgccgggtacaacgcgtacaacctgtggaacgagcattgggagcactgggagcacatgccacctctggaggaccgcgtcgagtacccgtaccagaacatccggaccaagaactatcagtggggtgatggtgataagactttattctggaacgacaaggtcaactaccacaacaaggacaagactgcctaaatgccatacccacccatcctcacctaccctacccgcacttcgcaccgagctaggaatcacgggatagactgagagaacttgggctactgaagggaggaagagggaaaacaaataccgaaaccagaatcatagaccaccttcgaaggcgtccgtctgaattgtagatatgtaacttccctttgtcaaatcaatgcataacatccacctatctacgtggtaatcgcggttccctacgagacaagcgaataggtttcagtcggtgttttttgacgtgatgatgcggtatagattgtttatatgaactgcgtatacttgtcttcaatattctagggtgaagctacctatgtcggctgatacgcatgtgttaattacacggtatacagatcaattgagtcaccagacttgccgtacactaccaa

SEQ ID NO: 7469 - DNA, 3072 bp, Muscodor strobelii
  misc_feature: SGI cDNA ID NO. 562254
  misc_feature: Encodes the peptide sequence at SEQ ID NO 7470
atggcgtcgaccactgctgccatggcctgggcttacccgtatgctaccagatccgaggccgagctcgccatccacatccgaaaggccaccaatgtcgacgagaccgccccgaagcgcaagcatgtccgcgcctgtatcgtctatacatgggaccacaagtcctctcagtccttctggggtggcgtaaaggtccagcccatcctcgccgacgaggtccagacattcaaggccctcattaccatccaccgagtcctgcaggagggacaccctacgaccttacgagacgcattggcaaaccgaagctggatcgatggcttgaacaggggcttggctggtgaaggcgtccgaggatacgggcccctgattcgggaatatgtctacttcctgctcgccaagctctcctttcaccagcagcaccctgagttcaacggcactttcgagtacgaggagtacatcagtctaaaggccatcaatgaccccaacgaaggctacgagaccatctccgacctcatggctctgcaggacaagatcgagcagttccagaagctcatcttctcccacttcaggaacgttggcaacaacgaatgcaggatctctgctattgtacctctcgtgcaggagagctatggcatttacaaatttattacgagcatgttgcgagccttgcattcgacaacgggcgataatgacgccctcgagcctcttcgcgaacgctacaacgcccaacattaccgattagtcaagttttactacgaatctcggccgaaacaagagatcgagcgtccgccaacgcctgtggcccaaccgaagacagaagaacctggggagatcgccgaattctggcagggcgagatcgagcgacagaaccgggaatacgaagagcagcagagagtgttgcaagaacgtcaacaggcggctctccaggcccagcagaatgcgcaattacaagctcagcgagattttgaggagcagcagagacgcttggctgagcagcagcgaagagaacaagaagccctcatgaatcagcagtaccaaatgcagacgcaaggacgactggctgaactcgagcaggagaatttgaatgctcgagctcagtatgagcgtgatcagctgatgctgcagcagtacgaccagagagtaaaggctctcgaaggtgagctagggcagatacagaacaattttggacagcaaataagcagcaaggatgatcagattcgggctctccaggaacaggtcaacacatggcgcacgaaatacgaggctctcgcgaagctatactcgcaattgcgacacgaacatctcgacttgctccagaaattcaagtcggtgcagctgaaggcggcatctgcgcaggaagccatcgacaggcgtgagaaacttgagcgggagatcaagacaaagaatctggaactagcagacatgattcgagaaagagatcgtgccttgcacgaccgtgacagaatgacgggtaccaacaaggacgagcttgagaagcttaagcgagaactgcgcatggcaaacgaccgtgctgataatctggagcgcagcaagggcaacgaactatcgacgatgctatcgaagtacaaccgcgagatggcagatctggaggaggcattgcgcaccaagtcgcgcgctttggaagaggcgcagtctaagcttcgtgatggcagctctgatcttgaacagcttctacgtgagaaggaagaggagctcgaggtctataaggctggcatggaccagacactgattgagctgaatgaactcaagctcaaccaaggcgacactgacacggctttggatggccagattgatgctttgattatggccaatatggataaggtcaacgacatcattgactctgtattacaggcaggtgtcgcaagagtagacgatgctttatacgagctagactcgacgatgcaagcaggtaaccagaatgcctcgcccgcctatgtcttgtcgcaaatcgaaaaggcctccgctagtgctatggagtttgccaccgctttcaataacttcattgccgatgggccgaatgcgaaccatgccgatctcatcaaggctatcaacgtcttttcgggatccgcagccgacgtgtgcagcaacacgaaaggtctaactcgcctcgccactgacgagaaaaagggcgaccaactcatgaatggtgcgcgcacagccgcgcaatccgctgtgaagttcttccgtggacttcagagtttccgattggagggcatggaccccattcagaagactgacgttgttatcaacaccaataatgaggttcagatgaacttgcagaaattgaataagctcgtcgagacgtttgctcccggcttcggtcgtctagcgaacaacaagggcgatcttggagatcttgtcgacaacgagctgagcaaggcggcagacgccatagccgcggctgcagcccgtctagctaagttgaagaacaaaccgcgcgatggatattctacatacgaactcaaggtcaacgacacgatactggatgccgcacaagccatcaccaacgctatacagcagctcatcaaggccgccacggcaacacagcaggaaatcgtgcaagccggccgtggctcttcttctagaactgcattctacaagaagaataaccggtggaccgagggtctcatctctgccgccaaggcagttgcgtcatcaaccaacacactcatcgagacagctgacggcgtgatctccaaccgcgctagccctgagcagctcatcgtggcatcgaacgatgtagcggcctctacggcacagctggtagccgctagtcgtgtcaaggcgggcttcatgagcaagagccaggagaatctggagcaggctagcaaggctgtcggtgccgcttgcaggagcctggtcagacaggtgcaggctatgatcaaggacaggaaccaagaggaggacgatgttgattattcgaagttgggcgcgtatgagtttaaggttagggagatggaacagcaggtcgagattcttaaacttgagaatgatctcagtgcggccagacataggcttggcgagatgcgcaagatttcttaccaggaggagtaa

SEQ ID NO: 7470 - protein, 1023 aa, Muscodor strobelii
  misc_feature: SGI Peptide ID NO. 562254
  misc_feature (19)..(284): Pfam Id: PF07651 Pfam Desc: ANTH domain
  misc_feature (19)..(139): Pfam Id: PF01417 Pfam Desc: ENTH domain
  misc_feature (829)..(1023): Pfam Id: PF01608 Pfam Desc: I/LWEQ domain
  misc_feature (19)..(254): Pfam Id: PF07651 Pfam Desc: ANTH domain
  misc_feature (13)..(1023): NCBI GI: 39970965 Blast Desc: MGG_02949 [Magnaporthe grisea 70-15] gi|149210495|ref|XP_001522622.1| MGCH7_ch7g722 [Magnaporthe grisea 70-15] gi|86196677|gb|EAQ71315.1| MGCH7_ch7g722 grisea
  misc_feature (16)..(1023): NCBI GI: 171676125 Blast Desc: protein product [Podospora anserina] gi|170936128|emb|CAP60788.1| protein product [Podospora anserina]
  misc_feature (16)..(1023): NCBI GI: 85112067 Blast Desc: NCU11202 [Neurospora crassa OR74A] gi|28926013|gb|EAA35004.1| NCU11202 [Neurospora crassa OR74A]
  misc_feature (65)..(1023): NCBI GI: 261353447 Blast Desc: SLA2 [Verticillium albo-atrum VaMs.102]
  misc_feature (16)..(1023): NCBI GI: 116193739 Blast Desc: conserved [Chaetomium globosum CBS 148.51] gi|88182500|gb|EAQ89968.1| conserved [Chaetomium globosum CBS 148.51]
  misc_feature (16)..(1014): NCBI GI: 156056553 Blast Desc: SS1G_04007 [Sclerotinia sclerotiorum 1980] gi|154701793|gb|EDO01532.1| SS1G_04007 [Sclerotinia sclerotiorum 1980]
  misc_feature (16)..(1022): NCBI GI: 238845592 Blast Desc: SlaB [Microsporum canis CBS 113480]
  misc_feature (16)..(1022): NCBI GI: 240106239 Blast Desc: endocytosis protein end4, [Coccidioides posadasii C735 delta SOWgp]
  misc_feature (16)..(1023): NCBI GI: 71000619 Blast Desc: cytoskeleton assembly control protein Sla2 [Aspergillus fumigatus Af293] gi|66852628|gb|EAL92953.1| cytoskeleton assembly control protein Sla2, [Aspergillus Af293]
  misc_feature (18)..(1023): NCBI GI: 159128006 Blast Desc: cytoskeleton assembly control protein Sla2, [Aspergillus fumigatus A1163]
MASTTAAMAWAYPYATRSEAELAIHIRKATNVDETAPKRKHVRACIVYTWDHKSSQSFWGGVKVQPILADEVQTFKALITIHRVLQEGHPTTLRDALANRSWIDGLNRGLAGEGVRGYGPLIREYVYFLLAKLSFHQQHPEFNGTFEYEEYISLKAINDPNEGYETISDLMALQDKIEQFQKLIFSHFRNVGNNECRISAIVPLVQESYGIYKFITSMLRALHSTTGDNDALEPLRERYNAQHYRLVKFYYESRPKQEIERPPTPVAQPKTEEPGEIAEFWQGEIERQNREYEEQQRVLQERQQAALQAQQNAQLQAQRDFEEQQRRLAEQQRREQEALMNQQYQMQTQGRLAELEQENLNARAQYERDQLMLQQYDQRVKALEGELGQIQNNFGQQISSKDDQIRALQEQVNTWRTKYEALAKLYSQLRHEHLDLLQKFKSVQLKAASAQEAIDRREKLEREIKTKNLELADMIRERDRALHDRDRMTGTNKDELEKLKRELRMANDRADNLERSKGNELSTMLSKYNREMADLEEALRTKSRALEEAQSKLRDGSSDLEQLLREKEEELEVYKAGMDQTLIELNELKLNQGDTDTALDGQIDALIMANMDKVNDIIDSVLQAGVARVDDALYELDSTMQAGNQNASPAYVLSQIEKASASAMEFATAFNNFIADGPNANHADLIKAINVFSGSAADVCSNTKGLTRLATDEKKGDQLMNGARTAAQSAVKFFRGLQSFRLEGMDPIQKTDVVINTNNEVQMNLQKLNKLVETFAPGFGRLANNKGDLGDLVDNELSKAADAIAAAAARLAKLKNKPRDGYSTYELKVNDTILDAAQAITNAIQQLIKAATATQQEIVQAGRGSSSRTAFYKKNNRWTEGLISAAKAVASSTNTLIETADGVISNRASPEQLIVASNDVAASTAQLVAASRVKAGFMSKSQENLEQASKAVGAACRSLVRQVQAMIKDRNQEEDDVDYSKLGAYEFKVREMEQQVEILKLENDLSAARHRLGEMRKISYQEE

SEQ ID NO: 7471 - DNA, 3925 bp, Muscodor strobelii
  misc_feature: SGI EST ID NO. CUFF.18616.0
  misc_feature: Variant of the nucleotide sequence at SEQ ID NO 7469
cagagctccagttcgccgtgcacagctgacgtctatgtcgatcttggcgaatcgagtctaggagcagcgttgcgcaaccaacaaaccatcatttgctcggctttaggcgccaatatttatttcccctcgcctgcatcccagacacgcatcgctcatttttaatataataaatctacggttgcgcctgcagctgacttggattgtattatttgtttcacctgttcctcacgacctgcgccctttcccgcgcctaccttcacctgatccgccgctcctaccatcgtcgagccgagcgtggaaggccaaacccagaacgagacggcacctgcgtacaaggtgggatgcgctgtcgctagccagctactgcagcttgcttgaagctctttcccgcgtcctgtgctacctgtgctcctgcctcttcctacggttggcagtagcttcgctgctgcgcccaagagtattggtgcatcatggcgacaactcgtagtctagaccatacaaagtgtgtttccctctgttcactctacttgtgattggtgttgtctgtctcggcctctcgctactcacaatggcgtcgaccactgctgccatggcctgggcttacccgtatgctaccagatccgaggccgagctcgccatccacatccgaaaggccaccaatgtcgacgagaccgccccgaagcgcaagcatgtccgcgcctgtatcgtctatacatgggaccacaagtcctctcagtccttctggggtggcgtaaaggtccagcccatcctcgccgacgaggtccagacattcaaggccctcattaccatccaccgagtcctgcaggagggacaccctacgaccttacgagacgcattggcaaaccgaagctggatcgatggcttgaacaggggcttggctggtgaaggcgtccgaggatacgggcccctgattcgggaatatgtctacttcctgctcgccaagctctcctttcaccagcagcaccctgagttcaacggcactttcgagtacgaggagtacatcagtctaaaggccatcaatgaccccaacgaaggctacgagaccatctccgacctcatggctctgcaggacaagatcgagcagttccagaagctcatcttctcccacttcaggaacgttggcaacaacgaatgcaggatctctgctattgtacctctcgtgcaggagagctatggcatttacaaatttattacgagcatgttgcgagccttgcattcgacaacgggcgataatgacgccctcgagcctcttcgcgaacgctacaacgcccaacattaccgattagtcaagttttactacgaatgttcgaaccttcgatacctcaccaccttaattaccatccccaagctcccacaagatcctcccaaccttcttgccgacgatgagagtgcccccgcctgccagctcggccgaaacaagagatcgagcgtccgccaacgcctgtggcccaaccgaagacagaagaacctggggagatcgccgaattctggcagggcgagatcgagcgacagaaccgggaatacgaagagcagcagagagtgttgcaagaacgtcaacaggcggctctccaggcccagcagaatgcgcaattacaagctcagcgagattttgaggagcagcagagacgcttggctgagcagcagcgaagagaacaagaagccctcatgaatcagcagtaccaaatgcagacgcaaggacgactggctgaactcgagcaggagaatttgaatgctcgagctcagtatgagcgtgatcagctgatgctgcagcagtacgaccagagagtaaaggctctcgaaggtgagctagggcagatacagaacaattttggacagcaaataagcagcaaggatgatcagattcgggctctccaggaacaggtcaacacatggcgcacgaaatacgaggctctcgcgaagctatactcgcaattgcgacacgaacatctcgacttgctccagaaattcaagtcggtgcagctgaaggcggcatctgcgcaggaagccatcgacaggcgtgagaaacttgagcgggagatcaagacaaagaatctggaactagcagacatgattcgagaaagagatcgtgccttgcacgaccgtgacagaatgacgggtaccaacaaggacgagcttgagaagcttaagcgagaactgcgcatggcaaacgaccgtgctgataatctggagcgcagcaagggcaacgaactatcgacgatgctatcgaagtacaaccgcgagatggcagatctggaggaggcattgcgcaccaagtcgcgcgctttggaagaggcgcagtctaagcttcgtgatggcagctctgatcttgaacagcttctacgtgagaaggaagaggagctcgaggtctataaggctggcatggaccagacactgattgagctgaatgaactcaagctcaaccaaggcgacactgacacggctttggatggccagattgatgctttgattatggccaatatggataaggtcaacgacatcattgactctgtattacaggcaggtgtcgcaagagtagacgatgctttatacgagctagactcgacgatgcaagcaggtaaccagaatgcctcgcccgcctatgtcttgtcgcaaatcgaaaaggcctccgctagtgctatggagtttgccaccgctttcaataacttcattgccgatgggccgaatgcgaaccatgccgatctcatcaaggctatcaacgtcttttcgggatccgcagccgacgtgtgcagcaacacgaaaggtctaactcgcctcgccactgacgagaaaaagggcgaccaactcatgaatggtgcgcgcacagccgcgcaatccgctgtgaagttcttccgtggacttcagagtttccgattggagggcatggaccccattcagaagactgacgttgttatcaacaccaataatgaggttcagatgaacttgcagaaattgaataagctcgtcgagacgtttgctcccggcttcggtcgtctagcgaacaacaagggcgatcttggagatcttgtcgacaacgagctgagcaaggcggcagacgccatagccgcggctgcagcccgtctagctaagttgaagaacaaaccgcgcgatggatattctacatacgaactcaaggtcaacgacacgatactggatgccgcacaagccatcaccaacgctatacagcagctcatcaaggccgccacggcaacacagcaggaaatcgtgcaagccggccgtggctcttcttctagaactgcattctacaagaagaataaccggtggaccgagggtctcatctctgccgccaaggcagttgcgtcatcaaccaacacactcatcgagacagctgacggcgtgatctccaaccgcgctagccctgagcagctcatcgtggcatcgaacgatgtagcggcctctacggcacagctggtagccgctagtcgtgtcaaggcgggcttcatgagcaagagccaggagaatctggagcaggctagcaaggctgtcggtgccgcttgcaggagcctggtcagacaggtgcaggctatgatcaaggacaggaaccaagaggaggacgatgttgattattcgaagttgggcgcgtatgagtttaaggttagggagatggaacagcaggtcgagattcttaaacttgagaatgatctcagtgcggccagacataggcttggcgagatgcgcaagatttcttaccaggaggagtaaaaatacatagctgtgcagaggttgtgtggtcggacaatggcgtacttgaatgcataccagggtgtgttgtatctaggtagcagtgaatgaattataagagtctgcaagactacctaatttggattatgttttgcattgttagttgatcgattgatgcctattacggatgtcgatggtgagcgag

SEQ ID NO: 7472 - DNA, 807 bp, Muscodor strobelii
  misc_feature: SGI cDNA ID NO. 562255
  misc_feature: Encodes the peptide sequence at SEQ ID NO 7473
atgcgcaccacacaaatcctgctagcaaaagggttctggaaccgcagcctcgacgaattcaagcgactctccaaattcgccctcgaaagcgaaggcataaaagggccctctggtcccttacccctccactccttcgacacaccaacctccattgcagactgcaagaccctctccgacacagacatcggcggctactcaaccgtccatctctcacacgtcccagggcagtcaggaaccacaaccacatcccctcccactccaccgcacgcccgtttccacggcacaatatccaccgaactaccccccaacaaaccagacgtccaacgctccggctacgccgcctggcgcacgctcgaccgccccccaacattattcggaaaagcactattcaacatcgacatgtacgcctacctcgccctccgcgtgcgatcagacggtcggagctacctagtcaacatccagacggaatccgttgtccccacagatctacaccagcacaggttattcgtaaaacgccccggagaatgggagacggtgttgataaaatggaatgatttcgttcggacgaaccacggctttgtcgtcgagccgcagacggagatactacggcagaaagtaaggacgctcggtatcgggctgacggatcgtgtgcccggtccgtttgagctttgtatcgagaggatttgggctacgaatgatttgagtgagggtgaggttgtcactcctgaagcctctatggcggctacgaaagagggaacgttgaagaataagcacgggagacacataaattggagcgagaagtcatga

SEQ ID NO: 7473 - protein, 268 aa, Muscodor strobelii
  misc_feature: SGI Peptide ID NO. 562255
  misc_feature (43)..(230): Pfam Id: PF08547 Pfam Desc: Complex I intermediate-associated protein 30 (CIA30)
  misc_feature (1)..(267): NCBI GI: 116193707 Blast Desc: CHGG_06571 [Chaetomium globosum CBS 148.51] gi|88182484|gb|EAQ89952.1| CHGG_06571 [Chaetomium globosum CBS 148.51]
  misc_feature (6)..(264): NCBI GI: 39943286 Blast Desc: MGG_03723 [Magnaporthe grisea 70-15] gi|145009679|gb|EDJ94335.1| MGG_03723 [Magnaporthe grisea 70-15]
  misc_feature (1)..(262): NCBI GI: 21541995 Blast Desc: CIA30_NEUCR RecName: Full=Complex I intermediate-associated protein 30, mitochondrial; Flags: Precursor gi|2661430|emb|CAA04954.1| complex I intermediate CIA30
  misc_feature (1)..(264): NCBI GI: 256733727 Blast Desc: NECHADRAFT_103861 [Nectria haematococca mpVI 77-13-4]
  misc_feature (31)..(267): NCBI GI: 171676093 Blast Desc: protein product [Podospora anserina] gi|170936112|emb|CAP60772.1| protein product [Podospora anserina]
  misc_feature (1)..(263): NCBI GI: 164429595 Blast Desc: NCU01975 [Neurospora crassa OR74A] gi|157073542|gb|EAA35103.2| conserved [Neurospora crassa OR74A]
  misc_feature (27)..(259): NCBI GI: 46129421 Blast Desc: FG08886.1 [Gibberella zeae PH-1]
  misc_feature (1)..(266): NCBI GI: 169595288 Blast Desc: SNOG_00381 [Phaeosphaeria nodorum SN15] gi|111070756|gb|EAT91876.1| SNOG_00381 [Phaeosphaeria nodorum SN15]
  misc_feature (1)..(240): NCBI GI: 189202660 Blast Desc: complex I intermediate-associated protein 30, mitochondrial precursor [Pyrenophora tritici-repentis Pt-1C-BFP] gi|187984765|gb|EDU50253.1| complex I intermediate-associated 30,
  misc_feature (27)..(267): NCBI GI: 156056537 Blast Desc: SS1G_03999 [Sclerotinia sclerotiorum 1980] gi|154701785|gb|EDO01524.1| SS1G_03999 [Sclerotinia sclerotiorum 1980]
MRTTQILLAKGFWNRSLDEFKRLSKFALESEGIKGPSGPLPLHSFDTPTSIADCKTLSDTDIGGYSTVHLSHVPGQSGTTTTSPPTPPHARFHGTISTELPPNKPDVQRSGYAAWRTLDRPPTLFGKALFNIDMYAYLALRVRSDGRSYLVNIQTESVVPTDLHQHRLFVKRPGEWETVLIKWNDFVRTNHGFVVEPQTEILRQKVRTLGIGLTDRVPGPFELCIERIWATNDLSEGEVVTPEASMAATKEGTLKNKHGRHINWSEKS

SEQ ID NO: 7474 - DNA, 2349 bp, Muscodor strobelii
  misc_feature: SGI cDNA ID NO. 562256
  misc_feature: Encodes the peptide sequence at SEQ ID NO 7475
atgtcacgatttctcaacccggccaaaatcggccttttagctctcattgagctgtatacaaataagactgtggcaacatcatcgattgtggatgtgcagtcttttataacgtctcatcttatcgacacggacatctccggcacagcggccgacgttgatggacgatggcagcgagccgagaaggcaattaatctagtcgtctctatctcggacttcgagaaagttctgtcgccacataccgttgcgtcgggcctgcctgggcgtaacctatggtttgttttcattgataagctatggaggatcgactcgctcaacgccctccacgagttctttgaccattgttcgacccttttagtcaagacgaaggaagaagctcgtcgagacaccgagctcgggataccacctccaggaccagaggtcattcagctctcgcggaattcgccgttcggtgcttttgttcggagatctcaacttgagttcactcgacttcgttttcatgattcgatcgaactgtggaaagattttgtcaaataccgccaaacaactgcatcatattatcgaaagaaagtaccgtcttttcagcaatacagctttgacgatgttctactcacaggacagcatgagtggagcgagggggttgagggcattgcctcagttgtgtacggcgacatgcttagggacgatcttaatccgactttgcctgtcagcactgatgatatcgagaagctgctcgagttccaaatcgatcagatgcagaagtacggaaatagaatacccatgggaatccggcaacaattcaccgacctattgagagacagttacatgataccaagtctagcgcattacctgagctacctagatgcatggcgctcaggcgattatgctacttcgtttgattatttacatcggtatttcgactatacgatgcagaaccgagatagatcgttctaccaatacgcacttatgaacctagccgtcctccaagctgactttggctgctataaggaagccgtggctgcaatgctggaaacggtgtcgacggcgagagaaaaccgggatatgacttgtctcaactttgctctgaactggctattccatttcgggcgtgcacatcctgaggttactcatgatcttgaatcaaagagtatgctcggtacaggcaaagaatcacttgctttcctccgaagcagagctaaagagactggtgcatggtcactatggagttcagctttgatgagtgaggcaaagatgtgtctatctaacggcgagagtgtggctaccgccttggaacacctggtccggagctcgcagatcttggtagagcggaacatgaagagcatggtaggatcccaactatccatcaacatagcgctctgggataggctaggtgtcgcatatctctcatcgacaacctgtgaagtattcctccaatgttatgctcaccattctatattcgacgacgagctcaaagtcacgagtcgtcaggcctcaatgcttgcattgaaggggagatacgacgaagcactagagaggctcgagagtctggatgcagactcactgcgagcctggaaaccgagtcagtactggcacaagtttcgtggcatcatcagattaaggagagatctccaccacaatgacgttgacggcgctgagctactactctcgcaactcttgcagtctaagagcgaagatttggaacccgacttagcctttgtgattgatacgttacatgtcgagtgtttagttcgacggggcaacatggaggcggcgctcaacaaggtggagaagatggtctcggagcttcgggacgagaataaagacgttgcgcttcgggtgaggctactactcctcaagacggagctcctggataaatgcggccgcccgcagaaggcctttacgatcgctgttcgtgcggccaacgtggcgtggagagcacgacttgtgccgtatatatggccggcgatgggcgcaattgccaatattctatcgagtttaggcgaattcgagggagcgatcaagctattacgtgccgtgctgccgagaagtctggagtgtgataacgaggccatgacagcgagactgtactcgtaccttggtgatgcgaatgttggcatggcggggaaaatggagccgaagtcactgaaacggagagagtacctgacgaaaggactggaggcgatcgagaatgcgtttaatcattactcgagtgttgaagatatcaacaagcagtgtgagatgatggcgaagaaagctacgatcatgaaggtctcgggggatatggtcttagcaaatgactacgcagctgcgtacttggcgttgaggagagacgcgaagaatatgtctctttga

SEQ ID NO: 7475 - protein, 782 aa, Muscodor strobelii
  misc_feature: SGI Peptide ID NO. 562256
  misc_feature (1)..(781): NCBI GI: 46129423 Blast Desc: FG08887.1 [Gibberella zeae PH-1]
  misc_feature (1)..(782): NCBI GI: 256734230 Blast Desc: [Nectria haematococca mpVI 77-13-4]
  misc_feature (1)..(782): NCBI GI: 261353452 Blast Desc: anaphase-promoting complex protein [Verticillium albo-atrum VaMs.102]
  misc_feature (1)..(779): NCBI GI: 85112359 Blast Desc: NCU01963 [Neurospora crassa OR74A] gi|28926105|gb|EAA35091.1| conserved [Neurospora crassa OR74A]
  misc_feature (1)..(775): NCBI GI: 39971029 Blast Desc: MGG_02981 [Magnaporthe grisea 70-15] gi|149210569|ref|XP_001522659.1| MGCH7_ch7g759 [Magnaporthe grisea 70-15] gi|86196714|gb|EAQ71352.1| MGCH7_ch7g759 grisea
  misc_feature (1)..(780): NCBI GI: 116193727 Blast Desc: CHGG_06581 [Chaetomium globosum CBS 148.51] gi|88182494|gb|EAQ89962.1| CHGG_06581 [Chaetomium globosum CBS 148.51]
  misc_feature (1)..(778): NCBI GI: 171676117 Blast Desc: protein product [Podospora anserina] gi|170936124|emb|CAP60784.1| protein product [Podospora anserina]
  misc_feature (104)..(775): NCBI GI: 154291707 Blast Desc: BC1G_15144 [Botryotinia fuckeliana B05.10] gi|150846644|gb|EDN21837.1| BC1G_15144 [Botryotinia fuckeliana B05.10]
  misc_feature (1)..(777): NCBI GI: 226294612 Blast Desc: anaphase-promoting complex protein [Paracoccidioides brasiliensis Pb18]
  misc_feature (1)..(775): NCBI GI: 159128001 Blast Desc: anaphase-promoting complex subunit Apc5, [Aspergillus fumigatus A1163]
MSRFLNPAKIGLLALIELYTNKTVATSSIVDVQSFITSHLIDTDISGTAADVDGRWQRAEKAINLVVSISDFEKVLSPHTVASGLPGRNLWFVFIDKLWRIDSLNALHEFFDHCSTLLVKTKEEARRDTELGIPPPGPEVIQLSRNSPFGAFVRRSQLEFTRLRFHDSIELWKDFVKYRQTTASYYRKKVPSFQQYSFDDVLLTGQHEWSEGVEGIASVVYGDMLRDDLNPTLPVSTDDIEKLLEFQIDQMQKYGNRIPMGIRQQFTDLLRDSYMIPSLAHYLSYLDAWRSGDYATSFDYLHRYFDYTMQNRDRSFYQYALMNLAVLQADFGCYKEAVAAMLETVSTARENRDMTCLNFALNWLFHFGRAHPEVTHDLESKSMLGTGKESLAFLRSRAKETGAWSLWSSALMSEAKMCLSNGESVATALEHLVRSSQILVERNMKSMVGSQLSINIALWDRLGVAYLSSTTCEVFLQCYAHHSIFDDELKVTSRQASMLALKGRYDEALERLESLDADSLRAWKPSQYWHKFRGIIRLRRDLHHNDVDGAELLLSQLLQSKSEDLEPDLAFVIDTLHVECLVRRGNMEAALNKVEKMVSELRDENKDVALRVRLLLLKTELLDKCGRPQKAFTIAVRAANVAWRARLVPYIWPAMGAIANILSSLGEFEGAIKLLRAVLPRSLECDNEAMTARLYSYLGDANVGMAGKMEPKSLKRREYLTKGLEAIENAFNHYSSVEDINKQCEMMAKKATIMKVSGDMVLANDYAAAYLALRRDAKNMSL

SEQ ID NO: 7476 - DNA, 3973 bp, Muscodor strobelii
  misc_feature: SGI EST ID NO. CUFF.18509.0
  misc_feature: Variant of the nucleotide sequence at SEQ ID NO 7474
cgcgtctgctgtgagttgtaacttccagtgtcaacgcatgaattgcgtagttctttcctttgaaaatgtggcaattaaaagtgtgactcgggggtgcagtacaagtttccgtaatgctgcaatttagaagttgatgcgtatcgcacgccactccagcaacacattctcatcccaacaacagtaaccgtcaaatcaacagctctctgtcaatacactatgtcacgatttctcaacccggccaaaatcggccttttagctctcattgagctgtatacaaataagactgtggcaacatcatcgattgtggatgtgcagtcttttataacgtctcatcttatcgacacggacatctccggcacagcggccgacgttgatggacgatggcagcgagccgagaaggcaattaatctagtcgtctctatctcggacttcgagaaagttctgtcgccacataccgttgcgtcgggcctgcctgggcgtaacctatggtttgttttcattgataagctatggaggatcgactcgctcaacgccctccacgagttctttgaccattgttcgacccttttagtcaagacgaaggaagaagctcgtcgagacaccgagctcgggataccacctccaggaccagaggtcattcagctctcgcggaattcgccgttcggtgcttttgttcggagatctcaacttgagttcactcgacttcgttttcatgattcgatcgaactgtggaaagattttgtcaaataccgccaaacaactgcatcatattatcgaaagaaagtaccgtcttttcagcaatacagctttgacgatgttctactcacaggacagcatgagtggagcgagggggttgagggcattgcctcagttgtgtacggcgacatgcttagggacgatcttaatccgactttgcctgtcagcactgatgatatcgagaagctgctcgagttccaaatcgatcagatgcagaagtacggaaatagaatacccatgggaatccggcaacaattcaccgacctattgagagacagttacatgataccaagtctagcgcattacctgagctacctagatgcatggcgctcaggcgattatgctacttcgtttgattatttacatcggtatttcgactatacgatgcagaaccgagatagatcgttctaccaatacgcacttatgaacctagccgtcctccaagctgactttggctgctataaggaagccgtggctgcaatgctggaaacggtgtcgacggcgagagaaaaccgggatatgacttgtctcaactttgctctgaactggctattccatttcgggcgtgcacatcctgaggttactcatgatcttgaatcaaagagtatgctcggtacaggcaaagaatcacttgctttcctccgaagcagagctaaagagactggtgcatggtcactatggagttcagctttgatgagtgaggcaaagatgtgtctatctaacggcgagagtgtggctaccgccttggaacacctggtccggagctcgcagatcttggtagagcggaacatgaagagcatggtaggatcccaactatccatcaacatagcgctctgggataggctaggtgtcgcatatctctcatcgacaacctgtgaagtattcctccaatgttatgctcaccattctatattcgacgacgagctcaaagtcacgagtcgtcaggcctcaatgcttgcattgaaggggagatacgacgaagcactagagaggctcgagagtctggatgcagactcactgcgagcctggaaaccgagtcagtactggcacaagtttcgtggcatcatcagattaaggagagatctccaccacaatgacgttgacggcgctgagctactactctcgcaactcttgcagtctaagagcgaagatttggaacccgacttagcctttgtgattgatacgttacatgtcgagtgtttagttcgacggggcaacatggaggcggcgctcaacaaggtggagaagatggtctcggagcttcgggacgagaataaagacgttgcgcttcgggtgaggctactactcctcaagacggagctcctggataaatgcggccgcccgcagaaggcctttacgatcgctgttcgtgcggccaacgtggcgtggagagcacgacttgtgccgtatatatggccggcgatgggcgcaattgccaatattctatcgagtttaggcgaattcgagggagcgatcaagctattacgtgccgtgctgccgagaagtctggagtgtgataacgaggccatgacagcgagactgtactcgtaccttggtgatgcgaatgttggcatggcggggaaaatggagccgaagtcactgaaacggagagagtacctgacgaaaggactggaggcgatcgagaatgcgtttaatcattactcgagtgttgaagatatcaacaagcagtgtgagatgatggcgaagaaagctacgatcatgaaggtctcgggggatatggtcttagcaaatgactacgcagctgcgtacttggcgttgaggagagacgcgaagaatatgtctctttgaaaaggatggtgtatttgtacacggtttctcgctagatgactgatgctgccggtcacggaagcaaggcagatagaccggaattcatacccaagttccaatatgtacgccatgatgaaatatgatacagattttccatccacaaccacctcgttgcctcatgacttctcgctccaatttatgtgtctcccgtgcttattcttcaacgttccctctttcgtagccgccatagaggcttcaggagtgacaacctcaccctcactcaaatcattcgtagcccaaatcctctcgatacaaagctcaaacggaccgggcacacgatccgtcagcccgataccgagcgtccttactttctgccgtagtatctccgtctgcggctcgacgacaaagccgtggttcgtccgaacgaaatcattccattttatcaacaccgtctcccattctccggggcgttttacgaataacctgtgctggtgtagatctgtggggacaacggattccgtctggatgttgactaggtagctccgaccgtctgatcgcacgcggagggcgaggtaggcgtacatgtcgatgttgaatagtgcttttccgaataatgttggggggcggtcgagcgtgcgccaggcggcgtagccggagcgttggacgtctggtttgttggggggtagttcggtggatattgtgccgtggaaacgggcgtgcggtggagtgggaggggatgtggttgtggttcctgactgccctgggacgtgtgagagatggacggttgagtagccgccgatgtctgtgtcggagagggtcttgcagtctgcaatggaggttggtgtgtcgaaggagtggaggggtaagggaccagagggcccttttatgccttcgctttcgagggcgaatttggagagtcgcttgaattcgtcgaggctgcggttccagaacccttttgctagcaggatttgtgtggtgcgcattttggaggatggtggtgatggtggtcgctggaggtatggggagagatgggtggttgtccaagagccaaaggctcgatcggtagccttcacatcagcgattgggtgtcgctatgtagcctgccgttgattagagcggccgaagaggtcgtcgcgacagcgtatccttacggaggaataggtccagtgcgtgggttgttggaggtctcacgaatcagtgacgattgctcgacagcttccccaggttagctctggcaccgaaatttagcgacagaagctccatgtcggacgtgttagatgtgccggagttaaagatacaggcagctgtgctcggcccgacaggggcattccctaccgaactaccttaccttgcagacgggatgtctcttcaacgcaggcgcaacctcaaacattgtattcgatctttagaggaattctttttattgaca

SEQ ID NO: 7477 - DNA, 387 bp, Muscodor strobelii
  misc_feature: SGI cDNA ID NO. 562257
  misc_feature: Encodes the peptide sequence at SEQ ID NO 7478
atgggcgcaattgccaatattctatcgagtttaggcgaattcgagggagcgatcaagctattacgtgccgtgctgccgagaagtctggagtgtgataacgaggccatgacagcgagactgtactcgtaccttggtgatgcgaatgttggcatggcggggaaaatggagccgaagtcactgaaacggagagagtacctgacgaaaggactggaggcgatcgagaatgcgtttaatcattactcgagtgttgaagatatcaacaagcagtgtgagatgatggcgaagaaagctacgatcatgaaggtctcgggggatatggtcttagcaaatgactacgcagctgcgtacttggcgttgaggagagacgcgaagaatatgtctctttga

SEQ ID NO: 7478 - protein, 128 aa, Muscodor strobelii
  misc_feature: SGI Peptide ID NO. 562257
  misc_feature (1)..(127): NCBI GI: 46129423 Blast Desc: FG08887.1 [Gibberella zeae PH-1]
  misc_feature (1)..(128): NCBI GI: 256734230 Blast Desc: [Nectria haematococca mpVI 77-13-4]
  misc_feature (1)..(123): NCBI GI: 261353452 Blast Desc: anaphase-promoting complex protein [Verticillium albo-atrum VaMs.102]
  misc_feature (1)..(123): NCBI GI: 226294612 Blast Desc: anaphase-promoting complex protein [Paracoccidioides brasiliensis Pb18]
  misc_feature (1)..(123): NCBI GI: 225685276 Blast Desc: conserved [Paracoccidioides brasiliensis Pb03]
  misc_feature (1)..(123): NCBI GI: 225558767 Blast Desc: anaphase-promoting complex protein [Ajellomyces capsulatus G186AR]
  misc_feature (1)..(123): NCBI GI: 226279268 Blast Desc: anaphase-promoting complex protein [Paracoccidioides brasiliensis Pb01]
  misc_feature (1)..(128): NCBI GI: 238845599 Blast Desc: anaphase-promoting complex protein [Microsporum canis CBS 113480]
  misc_feature (1)..(123): NCBI GI: 239613857 Blast Desc: anaphase-promoting complex subunit Apc5 [Ajellomyces dermatitidis ER-3]
  misc_feature (1)..(123): NCBI GI: 261193619 Blast Desc: anaphase-promoting complex subunit Apc5 [Ajellomyces dermatitidis SLH14081] gi|239588820|gb|EEQ71463.1| anaphase-promoting complex subunit Apc5 [Ajellomyces dermatitidis
MGAIANILSSLGEFEGAIKLLRAVLPRSLECDNEAMTARLYSYLGDANVGMAGKMEPKSLKRREYLTKGLEAIENAFNHYSSVEDINKQCEMMAKKATIMKVSGDMVLANDYAAAYLALRRDAKNMSL

SEQ ID NO: 7479 - DNA, 3973 bp, Muscodor strobelii; identical to SEQ ID NO: 7476
  misc_feature: SGI EST ID NO. CUFF.18509.0
  misc_feature: Variant of the nucleotide sequence at SEQ ID NO 7477

SEQ ID NO: 7480 - DNA, 849 bp, Muscodor strobelii
  misc_feature: SGI cDNA ID NO. 562258
  misc_feature: Encodes the peptide sequence at SEQ ID NO 7481
atgggcgacataataaccaacacttatggcgtacagctaccttctcgctacgaaatacggagaataggtcctgaatttgagccatggctgcgtgttctatccagatacatccagctgcttgacacgaaagtgtttggtcccatgtataaggatcgccaacctgtcaggagaattctactagagaacgccaaaaatgagatcaagtcagggaccttacactgtctcaagggcggtttatcatacgctatatttgataaagaatacaaattcaaacggccggaatccgtggccacaggcggaggagtgtattggcaagaaatcgaccctgatgagcccgatctcgaagtaacaggtcagcaaagactactcgatgcgatggacttcccacttgtttcaatggcacttagcttcgacaaaacagataagatgccatcggaagcattcgcagagaatgttgcatttgttcccgagtttgaacttcaacgccagatcctcgtggccaaagccaatccggggccggacgctgctaagccactgaaaggcgaagtccttgttcgtgccgggactgccacgagaagagaatacactggtcagggccttatgaaagccctctgttatttcgtaatgcacgatgcacatgcacggggtttcaagaagatagaaatcgatgtcattcatccagctacgagccgactttggctgaatccgcctccaccatatagaggtgagttggtgaaccagaccaatctcaaggaagccgaacttgaagttgacgggcaaatcatcaaacctttcgcggcttcggaggtggaatatgaggatgaaattactgttcatttgacaggatag

SEQ ID NO: 7481 - protein, 282 aa, Muscodor strobelii
  misc_feature: SGI Peptide ID NO. 562258
  misc_feature (15)..(280): NCBI GI: 225558102 Blast Desc: conserved [Ajellomyces capsulatus G186AR]
  misc_feature (15)..(267): NCBI GI: 240273340 Blast Desc: conserved [Ajellomyces capsulatus H143]
  misc_feature (15)..(265): NCBI GI: 154280685 Blast Desc: [Ajellomyces capsulatus NAm1] gi|150411334|gb|EDN06722.1| [Ajellomyces capsulatus NAm1]
  misc_feature (11)..(271): NCBI GI: 255955019 Blast Desc: [Penicillium chrysogenum Wisconsin 54-1255] gi|211589973|emb|CAP96128.1| [Penicillium chrysogenum Wisconsin 54-1255]
  misc_feature (11)..(266): NCBI GI: 169763996 Blast Desc: [Aspergillus oryzae RIB40] gi|83770926|dbj|BAE61059.1| protein product [Aspergillus oryzae]
  misc_feature (11)..(266): NCBI GI: 238489981 Blast Desc: conserved [Aspergillus flavus NRRL3357] gi|220698616|gb|EED54956.1| conserved [Aspergillus flavus NRRL3357]
  misc_feature (13)..(260): NCBI GI: 242805555 Blast Desc: conserved [Talaromyces stipitatus ATCC 10500] gi|218715181|gb|EED14603.1| conserved [Talaromyces stipitatus ATCC 10500]
  misc_feature (13)..(265): NCBI GI: 242793909 Blast Desc: conserved [Talaromyces stipitatus ATCC 10500] gi|218718850|gb|EED18270.1| conserved [Talaromyces stipitatus ATCC 10500]
  misc_feature (13)..(269): NCBI GI: 189192388 Blast Desc: conserved [Pyrenophora tritici-repentis Pt-1C-BFP] gi|187974139|gb|EDU41638.1| conserved [Pyrenophora tritici-repentis Pt-1C-BFP]
  misc_feature (13)..(261): NCBI GI: 212535732 Blast Desc: conserved [Penicillium marneffei ATCC 18224] gi|210070421|gb|EEA24511.1| conserved [Penicillium marneffei ATCC 18224]
MGDIITNTYGVQLPSRYEIRRIGPEFEPWLRVLSRYIQLLDTKVFGPMYKDRQPVRRILLENAKNEIKSGTLHCLKGGLSYAIFDKEYKFKRPESVATGGGVYWQEIDPDEPDLEVTGQQRLLDAMDFPLVSMALSFDKTDKMPSEAFAENVAFVPEFELQRQILVAKANPGPDAAKPLKGEVLVRAGTATRREYTGQGLMKALCYFVMHDAHARGFKKIEIDVIHPATSRLWLNPPPPYRGELVNQTNLKEAELEVDGQIIKPFAASEVEYEDEITVHLTG

SEQ ID NO: 7482 - DNA, 1836 bp, Muscodor strobelii
  misc_feature: SGI cDNA ID NO. 562259
  misc_feature: Encodes the peptide sequence at SEQ ID NO 7483
atgagttctacgtcatcatcaatcacaaccacatctacatccaccgagcccacggatcccgcaagtactatcgccccgtatgccgagggcttaacaggcgtgtcgcaagacatcaactatgtctttagggactcattatggtggtcattaggcgtattagccttgatcgttctctcggcaaggcttttacagttagcttggaacaagttaagacatgtatccgctatgtcgctcccaccggagcgacaaggatattggaaatcggcgcaatggagttggctgcccagtctaaaaaagaatctcatctacgctcccttttggcgcaaacgtcacaatcgagagattagactttcttcggccgtccagattggaacattaccatcccgcctacactctctcatcctcggcttctacctactcagcaacatcttttacatgttctatctacattggtcccgactcaatcgattctctgttgctgcagaaattcgaggccgctctgggactctcgccgtggttaacatggtgcctctcatcattttagcaggtcgaaacaacccactcatcccgattttacaagtcagctttgatacttacaaccttctgcatcgttggatgggtcgtatggtcgttctagagtcattaattcacacactcgcctgggcttatgtacaagttgcggcagctggctgggggagcctcaacgagaagattctgcatgagacattcgtcgcctctggctttactgccacagtcggccttattatccttctctttttatctctttcgcccgttcgccatgcgttctacgaaacattcctcaacactcacatcattcttgcgattataatttttgccatgactttagtgcactgtgcctcggcgaatattcctggaggattaccccagcttccctacatgatcgcgatatttcttctctggttcttcgagcgactggctcgcatgtttcgccttgcgtacaataactggtccaagaagcatggtttcacagaagcggtagtagaggccttgccgggtgactgtagccgtgtcaccatgcatctgcctcggtatgtcgatgtgcagcctggtacccacgcttacatccgcttcaagggtgtcagcccttgggaaaatcaccccttttctatcgcttgggttgaacaccatccagaaggagaccgaaccgtcgagtcagagaagtcctacagcagtcttgagcttcagaaaggaacgacatctgtgtcatttgtaattggtgcccagacgggctttactcgcaagctatatgatcgggccagccgaggaggcggccactcaatgacagtcagggcagctatggaaggcccctatgctggccatcactcactcgactcctacggccatgcagtgctcttcgccggggctacaggaatcactcatcaaatttcgtacctgaagcccttgataaagggcttcaacgacgggacaattgcaacgaggcgagtcacgttggtatgggtgatgcgtgacaccgaagcccttgagtgggttcggccgtggatggacgagatattaaagatgccacgacgcaaggatattctcaatatgaaactcttcatcacccgaccaaagaattcgaaagagatccactcggcttccagcacagtccagatgttccctgggcgtccaagcataccgacgatcatgcagcgagaggtggaacaacaggtgggggccatggtcgtctcggtttgtggaccgggtgcattggcagatgatgtgcgacaggctgtccgcgatgtgcagagtcaggaccaagttatcgagttccaagaagaggcctttacttggtaa

SEQ ID NO: 7483 - protein, 611 aa, Muscodor strobelii
  misc_feature: SGI Peptide ID NO. 562259
  misc_feature (167)..(288): Pfam Id: PF01794 Pfam Desc: Ferric reductase like transmembrane component
  misc_feature (333)..(455): Pfam Id: PF08022 Pfam Desc: FAD-binding domain
  misc_feature (460)..(593): Pfam Id: PF08030 Pfam Desc: Ferric reductase NAD binding domain
  misc_feature (333)..(385): Pfam Id: PF08022 Pfam Desc: FAD-binding domain
  misc_feature (460)..(534): Pfam Id: PF08030 Pfam Desc: Ferric reductase NAD binding domain
  misc_feature (20)..(611): NCBI GI: 116193641 Blast Desc: CHGG_06538 [Chaetomium globosum CBS 148.51] gi|88182451|gb|EAQ89919.1| CHGG_06538 [Chaetomium globosum CBS 148.51]
  misc_feature (19)..(611): NCBI GI: 256733627 Blast Desc: NECHADRAFT_35958 [Nectria haematococca mpVI 77-13-4]
  misc_feature (1)..(598): NCBI GI: 46128295 Blast Desc: FG08525.1 [Gibberella zeae PH-1]
  misc_feature (76)..(611): NCBI GI: 85115432 Blast Desc: NCU02009 [Neurospora crassa OR74A] gi|28926670|gb|EAA35638.1| NCU02009 [Neurospora crassa OR74A] gi|38566889|emb|CAE76194.1| related to ferric reductase crassa]
  misc_feature (6)..(611): NCBI GI: 171684973 Blast Desc: protein product [Podospora anserina] gi|170942447|emb|CAP68099.1| protein product [Podospora anserina]
  misc_feature (20)..(611): NCBI GI: 156031196 Blast Desc: SS1G_14206 [Sclerotinia sclerotiorum 1980] gi|154700597|gb|EDO00336.1| SS1G_14206 [Sclerotinia sclerotiorum 1980]
  misc_feature (2)..(611): NCBI GI: 54873411 Blast Desc: FreB [Botryotinia fuckeliana]
  misc_feature (27)..(611): NCBI GI: 145230762 Blast Desc: An01g12390 [Aspergillus niger] gi|134055766|emb|CAK37290.1| protein product [Aspergillus niger]
  misc_feature (24)..(611): NCBI GI: 238844112 Blast Desc: FreB [Microsporum canis CBS 113480]
  misc_feature (21)..(611): NCBI GI: 121701121 Blast Desc: metalloreductase, [Aspergillus clavatus NRRL 1] gi|119396968|gb|EAW07399.1| metalloreductase, [Aspergillus clavatus NRRL 1]
  misc_feature (97)..(611): SWISSPROT Homolog: EC 1.16.1.7 Ferric-chelate reductase
MSSTSSSITTTSTSTEPTDPASTIAPYAEGLTGVSQDINYVFRDSLWWSLGVLALIVLSARLLQLAWNKLRHVSAMSLPPERQGYWKSAQWSWLPSLKKNLIYAPFWRKRHNREIRLSSAVQIGTLPSRLHSLILGFYLLSNIFYMFYLHWSRLNRFSVAAEIRGRSGTLAVVNMVPLIILAGRNNPLIPILQVSFDTYNLLHRWMGRMVVLESLIHTLAWAYVQVAAAGWGSLNEKILHETFVASGFTATVGLIILLFLSLSPVRHAFYETFLNTHIILAIIIFAMTLVHCASANIPGGLPQLPYMIAIFLLWFFERLARMFRLAYNNWSKKHGFTEAVVEALPGDCSRVTMHLPRYVDVQPGTHAYIRFKGVSPWENHPFSIAWVEHHPEGDRTVESEKSYSSLELQKGTTSVSFVIGAQTGFTRKLYDRASRGGGHSMTVRAAMEGPYAGHHSLDSYGHAVLFAGATGITHQISYLKPLIKGFNDGTIATRRVTLVWVMRDTEALEWVRPWMDEILKMPRRKDILNMKLFITRPKNSKEIHSASSTVQMFPGRPSIPTIMQREVEQQVGAMVVSVCGPGALADDVRQAVRDVQSQDQVIEFQEEAFTW

SEQ ID NO: 7484 - DNA, 3570 bp, Muscodor strobelii
  misc_feature: SGI EST ID NO. CUFF.18511.0
  misc_feature: Variant of the nucleotide sequence at SEQ ID NO 7482
cgccaagtcgtttctctctgcatgttcgtatctacctgcgccgccctgcctgagcaagctgagcttggcagaaaatacagccaaattcattccacccgagggctaggagaggtggaactggccagggacacgcccgcgatacctaccactgggtgtaatcttgtagatcctaagcgagaagactcaagccacagaggggttaatggctgttttctttgtctctaaggcatagggtgacttgaggggtgttggtggatcgtactacatggtcattgacgggtctcagggggttggatggtgaatgacacggtctggtactcttaaaccatccctactccctccctctgccaacattcgttgacgttcacttgatcgtttttctagactttgtttgaatcgcacaccggttttcatcgacttgactctagatgagtttgatttgcctcgttctattctcctaaaagcaaccagccagcggccgggtctagtggtgatacacaaaagctgttgctggaaaacaaaccacccccattcgctgtgcacgatccaacagaccatcacaatctcttcttaacgcaagatcgtccctggcacaaacagtggataatccaaaccccacgtgttgtaatttctgtacattcattgttgcatgcacaggtcgctgcgcgccttcttcattctttaccttctgtcaacggtcgcacgaagcatcaggccttcgttgtcttcaagtgctagattgggtcgttgttgtttagtacacgtgaatcgtcccatcgatacgattgaactcggcctggaaacattggtacattacgaccgatcaacacagctcactcctcgcagtcttggacccgatcccctactgttgtccaaaacaagtgctcgagtatagagtatcgctctacctcgaggctcgattcgttgcatcaaagagcagaggagctttgcgatcaataggcagaccagatcggcctctttgttcgctgtctcgaccctcataacgctagtcgaacaaagatcaacctctcagttagctggcaatcaacaaacagccgccgcaagtcacaaagactcctcctcttgcgaagcccccaaatttgcggtcactttaacaatgctttcatgatcaagagccttgattgaaatacggttctttgccttcgagggttctgggtgcccgggtgaaccacgctcgctcactatagatttctggtagtttccggtcattcttttgtaacacgacgcacctgcatctccactgcaacagtatataagataatctcagacagtactcgagtacacaatgtcattaatgcggcgccggatcgctgcactcggatcattaacaccatcaccaattctagcactacgaaaccgagacctggacatgagttctacgtcatcatcaatcacaaccacatctacatccaccgagcccacggatcccgcaagtactatcgccccgtatgccgagggcttaacaggcgtgtcgcaagacatcaactatgtctttagggactcattatggtggtcattaggcgtattagccttgatcgttctctcggcaaggcttttacagttagcttggaacaagttaagacatgtatccgctatgtcgctcccaccggagcgacaaggatattggaaatcggcgcaatggagttggctgcccagtctaaaaaagaatctcatctacgctcccttttggcgcaaacgtcacaatcgagagattagactttcttcggccgtccagattggaacattaccatcccgcctacactctctcatcctcggcttctacctactcagcaacatcttttacatgttctatctacattggtcccgactcaatcgattctctgttgctgcagaaattcgaggccgctctgggactctcgccgtggttaacatggtgcctctcatcattttagcaggtcgaaacaacccactcatcccgattttacaagtcagctttgatacttacaaccttctgcatcgttggatgggtcgtatggtcgttctagagtcattaattcacacactcgcctgggcttatgtacaagttgcggcagctggctgggggagcctcaacgagaagattctgcatgagacattcgtcgcctctggctttactgccacagtcggccttattatccttctctttttatctctttcgcccgttcgccatgcgttctacgaaacattcctcaacactcacatcattcttgcgattataatttttgccatgactttagtgcactgtgcctcggcgaatattcctggaggattaccccagcttccctacatgatcgcgatatttcttctctggttcttcgagcgactggctcgcatgtttcgccttgcgtacaataactggtccaagaagcatggtttcacagaagcggtagtagaggccttgccgggtgactgtagccgtgtcaccatgcatctgcctcggtatgtcgatgtgcagcctggtacccacgcttacatccgcttcaagggtgtcagcccttgggaaaatcaccccttttctatcgcttgggttgaacaccatccagaaggagaccgaaccgtcgagtcagagaagtcctacagcagtcttgagcttcagaaaggaacgacatctgtgtcatttgtaattggtgcccagacgggctttactcgcaagctatatgatcgggccagccgaggaggcggccactcaatgacagtcagggcagctatggaaggcccctatgctggccatcactcactcgactcctacggccatgcagtgctcttcgccggggctacaggaatcactcatcaaatttcgtacctgaagcccttgataaagggcttcaacgacgggacaattgcaacgaggcgagtcacgttggtatgggtgatgcgtgacaccgaagcccttgagtgggttcggccgtggatggacgagatattaaagatgccacgacgcaaggatattctcaatatgaaactcttcatcacccgaccaaagaattcgaaagagatccactcggcttccagcacagtccagatgttccctgggcgtccaagcataccgacgatcatgcagcgagaggtggaacaacaggtgggggccatggtcgtctcggtttgtggaccgggtgcattggcagatgatgtgcgacaggctgtccgcgatgtgcagagtcaggaccaagttatcgagttccaagaagaggcctttacttggtaaacgatttcccatagattgggaagaacggccatctggggccggattgtgaataaactaataagctgatgtcttacctcctgagacaattgttgtgtcaattatgatgattctagaagcatttgaacggcgttggcgatcatggatcagaagaatcaataggtttcttcctctgtttataaaatcaactgtctatacaatgaatggcctcgttcttgcagcatgttgatatgatcatctgattcaatatgtttagcttgcaaatgctggttcttttccccggccgcctccttccttttcttattgcaatccctagtagatggtcgtcatcaagaaagcaattatgt

SEQ ID NO: 7485 - DNA, 2655 bp, Muscodor strobelii
  misc_feature: SGI cDNA ID NO. 562260
  misc_feature: Encodes the peptide sequence at SEQ ID NO 7486
atggctgaaaacagtggtatcaacacagtcctcagcaactcgctgtcaggagatgctacgacgcgaaatggcgccgagcaacagcttgcccaggcggcagacaataactttcccctgtacctggccactcttgtccagtcactggccgacgaaaacaccgaagcccaaatcagagtcgctgcaggtctggcactgaagaactcgtttacggcccgcgagttcgcccgcgcacaggaactccaagccaaatggctccagcagacagacgatgagaccaagaagcgcgtcaaggagctcgccctccagacactgtcatccaccaacgcacaggctggcgctgccgccgcccaagtcattgcatccattgctgccctcgagctgcccagagatcagtggcccgaactgatgggtaccttggtccagaacgtcagcggtggcgcccctcaccagaagcagtcttcattgacgtgtattggctatatatgcgacagccaggacccccagctgcgggctgccttggtcgcccactcgaacgctatcctgacggccgtcgtacaaggcgctcgcaaggaagagaccaacaacgagatccgcctctccgccatctctgcgctcggggattctcttgagttcgttggcaacaacttcagaaacgagggcgagcgcaactacatcatgcaggttgtctgtgaggctacgcaggccgacgactcgcggatccagcagagtgctttcggatgtctcaaccggatcatgggcctttactatgagaacatgcgtttctacatggagaaggccctgttcggtctcaccattcttggcatgaagaacgacgacgaggatgtagccaagcttgcggtcgagttctggagcacagtctgcgaggaggagatcagcattagcgatgacaacgagcacgtccaaaccactgatcagcagcgacctttctataacttcgcgcgcgtcgcaacaggagaggttgtgcccaccctcctcagtcttctcacgaagcaggatgaggacgccgctgacgatgaatacaatctggcacgtgctgcttaccaatgtctccaactctacgcccagatcgttggcgccaatattatcccgccagtcatccagttcgttgaggcacatcttcggtcggaggattggcattaccgagaagccgccgtcgccgcttttggcgccatcatggaaggccccgatgagcaggtcttggagcctatcgtcaagcaggctctgcccattctcatcgcaatgatggaggacaattctatcttcgtgaaggactcgacagcctatgctctcggccgcattacggaggcgtgttcgagggctattgatcctaacacgcatttggaacccttgattcggtctctcttcgctggtgtccatgactcgaagatggccgcctcttgttgctgggcgctgatgaacctggcagcacagttctcggctgatccccagtctcccacgaatccgctcactccccacttcaaccagagcgttcagactcttctggctgttaccgagcaagctggagcagagtcgactgtccgcactacgtcatacgaggtactcagtgccctagtccaatattctgcgaccgagagcttcccgtccgtagcccaactctcagaagtgatcatcaaacgactggaagagactatccccatgcagagccaagttgtcagtattgaggataagatcactctcgaggaaatgcagacaagcttgtgcacggttctccaggccatcatccagcgccttgataaggagatcgccccgttaggcgaccgggttatgcatgtgctgctacaacttctcagctccgtcggcgcaaaatccagcgtacccgaggctgtctttgctactatcagcggtctcacaatcgccatggatgaggacttcattaagtacatggaggcattcactccattcctgtacactgctctgggcaatctagaagagcctagtctgtgctctatggccattggcctcgtcagcgacatcacccgttccttgcgcgagcacagtcaaccatttgttgagaacttcatgcactatctgtccagggatttaagtagtaacaccctgacgcctgctattctacaatgtttcggcgatattgccttggctatcggtggtcactttgaaaactgggttactcctgtgggcgaagcactgcaaaaggctgcgtctctcaaggctgccccggaaggatcgtatgagatgattgactatgtcctttcgcttcgtgagggaatcatgaatgcatgggaaagcatcattggtgctatgaaagacagcggcaagacccaagcccttcagccgttcgttgaatccattggcgagctgcttcaagctatctcgcaagatttccacaagagcgagtcactaatgcgatcgtctatgggagtcatcggcgaactggccgaagcctacctacgtcgagaacttgccgttctcttcctaaattttgaaccagagaacaagaagagccattgggtctacatgatggtccaggagacgatcagggaggcaccatccagtagcgacttgaaaggaaccgcacaatgggccaaggcgcatctcgagaagcttggcaagggccagcttggagacaacacatccgccatggagcagacgtga

SEQ ID NO: 7486 - protein, 884 aa, Muscodor strobelii
  misc_feature: SGI Peptide ID NO. 562260
  misc_feature (408)..(444): Pfam Id: PF02985 Pfam Desc: HEAT repeat
  misc_feature (25)..(106): Pfam Id: PF03810 Pfam Desc: Importin-beta N-terminal domain
  misc_feature (5)..(884): NCBI GI: 39943176 Blast Desc: conserved [Magnaporthe grisea 70-15] gi|145009740|gb|EDJ94396.1| conserved [Magnaporthe grisea 70-15]
  misc_feature (4)..(883): NCBI GI: 256727671 Blast Desc: [Nectria haematococca mpVI 77-13-4]
  misc_feature (4)..(881): NCBI GI: 46135877 Blast Desc: FG09454.1 [Gibberella zeae PH-1]
  misc_feature (7)..(884): NCBI GI: 171684977 Blast Desc: protein product [Podospora anserina] gi|170942449|emb|CAP68101.1| protein product [Podospora anserina]
  misc_feature (7)..(884): NCBI GI: 116193637 Blast Desc: conserved [Chaetomium globosum CBS 148.51] gi|88182449|gb|EAQ89917.1| conserved [Chaetomium globosum CBS 148.51]
  misc_feature (4)..(883): NCBI GI: 261357919 Blast Desc: importin subunit beta-1 [Verticillium albo-atrum VaMs.102]
  misc_feature (1)..(875): NCBI GI: 85115440 Blast Desc: NCU02011 [Neurospora crassa OR74A] gi|28926672|gb|EAA35640.1| NCU02011 [Neurospora crassa OR74A]
  misc_feature (1)..(875): NCBI GI: 38566891 Blast Desc: KAP95 protein [Neurospora crassa]
  misc_feature (7)..(875): NCBI GI: 154305775 Blast Desc: BC1G_07702 [Botryotinia fuckeliana B05.10] gi|150853221|gb|EDN28413.1| BC1G_07702 [Botryotinia fuckeliana B05.10]
  misc_feature (7)..(875): NCBI GI: 156031192 Blast Desc: SS1G_14204 [Sclerotinia sclerotiorum 1980] gi|154700595|gb|EDO00334.1| SS1G_14204 [Sclerotinia sclerotiorum 1980]
MAENSGINTVLSNSLSGDATTRNGAEQQLAQAADNNFPLYLATLVQSLADENTEAQIRVAAGLALKNSFTAREFARAQELQAKWLQQTDDETKKRVKELALQTLSSTNAQAGAAAAQVIASIAALELPRDQWPELMGTLVQNVSGGAPHQKQSSLTCIGYICDSQDPQLRAALVAHSNAILTAVVQGARKEETNNEIRLSAISALGDSLEFVGNNFRNEGERNYIMQVVCEATQADDSRIQQSAFGCLNRIMGLYYENMRFYMEKALFGLTILGMKNDDEDVAKLAVEFWSTVCEEEISISDDNEHVQTTDQQRPFYNFARVATGEVVPTLLSLLTKQDEDAADDEYNLARAAYQCLQLYAQIVGANIIPPVIQFVEAHLRSEDWHYREAAVAAFGAIMEGPDEQVLEPIVKQALPILIAMMEDNSIFVKDSTAYALGRITEACSRAIDPNTHLEPLIRSLFAGVHDSKMAASCCWALMNLAAQFSADPQSPTNPLTPHFNQSVQTLLAVTEQAGAESTVRTTSYEVLSALVQYSATESFPSVAQLSEVIIKRLEETIPMQSQVVSIEDKITLEEMQTSLCTVLQAIIQRLDKEIAPLGDRVMHVLLQLLSSVGAKSSVPEAVFATISGLTIAMDEDFIKYMEAFTPFLYTALGNLEEPSLCSMAIGLVSDITRSLREHSQPFVENFMHYLSRDLSSNTLTPAILQCFGDIALAIGGHFENWVTPVGEALQKAASLKAAPEGSYEMIDYVLSLREGIMNAWESIIGAMKDSGKTQALQPFVESIGELLQAISQDFHKSESLMRSSMGVIGELAEAYLRRELAVLFLNFEPENKKSHWVYMMVQETIREAPSSSDLKGTAQWAKAHLEKLGKGQLGDNTSAMEQT

SEQ ID NO: 7487 - DNA, 3802 bp, Muscodor strobelii
  misc_feature: SGI EST ID NO. CUFF.18874.1
  misc_feature: Variant of the nucleotide sequence at SEQ ID NO 7485
aggtgacgaaacgttggaatctgcaattctgcactattccaccacctcctttctgcaatctccctttgcaaagcaagcttcacaccagttctttacaccgtgtcttggttctgccctcttctaatctcgaggcggccaagctctcttaattctgcttcttcccctccttcgccagcctcgctgctgttgaccttcgcggcgtgccatcccgcttccgtcacccctcctccgaccgacgtcgggttttcccaacttcccagactaccaatttccctgtcgccgattccgccacgaagttgccactatagcaattcagtccagtccaacgagccgcctccgtacagctcagtattgcggctggcagacaagtcatcatggctgaaaacagtggtatcaacacagtcctcagcaactcgctgtcaggagatgctacgacgcgaaatggcgccgagcaacagcttgcccaggcggcagacaataactttcccctgtacctggccactcttgtccagtcactggccgacgaaaacaccgaagcccaaatcagagtcgctgcaggtctggcactgaagaactcgtttacggcccgcgagttcgcccgcgcacaggaactccaagccaaatggctccagcagacagacgatgagaccaagaagcgcgtcaaggagctcgccctccagacactgtcatccaccaacgcacaggctggcgctgccgccgcccaagtcattgcatccattgctgccctcgagctgcccagagatcagtggcccgaactgatgggtaccttggtccagaacgtcagcggtggcgcccctcaccagaagcagtcttcattgacgtgtattggctatatatgcgacagccaggacccccagctgcgggctgccttggtcgcccactcgaacgctatcctgacggccgtcgtacaaggcgctcgcaaggaagagaccaacaacgagatccgcctctccgccatctctgcgctcggggattctcttgagttcgttggcaacaacttcagaaacgagggcgagcgcaactacatcatgcaggttgtctgtgaggctacgcaggccgacgactcgcggatccagcagagtgctttcggatgtctcaaccggatcatgggcctttactatgagaacatgcgtttctacatggagaaggccctgttcggtctcaccattcttggcatgaagaacgacgacgaggatgtagccaagcttgcggtcgagttctggagcacagtctgcgaggaggagatcagcattagcgatgacaacgagcacgtccaaaccactgatcagcagcgacctttctataacttcgcgcgcgtcgcaacaggagaggttgtgcccaccctcctcagtcttctcacgaagcaggatgaggacgccgctgacgatgaatacaatctggcacgtgctgcttaccaatgtctccaactctacgcccagatcgttggcgccaatattatcccgccagtcatccagttcgttgaggcacatcttcggtcggaggattggcattaccgagaagccgccgtcgccgcttttggcgccatcatggaaggccccgatgagcaggtcttggagcctatcgtcaagcaggctctgcccattctcatcgcaatgatggaggacaattctatcttcgtgaaggactcgacagcctatgctctcggccgcattacggaggcgtgttcgagggctattgatcctaacacgcatttggaacccttgattcggtctctcttcgctggtgtccatgactcgaagatggccgcctcttgttgctgggcgctgatgaacctggcagcacagttctcggctgatccccagtctcccacgaatccgctcactccccacttcaaccagagcgttcagactcttctggctgttaccgagcaagctggagcagagtcgactgtccgcactacgtcatacgaggtactcagtgccctagtccaatattctgcgaccgagagcttcccgtccgtagcccaactctcagaagtgatcatcaaacgactggaagagactatccccatgcagagccaagttgtcagtattgaggataagatcactctcgaggaaatgcagacaagcttgtgcacggttctccaggccatcatccagcgccttgataaggagatcgccccgttaggcgaccgggttatgcatgtgctgctacaacttctcagctccgtcggcgcaaaatccagcgtacccgaggctgtctttgctactatcagcggtctcacaatcgccatggatgaggacttcattaagtacatggaggcattcactccattcctgtacactgctctgggcaatctagaagagcctagtctgtgctctatggccattggcctcgtcagcgacatcacccgttccttgcgcgagcacagtcaaccatttgttgagaacttcatgcactatctgtccagggatttaagtagtaacaccctgacgcctgctattctacaatgtttcggcgatattgccttggctatcggtggtcactttgaaaactgggttactcctgtgggcgaagcactgcaaaaggctgcgtctctcaaggctgccccggaaggatcgtatgagatgattgactatgtcctttcgcttcgtgagggaatcatgaatgcatgggaaagcatcattggtgctatgaaagacagcggcaagacccaagcccttcagccgttcgttgaatccattggcgagctgcttcaagctatctcgcaagatttccacaagagcgagtcactaatgcgatcgtctatgggagtcatcggcgaactggccgaagcctacctacgtcgagaacttgccgttctcttcctaaattttgaaccagagaacaagaagagccattgggtctacatgatggtccaggagacgatcagggaggcaccatccagtagcgacttgaaaggaaccgcacaatgggccaaggcgcatctcgagaagcttggcaagggccagcttggagacaacacatccgccatggagcagacgtgaacatttccgcaacgctcttaaagatccctagtcccgcataccctaccatatgtcacgacacacacctccccccgacaggcgagctaggccttagagagtctgagctcatgcatgccaaggagtcggaagaaaccagcagcacgtcatatcccagaaatccacaacccacctcccaccagcattgcagcaacacatgtgtatataaaccccttgccctgccttagtaatccaataccccctgtcctcacatactcataccccttgaagccgctacatcagacatacaacactgcacgtcgcaatccctcatgtatccccttttgctgagtttctatctggttttgattgcaagacctaccacggagatatgcccatagagagtagatcacctcatgtacgccctgagccttggctagggccacgaagtcatgtaagagaggaatgttgaaagaataagagtgcttctcgagtggaaggagatgacacatttgatatgtcataacatggctgctggcttattcaagtgaatatgacccaagcgcatagggggcagcagttgcttgagccctctgttgacatggagatgatggaggtgtcaagacgttgcgccatggattacgatattgacgatctgggaatacagagtagtcgtattgctgatgcctcacgtcacaccccggtggtgatcgttggtagatagtgctaaatctaaaatagagccttttctactaatcttttctacctactgccgtatgtcatgttcttacggtttg

SEQ ID NO: 7488 - DNA, 2676 bp, Muscodor strobelii
  misc_feature: SGI cDNA ID NO. 562261
  misc_feature: Encodes the peptide sequence at SEQ ID NO 7489
atggctgaaaacagtggtatcaacacagtcctcagcaactcgctgtcaggagatgctacgacgcgaaatggcgccgagcaacagcttgcccaggcggcagacaataactttcccctgtacctggccactcttgtccagtcactggccgacgaaaacaccgaagcccaaatcagagtcgctgcaggtctggcactgaagaactcgtttacggcccgcgagttcgcccgcgcacaggaactccaagccaaatggctccagcagacagacgatgagaccaagaagcgcgtcaaggagctcgccctccagacactgtcatccaccaacgcacaggctggcgctgccgccgcccaagtcattgcatccattgctgccctcgagctgcccagagatcagtggcccgaactgatgggtaccttggtccagaacgtcagcggtggcgcccctcaccagaagcagtcttcattgacgtgtattggctatatatgcgacagccaggacccccagctgcgggctgccttggtcgcccactcgaacgctatcctgacggccgtcgtacaaggcgctcgcaaggaagagaccaacaacgagatccgcctctccgccatctctgcgctcggggattctcttgagttcgttggcaacaacttcagaaacgagggcgagcgcaactacatcatgcaggttgtctgtgaggctacgcaggccgacgactcgcggatccagcagagtgctttcggatgtctcaaccggatcatgggcctttactatgagaacatgcgtttctacatggagaaggccctgttcggtctcaccattcttggcatgaagaacgacgacgaggatgtagccaagcttgcggtcgagttctggagcacagtctgcgaggaggagatcagcattagcgatgacaacgagcacgtccaaaccactgatcagcagcgacctttctataacttcgcgcgcgtcgcaacaggagaggttgtgcccaccctcctcagtcttctcacgaagcaggatgaggacgccgctgacgatgaatacaatctggcacgtgctgcttaccaatgtctccaactctacgcccagatcgttggcgccaatattatcccgccagtcatccagttcgttgaggcacatcttcggtcggaggattggcattaccgagaagccgccgtcgccgcttttggcgccatcatggaaggccccgatgagcaggtcttggagcctatcgtcaagcaggctctgcccattctcatcgcaatgatggaggacaattctatcttcgtgaaggactcgacagcctatgctctcggccgcattacggaggcgtgttcgagggctattgatcctaacacgcatttggaacccttgattcggtctctcttcgctggtgtccatgactcgaagatggccgcctcttgttgctgggcgctgatgaacctggcagcacagttctcggctgatccccagtctcccacgaatccgctcactccccacttcaaccagagcgttcagactcttctggctgttaccgagcaagctggagcagagtcgactgtccgcactacgtcatacgaggtactcagtgccctagtccaatattctgcgaccgagagcttcccgtccgtagcccaactctcagaagtgatcatcaaacgactggaagagactatccccatgcagagccaagttgtcagtattgaggataagatcactctcgaggaaatgcagacaagcttgtgcacggttctccaggccatcatccagcgccttgataaggagatcgccccgttaggcgaccgggttatgcatgtgctgctacaacttctcagctccgtcggcgcaaaatccagcgtacccgaggctgtctttgctactatcagcggtctcacaatcgccatggatgaggacttcattaagtacatggaggcattcactccattcctgtacactgctctgggcaatctagaagagcctagtctgtgctctatggccattggcctcgtcagcgacatcacccgttccttgcgcgagcacagtcaaccatttgttgagaacttcatgcactatctgtccagggatttaagtgtcagtacttccgacttcttcagtaacaccctgacgcctgctattctacaatgtttcggcgatattgccttggctatcggtggtcactttgaaaactgggttactcctgtgggcgaagcactgcaaaaggctgcgtctctcaaggctgccccggaaggatcgtatgagatgattgactatgtcctttcgcttcgtgagggaatcatgaatgcatgggaaagcatcattggtgctatgaaagacagcggcaagacccaagcccttcagccgttcgttgaatccattggcgagctgcttcaagctatctcgcaagatttccacaagagcgagtcactaatgcgatcgtctatgggagtcatcggcgaactggccgaagcctacctacgtcgagaacttgccgttctcttcctaaattttgaaccagagaacaagaagagccattgggtctacatgatggtccaggagacgatcagggaggcaccatccagtagcgacttgaaaggaaccgcacaatgggccaaggcgcatctcgagaagcttggcaagggccagcttggagacaacacatccgccatggagcagacgtga

SEQ ID NO: 7489 - protein, 891 aa, Muscodor strobelii
  misc_feature: SGI Peptide ID NO. 562261
  misc_feature (408)..(444): Pfam Id: PF02985 Pfam Desc: HEAT repeat
  misc_feature (25)..(106): Pfam Id: PF03810 Pfam Desc: Importin-beta N-terminal domain
  misc_feature (5)..(891): NCBI GI: 39943176 Blast Desc: conserved [Magnaporthe grisea 70-15] gi|145009740|gb|EDJ94396.1| conserved [Magnaporthe grisea 70-15]
  misc_feature (4)..(890): NCBI GI: 256727671 Blast Desc: [Nectria haematococca mpVI 77-13-4]
  misc_feature (4)..(888): NCBI GI: 46135877 Blast Desc: FG09454.1 [Gibberella zeae PH-1]
  misc_feature (7)..(891): NCBI GI: 171684977 Blast Desc: protein product [Podospora anserina] gi|170942449|emb|CAP68101.1| protein product [Podospora anserina]
  misc_feature (7)..(891): NCBI GI: 116193637 Blast Desc: conserved [Chaetomium globosum CBS 148.51] gi|88182449|gb|EAQ89917.1| conserved [Chaetomium globosum CBS 148.51]
  misc_feature (4)..(890): NCBI GI: 261357919 Blast Desc: importin subunit beta-1 [Verticillium albo-atrum VaMs.102]
  misc_feature (1)..(882): NCBI GI: 85115440 Blast Desc: NCU02011 [Neurospora crassa OR74A] gi|28926672|gb|EAA35640.1| NCU02011 [Neurospora crassa OR74A]
  misc_feature (1)..(882): NCBI GI: 38566891 Blast Desc: KAP95 protein [Neurospora crassa]
  misc_feature (7)..(882): NCBI GI: 154305775 Blast Desc: BC1G_07702 [Botryotinia fuckeliana B05.10] gi|150853221|gb|EDN28413.1| BC1G_07702 [Botryotinia fuckeliana B05.10]
  misc_feature (7)..(882): NCBI GI: 156031192 Blast Desc: SS1G_14204 [Sclerotinia sclerotiorum 1980] gi|154700595|gb|EDO00334.1| SS1G_14204 [Sclerotinia sclerotiorum 1980]
MAENSGINTVLSNSLSGDATTRNGAEQQLAQAADNNFPLYLATLVQSLADENTEAQIRVAAGLALKNSFTAREFARAQELQAKWLQQTDDETKKRVKELALQTLSSTNAQAGAAAAQVIASIAALELPRDQWPELMGTLVQNVSGGAPHQKQSSLTCIGYICDSQDPQLRAALVAHSNAILTAVVQGARKEETNNEIRLSAISALGDSLEFVGNNFRNEGERNYIMQVVCEATQADDSRIQQSAFGCLNRIMGLYYENMRFYMEKALFGLTILGMKNDDEDVAKLAVEFWSTVCEEEISISDDNEHVQTTDQQRPFYNFARVATGEVVPTLLSLLTKQDEDAADDEYNLARAAYQCLQLYAQIVGANIIPPVIQFVEAHLRSEDWHYREAAVAAFGAIMEGPDEQVLEPIVKQALPILIAMMEDNSIFVKDSTAYALGRITEACSRAIDPNTHLEPLIRSLFAGVHDSKMAASCCWALMNLAAQFSADPQSPTNPLTPHFNQSVQTLLAVTEQAGAESTVRTTSYEVLSALVQYSATESFPSVAQLSEVIIKRLEETIPMQSQVVSIEDKITLEEMQTSLCTVLQAIIQRLDKEIAPLGDRVMHVLLQLLSSVGAKSSVPEAVFATISGLTIAMDEDFIKYMEAFTPFLYTALGNLEEPSLCSMAIGLVSDITRSLREHSQPFVENFMHYLSRDLSVSTSDFFSNTLTPAILQCFGDIALAIGGHFENWVTPVGEALQKAASLKAAPEGSYEMIDYVLSLREGIMNAWESIIGAMKDSGKTQALQPFVESIGELLQAISQDFHKSESLMRSSMGVIGELAEAYLRRELAVLFLNFEPENKKSHWVYMMVQETIREAPSSSDLKGTAQWAKAHLEKLGKGQLGDNTSAMEQT

SEQ ID NO: 7490 - DNA, 3802 bp, Muscodor strobelii; identical to SEQ ID NO: 7487
  misc_feature: SGI EST ID NO. CUFF.18874.1
  misc_feature: Variant of the nucleotide sequence at SEQ ID NO 7488

SEQ ID NO: 7491 - DNA, 1581 bp, Muscodor strobelii
  misc_feature: SGI cDNA ID NO. 562262
  misc_feature: Reduced expression when VOC is produced
  misc_feature: Encodes the peptide sequence at SEQ ID NO 7492
atgacatcactcgtagcctcacaagcgctcaagactcgcgttcaccgtccttcatacctaaagaagctctgccaccctcaagatctgctgaaccactttccaaatggagctgcgatcgggtggtcgggctttacgggtgttgggtaccccaaaaaaatgccgacgttcttggccgaccatgtagagaagaatagcttgcaaggccaattacggtattctctttttgttggtgcctcgtcaggtgcggagacagaaaatcgttgggcggcgcttgatatgattgagcggcggagtcctcatcaagttggcaagcagatttcgaaagggattaatgagggcaggatcaagttctttgataaacacttgtctatgttccctgttgatctggtttatgggttttacacgaaagatcggccgaaaagcaagttggatgttgttgtcgtggaggctactgcgatcaaggaggatggtagcattgtgccgggtgcttctgttggcgcgaccccagaacttattcagatggcggacaaaattataatcgaggtcaatactgcaattccgagctttgagggtcttcacgatattacaatgacagatctgccaccccggcgaaaaccatatctcatcatgcaagtagaagacagaataggatcaacatctatcccagtagatcctgagaaggttgtcggaatcatcgaatcagattatcaagatcagacgtccccgaacacacccgctgatgaggcatcgcgagccattgctaatcatctgatcgagttctttgaacacgaggttacgcatggaagaatgccaaagtcacttttacctctacaatccggcatcggtaacatcgcgaatgccgttatcggcggattgagcgagtcgaacttcaagaatctcaaagtctggacagaagtgatccaggacacattcctcgatctcttcgattccggacgtctcgacttcgcgaccgcgacttctatccgcttttctcccgaagggttcaagcgtttctacgataattgggaggcataccatgataaattacttctacgtgcgcagcaggtctcgaactcacccgagattataagacggttaggcgtcatcggcatgaatacaccagtcgaggtggatatctacgctcacgcgaacagcacatgtgtgatgggcagtcgaatgttaaacggactcggtggatcagcggatttcctccgctcgtcaaagtacagcatcatgcacacgccttccacgcgtccatcgaagacggatccgttaggcgtgagctgtatcgtgccgatgtgtacgcacgtcgaccagacggagcacgatctggatatcgtggtgacggagacaggtctggctgatgtgaggggcttgtcgccgagagaacgcgcgggggttattattgagaagtgtgcgcatgaggtgtataaacctatcttgaaggattattttgagaaggctgagtttgagtgtttgaggagggggtggggtcatgaaccgcatttgttgtggaatagctttgatatgcataaggcgctcgatcaggaggggagtatgaggaagattaggaagtggtag

SEQ ID NO: 7492 - protein, 526 aa, Muscodor strobelii
  misc_feature: SGI Peptide ID NO. 562262
  misc_feature (15)..(233): Pfam Id: PF02550 Pfam Desc: Acetyl-CoA hydrolase/transferase N-terminal domain
  misc_feature (1)..(526): NCBI GI: 171677171 Blast Desc: protein product [Podospora anserina] gi|170936653|emb|CAP61312.1| protein product [Podospora anserina]
  misc_feature (1)..(526): NCBI GI: 261352847 Blast Desc: acetyl-CoA hydrolase [Verticillium albo-atrum VaMs.102]
  misc_feature (11)..(526): NCBI GI: 154292268 Blast Desc: acetyl-CoA hydrolase [Botryotinia fuckeliana B05.10] gi|150846237|gb|EDN21430.1| acetyl-CoA hydrolase [Botryotinia fuckeliana B05.10]
  misc_feature (11)..(526): NCBI GI: 156059924 Blast Desc: acetyl-CoA hydrolase [Sclerotinia sclerotiorum 1980] gi|154701761|gb|EDO01500.1| acetyl-CoA hydrolase [Sclerotinia sclerotiorum 1980]
  misc_feature (1)..(526): NCBI GI: 39977413 Blast Desc: acetyl-CoA hydrolase [Magnaporthe grisea 70-15] gi|145015943|gb|EDK00433.1| acetyl-CoA hydrolase [Magnaporthe grisea 70-15]
  misc_feature (1)..(524): NCBI GI: 85090308 Blast Desc: acetyl-CoA hydrolase [Neurospora crassa OR74A] gi|57015293|sp|P15937.2|ACH1_NEUCR RecName: Full=Acetyl-CoA hydrolase; AltName: Full=Acetyl-CoA deacylase; Short=Acetyl-CoA
  misc_feature (1)..(526): NCBI GI: 256733372 Blast Desc: [Nectria haematococca mpVI 77-13-4]
  misc_feature (4)..(526): NCBI GI: 169605699 Blast Desc: SNOG_05874 [Phaeosphaeria nodorum SN15] gi|160706816|gb|EAT86938.2| SNOG_05874 [Phaeosphaeria nodorum SN15]
  misc_feature (4)..(526): NCBI GI: 212545701 Blast Desc: acetyl-coA hydrolase Ach1, [Penicillium marneffei ATCC 18224] gi|210064524|gb|EEA18619.1| acetyl-coA hydrolase Ach1, [Penicillium marneffei ATCC 18224]
  misc_feature (4)..(526): NCBI GI: 242820355 Blast Desc: acetyl-coA hydrolase Ach1, [Talaromyces stipitatus ATCC 10500] gi|218713958|gb|EED13382.1| acetyl-coA hydrolase Ach1, [Talaromyces stipitatus ATCC 10500]
  misc_feature (1)..(524): SWISSPROT Homolog: EC 3.1.2.1 Acetyl-CoA hydrolase
  misc_feature: Useful for introducing or modulating the production of volatile compounds
MTSLVASQALKTRVHRPSYLKKLCHPQDLLNHFPNGAAIGWSGFTGVGYPKKMPTFLADHVEKNSLQGQLRYSLFVGASSGAETENRWAALDMIERRSPHQVGKQISKGINEGRIKFFDKHLSMFPVDLVYGFYTKDRPKSKLDVVVVEATAIKEDGSIVPGASVGATPELIQMADKIIIEVNTAIPSFEGLHDITMTDLPPRRKPYLIMQVEDRIGSTSIPVDPEKVVGIIESDYQDQTSPNTPADEASRAIANHLIEFFEHEVTHGRMPKSLLPLQSGIGNIANAVIGGLSESNFKNLKVWTEVIQDTFLDLFDSGRLDFATATSIRFSPEGFKRFYDNWEAYHDKLLLRAQQVSNSPEIIRRLGVIGMNTPVEVDIYAHANSTCVMGSRMLNGLGGSADFLRSSKYSIMHTPSTRPSKTDPLGVSCIVPMCTHVDQTEHDLDIVVTETGLADVRGLSPRERAGVIIEKCAHEVYKPILKDYFEKAEFECLRRGWGHEPHLLWNSFDMHKALDQEGSMRKIRKW

SEQ ID NO: 7493 - DNA, 2067 bp, Muscodor strobelii
  misc_feature: SGI EST ID NO. CUFF.18849.1
  misc_feature: Variant of the nucleotide sequence at SEQ ID NO 7491
ctcattttcattattagttgatcactaaccatcaaatctttcaattgtattaataaaatcgtatgctcttcaaccgaatctggttgcgtgttacgaataagtgggtagctgtccctgccagcttggcaaacccaacaatggttcgagacagggactcagggatcaaaggtcacatctaagccggccgattcacggttgtatttaaagtcaccgtggaattgatagggcgaaactcaaacccttctcagttttatacatactttactcgccattatcacctatttcttgctttctttcccctcggccacgacgatactcataaccaccccaccaccttaatggtgccatcatgacatcactcgtagcctcacaagcgctcaagactcgcgttcaccgtccttcatacctaaagaagctctgccaccctcaagatctgctgaaccactttccaaatggagctgcgatcgggtggtcgggctttacgggtgttgggtaccccaaaaaaatgccgacgttcttggccgaccatgtagagaagaatagcttgcaaggccaattacggtattctctttttgttggtgcctcgtcaggtgcggagacagaaaatcgttgggcggcgcttgatatgattgagcggcggagtcctcatcaagttggcaagcagatttcgaaagggattaatgagggcaggatcaagttctttgataaacacttgtctatgttccctgttgatctggtttatgggttttacacgaaagatcggccgaaaagcaagttggatgttgttgtcgtggaggctactgcgatcaaggaggatggtagcattgtgccgggtgcttctgttggcgcgaccccagaacttattcagatggcggacaaaattataatcgaggtcaatactgcaattccgagctttgagggtcttcacgatattacaatgacagatctgccaccccggcgaaaaccatatctcatcatgcaagtagaagacagaataggatcaacatctatcccagtagatcctgagaaggttgtcggaatcatcgaatcagattatcaagatcagacgtccccgaacacacccgctgatgaggcatcgcgagccattgctaatcatctgatcgagttctttgaacacgaggttacgcatggaagaatgccaaagtcacttttacctctacaatccggcatcggtaacatcgcgaatgccgttatcggcggattgagcgagtcgaacttcaagaatctcaaagtctggacagaagtgatccaggacacattcctcgatctcttcgattccggacgtctcgacttcgcgaccgcgacttctatccgcttttctcccgaagggttcaagcgtttctacgataattgggaggcataccatgataaattacttctacgtgcgcagcaggtctcgaactcacccgagattataagacggttaggcgtcatcggcatgaatacaccagtcgaggtggatatctacgctcacgcgaacagcacatgtgtgatgggcagtcgaatgttaaacggactcggtggatcagcggatttcctccgctcgtcaaagtacagcatcatgcacacgccttccacgcgtccatcgaagacggatccgttaggcgtgagctgtatcgtgccgatgtgtacgcacgtcgaccagacggagcacgatctggatatcgtggtgacggagacaggtctggctgatgtgaggggcttgtcgccgagagaacgcgcgggggttattattgagaagtgtgcgcatgaggtgtataaacctatcttgaaggattattttgagaaggctgagtttgagtgtttgaggagggggtggggtcatgaaccgcatttgttgtggaatagctttgatatgcataaggcgctcgatcaggaggggagtatgaggaagattaggaagtggtaggcatgtgtatcaatattgatgttgaaattatttgccataaagcgtgttagtttcaattcgtaatcggccgcgggcttgatactcgactggcaatgaaatagacgacacacacacgtcccctgagtagcatcagcaag

SEQ ID NO: 7494 - DNA, 345 bp, Muscodor strobelii
  misc_feature: SGI cDNA ID NO. 562263
  misc_feature: Encodes the peptide sequence at SEQ ID NO 7495
atgtcgtcgaatgactgggaaagacacaagaatacgatcttgaacctctatctcattgagaagcttcgccttcaggatgtgatagaccatatgaaaaaggagcacagttttgagaaaaagaaaagtcaatatgagtatcagttcaagaagtgggatatcaagaagaaccacaccaaagacttctggcgggcacttgaccatcatgttcaaaaaagtggcggcagacacgttgaggtcacgaagtatggcctagctctttctacgaatcaggtacagagatcaatacagagatatggacgtgatattcccaccgccagcgaattcggcagaagaggtctgttctaa

SEQ ID NO: 7495 - protein, 114 aa, Muscodor strobelii
  misc_feature: SGI Peptide ID NO. 562263
  misc_feature (1)..(103): NCBI GI: 256735618 Blast Desc: NECHADRAFT_75654 [Nectria haematococca mpVI 77-13-4]
  misc_feature (5)..(98): NCBI GI: 119500700 Blast Desc: Ankyrin repeat protein [Neosartorya fischeri NRRL 181] gi|119415272|gb|EAW25210.1| Ankyrin repeat protein [Neosartorya fischeri NRRL 181]
  misc_feature (1)..(97): NCBI GI: 145603809 Blast Desc: [Magnaporthe grisea 70-15] gi|145011959|gb|EDJ96615.1| [Magnaporthe grisea 70-15]
  misc_feature (2)..(98): NCBI GI: 258565299 Blast Desc: [Uncinocarpus reesii 1704] gi|237907095|gb|EEP81496.1| [Uncinocarpus reesii 1704]
  misc_feature (2)..(57): NCBI GI: 39977455 Blast Desc: [Magnaporthe grisea 70-15] gi|145015922|gb|EDK00412.1| [Magnaporthe grisea 70-15]
  misc_feature (6)..(56): NCBI GI: 256727513 Blast Desc: NECHADRAFT_32457 [Nectria haematococca mpVI 77-13-4]
  misc_feature (4)..(97): NCBI GI: 67541831 Blast Desc: AN7079.2 [Aspergillus nidulans FGSC A4] gi|40742018|gb|EAA61208.1| AN7079.2 [Aspergillus nidulans FGSC A4]
  misc_feature (6)..(104): NCBI GI: 212537897 Blast Desc: ankyrin repeat-containing protein, [Penicillium marneffei ATCC 18224] gi|210068846|gb|EEA22937.1| ankyrin repeat-containing protein, [Penicillium marneffei ATCC 18224]
  misc_feature (4)..(98): NCBI GI: 169619886 Blast Desc: SNOG_13142 [Phaeosphaeria nodorum SN15] gi|160703918|gb|EAT79469.2| SNOG_13142 [Phaeosphaeria nodorum SN15]
  misc_feature (2)..(106): NCBI GI: 256728009 Blast Desc: NECHADRAFT_83369 [Nectria haematococca mpVI 77-13-4]
MSSNDWERHKNTILNLYLIEKLRLQDVIDHMKKEHSFEKKKSQYEYQFKKWDIKKNHTKDFWRALDHHVQKSGGRHVEVTKYGLALSTNQVQRSIQRYGRDIPTASEFGRRGLF

SEQ ID NO: 7496 - DNA, 2460 bp, Muscodor strobelii
  misc_feature: SGI cDNA ID NO. 562264
  misc_feature: Encodes the peptide sequence at SEQ ID NO 7497
atgagtatgtcacccgggttcgaagacatacaaatggataatggcactgcatcatccatgtcgcctcccactaccgggactccgtccggcggcgcggtaccacctcccgtgaaacgccgtgccccgattgcttgccgaaggtgtcgccgcctccgcagcaaatgtatacatgaaaaggcgcctccatgcaaagcttgtaaagaagcaaatgtgcctgacgaatgtgtattcccgagtcgaggagatacggactcagaccgttcattccggcatcctcgacagagagctgataaaaagaacaagcttgaccttgttaaggtgaagagggagccggcaactgctccaaggctgggtctggatgccctctctagttttcggccgccgaagatgagtaatgaatgggagttactccctgaggtcgatgtgattatcgactgtatccacaccttcacacgtcatttttaccagattggattcattccaaagaaaatgttcattgcgagcctaaaggagaacgcagaaagcgtgaatgtctttcttctgttaggcatcttgtgtatagccgccagattcaacagatatcatattcaggcatatggagatggcttgctggccgctgatgaatacttagcgaaggcgcaaagagtcgcagtcactgagatctatctcgagcctacgctggagagatgtcaggctttttatctcctcagcgttgcggaacaaggatccgggaaatcaaacacgagctatataagcgcgggtatagcatttcggatggctgccctcatgcgactgcatcgcgaagaagcgtacagcgccataacatctaaggcacatattatccagcgcattcgagctgaagccgcaagacggacgttttggatgctacatagtcaagataatctccactctggaccttataaacccgtatcgttagcgcctagcgatattaccgcattattaccttgcgatgagtccgatttcgaagttggcagaatcccagagaaacgagcggctcttgagggaacaccacctgcaatcgcagatcccagccttgtttttcttcggccacggtctctactcgcatctttaatgcaagttcacagcttctggggtgagattgcgcgtcgggtcttatgcaacgcgaaagactggaggccctacgatgaagatagtggattttcaatacttcaacgtcgacttgtagaatgggaaagaaatcttccttccgagcatgcattcggcagaatactacttggtggttaccgacactacgaagaggactcggcttatctcagtttgactggatgtttacgcttatgtcacatagtactgagaaaagtgtacatgagcgaaatgcttcgtcatgcccaaggagacccaagcaaccccgaggtcaggttctatcaagacatggccaatgatctcttcatgaacgtgagagttttatatgagcagatcgatgcgcacttcgaaaacggcacaccaatcgagagcttggggtcacagatgtctgctttcataatttatagttgtggccttctagcgtcgtatcttgtgaaatttccacaacttgacgttaagcacgctggtagcaatttgcaggccgcacaagccgaaggtcgagtgatctatgctcggagtctcactatcctgagagcttatgggcaaacttggccgctcgccactgcttgggctaatggacttgaaaagtggtttaaagaccagaatccgaagaatatttcattccggagtgggactatgacggacggccaagagccagcgccgtacgctctcggtgccatgcacccgcgtttgagtccctcggcgttccgtagttcggtggttaaaaaattccacacggcgcgtccggcaactccgcctgcgacagaggatcgtcaaaattccgaagtaggagacggagccgagcctcctcgattagctcctctgcagcaagcgccgtctaccttctcggaaccggtttgtttgccaccattgtcccacgcacaatatgtagcctcttcatctgaaacaccacctcaactaggcggtactccatccttcgttccgcctcctgagcaacaagtgcccgtgcagcctcaacaacatacgccccaaccgccacattcacaaatccatcctcaagctccaattcagcctcatacaccacatcaccaatccttcacgccacaacagcaaccaccaccgccacagcaatatgcaccaaacaccggtctcgacatgttaatacaagcgtcatcatctcacaacgcaccacccgcttcaggaccgccgatggaagcatatgggtactacaacgattacacaggcatggcattaaacgacggtttcgactcgaatttgcaaattatggttgatggcggtgctcgctggacagccatcgatgctaccagcgcgatttataatccttatggaaatatgccaggaccaatgacatag

SEQ ID NO: 7497 - protein, 819 aa, Muscodor strobelii
  misc_feature: SGI Peptide ID NO. 562264
  misc_feature (226)..(328): Pfam Id: PF04082 Pfam Desc: Fungal specific transcription factor domain
  misc_feature (226)..(296): Pfam Id: PF04082 Pfam Desc: Fungal specific transcription factor domain
  misc_feature (21)..(590): NCBI GI: 85115444 Blast Desc: NCU02012 [Neurospora crassa OR74A] gi|28926673|gb|EAA35641.1| [Neurospora crassa OR74A] gi|38566892|emb|CAE76197.1| related to general repressor of
  misc_feature (37)..(575): NCBI GI: 256727092 Blast Desc: NECHADRAFT_11425 [Nectria haematococca mpVI 77-13-4]
  misc_feature (29)..(754): NCBI GI: 261357918 Blast Desc: conserved [Verticillium albo-atrum VaMs.102]
  misc_feature (51)..(622): NCBI GI: 171684979 Blast Desc: protein product [Podospora anserina] gi|170942450|emb|CAP68102.1| protein product [Podospora anserina]
  misc_feature (22)..(502): NCBI GI: 116193633 Blast Desc: CHGG_06534 [Chaetomium globosum CBS 148.51] gi|88182447|gb|EAQ89915.1| CHGG_06534 [Chaetomium globosum CBS 148.51]
  misc_feature (136)..(569): NCBI GI: 212539255 Blast Desc: conserved [Penicillium marneffei ATCC 18224] gi|210069525|gb|EEA23616.1| conserved [Penicillium marneffei ATCC 18224]
  misc_feature (237)..(452): NCBI GI: 242760497 Blast Desc: conserved [Talaromyces stipitatus ATCC 10500] gi|218723199|gb|EED22616.1| conserved [Talaromyces stipitatus ATCC 10500]
  misc_feature (40)..(644): NCBI GI: 189200933 Blast Desc: [Pyrenophora tritici-repentis Pt-1C-BFP] gi|187983902|gb|EDU49390.1| [Pyrenophora tritici-repentis Pt-1C-BFP]
  misc_feature (40)..(565): NCBI GI: 256728842 Blast Desc: NECHADRAFT_79882 [Nectria haematococca mpVI 77-13-4]
  misc_feature (179)..(691): NCBI GI: 156049125 Blast Desc: SS1G_08269 [Sclerotinia sclerotiorum 1980] gi|154692668|gb|EDN92406.1| SS1G_08269 [Sclerotinia sclerotiorum 1980]
MSMSPGFEDIQMDNGTASSMSPPTTGTPSGGAVPPPVKRRAPIACRRCRRLRSKCIHEKAPPCKACKEANVPDECVFPSRGDTDSDRSFRHPRQRADKKNKLDLVKVKREPATAPRLGLDALSSFRPPKMSNEWELLPEVDVIIDCIHTFTRHFYQIGFIPKKMFIASLKENAESVNVFLLLGILCIAARFNRYHIQAYGDGLLAADEYLAKAQRVAVTEIYLEPTLERCQAFYLLSVAEQGSGKSNTSYISAGIAFRMAALMRLHREEAYSAITSKAHIIQRIRAEAARRTFWMLHSQDNLHSGPYKPVSLAPSDITALLPCDESDFEVGRIPEKRAALEGTPPAIADPSLVFLRPRSLLASLMQVHSFWGEIARRVLCNAKDWRPYDEDSGFSILQRRLVEWERNLPSEHAFGRILLGGYRHYEEDSAYLSLTGCLRLCHIVLRKVYMSEMLRHAQGDPSNPEVRFYQDMANDLFMNVRVLYEQIDAHFENGTPIESLGSQMSAFIIYSCGLLASYLVKFPQLDVKHAGSNLQAAQAEGRVIYARSLTILRAYGQTWPLATAWANGLEKWFKDQNPKNISFRSGTMTDGQEPAPYALGAMHPRLSPSAFRSSVVKKFHTARPATPPATEDRQNSEVGDGAEPPRLAPLQQAPSTFSEPVCLPPLSHAQYVASSSETPPQLGGTPSFVPPPEQQVPVQPQQHTPQPPHSQIHPQAPIQPHTPHHQSFTPQQQPPPPQQYAPNTGLDMLIQASSSHNAPPASGPPMEAYGYYNDYTGMALNDGFDSNLQIMVDGGARWTAIDATSAIYNPYGNMPGPMT

SEQ ID NO: 7498 - DNA, 4280 bp, Muscodor strobelii
  misc_feature: SGI EST ID NO. CUFF.18544.0
  misc_feature: Variant of the nucleotide sequence at SEQ ID NO 7496
gtgggcgaagggtgtactttgggcacttgtcgctgtcgagacgggaccagaccagcctcatcttgaaagatcgcgcccgaccctacaagcgcacatgtgcacacccatcgactacacatatgcaggtcatcgatatgggtaaatcacgggccaatacgcagcagccacggaccgagcgaactggaaaaggccttcaactggacggtaggtcatgataggacttgtcaagtctctcgctcacctttcttgtttcattgatttgttcgcgaccgagggactctttactcgtgaaagaattcgacaacaaggataaagatgtaggaagtctcgatggtgctaaatttcgcatgtggcatggcatccctgctctcaccatttcgaacaatgatccttctctacaagtagttattttgcacgagtaacaatctcgttcatgatatctcgatctcgcgtcacagacgatagataacaatccctctcacatagggaggttacgccagcatctgttgttcctgtcattcttactcacgtcgccaattgtccaattatctcagccaccacttatctgctttccgcctagcgaaagggaagaatcacaatcagccctgggccaggtcaaatcttggggtgctgtagtaatcccggtaggcggagcctgacagtcgcagattactagttgggttagaattagacggacggagatcgactttcgttatcctcatattacactcacggcctgcctgttcttcgatccgtgtctattagtagctatttcgtttgtagtggtcgctaaagagatagatagccgagcgaaaaggaacgatccagagagaggcgctaagctgctctgttgatatacacgatcagccccaagcccgcctggtcacggcgttcgccgtttcatttcacttctcgttactcgtaactcgcatctcttgaggccgattttcacatcaacggtcccgcgatcagtcaaggggaaatcacttcccgcccgacactaagcacgacgaatcgcttcactgtttgagcttcatagctttctacgttacagatgtcgtgcgccggcttttgtgccacccgcaattacgccttgtaacggactcattgccgccgcgacgcggcatttcacacctcaatcgcggagaatctgacaatatctcaaatcattgtgctcgacctcatatctgccacgtgcgaccttggatcgccgatctaccacctgtccggtcatctccccttcgcggctctggtaagacaagtgtctaccggccattgacctgactcgtgaacatgagtatgtcacccgggttcgaagacatacaaatggataatggcactgcatcatccatgtcgcctcccactaccgggactccgtccggcggcgcggtaccacctcccgtgaaacgccgtgccccgattgcttgccgaaggtgtcgccgcctccgcagcaaatgtatacatgaaaaggcgcctccatgcaaagcttgtaaagaagcaaatgtgcctgacgaatgtgtattcccgagtcgaggagatacggactcagaccgttcattccggcatcctcgacagagagctgataaaaagaacaagcttgaccttgttaaggtgaagagggagccggcaactgctccaaggctgggtctggatgccctctctagttttcggccgccgaagatgagtaatgaatgggagttactccctgaggtcgatgtgattatcgactgtatccacaccttcacacgtcatttttaccagattggattcattccaaagaaaatgttcattgcgagcctaaaggagaacgcagaaagcgtgaatgtctttcttctgttaggcatcttgtgtatagccgccagattcaacagatatcatattcaggcatatggagatggcttgctggccgctgatgaatacttagcgaaggcgcaaagagtcgcagtcactgagatctatctcgagcctacgctggagagatgtcaggctttttatctcctcagcgttgcggaacaaggatccgggaaatcaaacacgagctatataagcgcgggtatagcatttcggatggctgccctcatgcgactgcatcgcgaagaagcgtacagcgccataacatctaaggcacatattatccagcgcattcgagctgaagccgcaagacggacgtttgtaagttgctccccagatttaacaatcgcaccataagacaacatcacaatcaggaggctctggtacttttcgctgacctttcgcaaaatagtggatgctacatagtaggtttgcacaggttgcggataggggtagttctctaataatggataataggtcaagataatctccactctggaccttataaacccgtatcgttagcgcctagcgatattaccgcattattaccttgcgatgagtccgatttcgaagttggcagaatcccagagaaacgagcggctcttgagggaacaccacctgcaatcgcagatcccagccttgtttttcttcggccacggtctctactcgcatctttaatgcaagttcacagcttctggggtgagattgcgcgtcgggtcttatgcaacgcgaaagactggaggccctacgatgaagatagtggattttcaatacttcaacgtcgacttgtagaatgggaaagaaatcttccttccgagcatgcattcggcagaatactacttggtggttaccgacactacgaagaggactcggcttatctcagtttgactggatgtttacgcttatgtcacatagtactgagaaaagtgtacatgagcgaaatgcttcgtcatgcccaaggagacccaagcaaccccgaggtcaggttctatcaagacatggccaatgatctcttcatgaacgtgagagttttatatgagcagatcgatgcgcacttcgaaaacggcacaccaatcgagagcttggggtcacagatgtctgctttcataatttatagttgtggccttctagcgtcgtatcttgtgaaatttccacaacttgacgttaagcacgctggtagcaatttgcaggccgcacaagccgaaggtcgagtgatctatgctcggagtctcactatcctgagagcttatgggcaaacttggccgctcgccactgcttgggctaatggacttgaaaagtggtttaaagaccagaatccgaagaatatttcattccggagtgggactatgacggacggccaagagccagcgccgtacgctctcggtgccatgcacccgcgtttgagtccctcggcgttccgtagttcggtggttaaaaaattccacacggcgcgtccggcaactccgcctgcgacagaggatcgtcaaaattccgaagtaggagacggagccgagcctcctcgattagctcctctgcagcaagcgccgtctaccttctcggaaccggtttgtttgccaccattgtcccacgcacaatatgtagcctcttcatctgaaacaccacctcaactaggcggtactccatccttcgttccgcctcctgagcaacaagtgcccgtgcagcctcaacaacatacgccccaaccgccacattcacaaatccatcctcaagctccaattcagcctcatacaccacatcaccaatccttcacgccacaacagcaaccaccaccgccacagcaatatgcaccaaacaccggtctcgacatgttaatacaagcgtcatcatctcacaacgcaccacccgcttcaggaccgccgatggaagcatatgggtactacaacgattacacaggcatggcattaaacgacggtttcgactcgaatttgcaaattatggttgatggcggtgctcgctggacagccatcgatgctaccagcgcgatttataatccttatggaaatatgccaggaccaatgacatagagaaaacttgggaaaaagacatgtattatgagcaatgcgcaaaagcttttgtatataaattgaagagtgggttgttgaacccataagtcattgctacgggcacttgggttttggtagatgggcaatctttggcatctcacgacggggctggcgatttggagtttatgagtcatgatttcccttttcttggtctctatgctatatacagcgcgatatggatgggaaatagtcggagcagggcgtctctgatatcatatatccattggtttacacttgatgttgagcgatttcctcttagctcttgaacacctcttaccttacttacccagttaagcgatacagctcaacccagtcgcaagggaatcgaactattttgaacctaca

SEQ ID NO: 7499 - DNA, 1584 bp, Muscodor strobelii
  misc_feature: SGI cDNA ID NO. 562265
  misc_feature: Encodes the peptide sequence at SEQ ID NO 7500
atggatcccctcatcgtatccgagctggccaagaacgatgatggtattccttttcgattcaagcaaggtcatgttcatagcacatgggcgaagacatttctctctcggcctgacctctatcttcaacccgagagtcttccggagatagagaagatcgtcaagttagctcaccgatgccatcgtcgtatcaccacgacaggatgtggtcattcgccgagctcattgacttgcacgtcatcatggctcgtcaacttggacaaattcaaccgcattctctcggtcgatgagaaaaccggcattgtcaccatgcaatcaggaattcgcctttaccaactctgcgaagaattagacaagtacggccttgccatgcctaatcttggaagtatcaatcagcaatccatcgctggtgcaatatcgactggcacccatggatcgactcttcgacatggcctcatgtccgaagacgtcctgtctctgcgcataaccactgccgatgggactacgcgattttgctcccccgacgagaattccgagctgttccgtgcttccctattatcactcggcgcattaggcatcatcaccgaggttaccttccgagccgttcctgagtttactctcaagtggcagcaggtgattgacactgatgtcaagatgctgaatgcatggaataaggatctttggacacatgccgaattcgtccgtgtttggtggtatccttacacacgtcgtgcggtagtctggtccgcagagaagacatctgagccgcctgccgatcctcttgtttcgtactatgatggcgcactaggttactatgtgtaccacaatttattgtaccttgctcagtatgtcccacgaattctaccctgggtagagtggttcgtcttcggcatgcagtatgggtttcccaacggctccaagaccggagctactcaaccgagccgcaaggcccttttgatgaactgcttgtactcacaatacgtgaatgagtgggcaataccactacacaagggccccgaagcgttgagaagattgagtagctgggtcaaccaacttccgccaactgacccggactatgtgccacacaatatcccattctccgctaagggactatgggtgcatgctccagttgaggtgcgagtctcgaacacttcgtcctcaaacccgaagtcaaacactcccaacagtcgaccatatctcgacccaacagacgaagatggtcctacgttatacctcaatgcaacactctacagaccctactaccatgacccgccctgccgtgcccgttattacgagggctttgagtacctgatgagagagcttggtggacgtcctcactgggccaagaatttcgatacggcgggagatgaacttgagagaatgtatggcaagaatatgcaacagtggcgagacgtccgacagagcgttgaccctgatggtgtattcgtaggagcatggcatcgcagacatgtcttaggaaatgggcctactttgctgaacgaagaaaccgacgctgggtcgactgagatttttgatcacgcgatcgaattccaaggtaaggttcaagcgacgaaggctgctttgtag

SEQ ID NO: 7500 - protein, 527 aa, Muscodor strobelii
  misc_feature: SGI Peptide ID NO. 562265
  misc_feature (196)..(489): Pfam Id: PF04030 Pfam Desc: D-arabinono-1,4-lactone oxidase
  misc_feature (37)..(172): Pfam Id: PF01565 Pfam Desc: FAD binding domain
  misc_feature (1)..(491): NCBI GI: 46128633 Blast Desc: FG08694.1 [Gibberella zeae PH-1]
  misc_feature (1)..(524): NCBI GI: 156031160 Blast Desc: SS1G_14188 [Sclerotinia sclerotiorum 1980] gi|154700579|gb|EDO00318.1| SS1G_14188 [Sclerotinia sclerotiorum 1980]
  misc_feature (1)..(505): NCBI GI: 154305755 Blast Desc: BC1G_07692 [Botryotinia fuckeliana B05.10] gi|150853211|gb|EDN28403.1| BC1G_07692 [Botryotinia fuckeliana B05.10]
  misc_feature (5)..(491): NCBI GI: 85117624 Blast Desc: NCU03188 [Neurospora crassa OR74A] gi|55976192|sp|Q7SGY1.1|ALO_NEUCR RecName: Full= D-arabinono-1,4-lactone oxidase; Short=ALO; AltName: oxidase
  misc_feature (5)..(494): NCBI GI: 39970445 Blast Desc: MGG_02689 [Magnaporthe grisea 70-15] gi|149209885|ref|XP_001522317.1| MGCH7_ch7g424 [Magnaporthe grisea 70-15] gi|86196379|gb|EAQ71017.1| MGCH7_ch7g424 grisea
  misc_feature (1)..(517): NCBI GI: 238844030 Blast Desc: D-arabinono-1,4-lactone oxidase [Microsporum canis CBS 113480]
  misc_feature (1)..(526): NCBI GI: 261189907 Blast Desc: sugar 1,4-lactone oxidase [Ajellomyces dermatitidis SLH14081] gi|239591600|gb|EEQ74181.1| sugar 1,4-lactone oxidase [Ajellomyces dermatitidis SLH14081] gi|239612872|gb|EEQ89859.1|
  misc_feature (2)..(491): NCBI GI: 212533477 Blast Desc: sugar 1,4-lactone oxidase, [Penicillium marneffei ATCC 18224] gi|210072259|gb|EEA26348.1| sugar 1,4-lactone oxidase, [Penicillium marneffei ATCC 18224]
  misc_feature (1)..(505): NCBI GI: 154282911 Blast Desc: conserved [Ajellomyces capsulatus NAm1] gi|150410431|gb|EDN05819.1| conserved [Ajellomyces capsulatus NAm1]
  misc_feature (1)..(505): NCBI GI: 240274675 Blast Desc: D-arabinono-1,4-lactone oxidase [Ajellomyces capsulatus H143]
  misc_feature (5)..(491): SWISSPROT Homolog: EC 1.1.3.37 D-arabinono-1,4-lactone oxidase
MDPLIVSELAKNDDGIPFRFKQGHVHSTWAKTFLSRPDLYLQPESLPEIEKIVKLAHRCHRRITTTGCGHSPSSLTCTSSWLVNLDKFNRILSVDEKTGIVTMQSGIRLYQLCEELDKYGLAMPNLGSINQQSIAGAISTGTHGSTLRHGLMSEDVLSLRITTADGTTRFCSPDENSELFRASLLSLGALGIITEVTFRAVPEFTLKWQQVIDTDVKMLNAWNKDLWTHAEFVRVWWYPYTRRAVVWSAEKTSEPPADPLVSYYDGALGYYVYHNLLYLAQYVPRILPWVEWFVFGMQYGFPNGSKTGATQPSRKALLMNCLYSQYVNEWAIPLHKGPEALRRLSSWVNQLPPTDPDYVPHNIPFSAKGLWVHAPVEVRVSNTSSSNPKSNTPNSRPYLDPTDEDGPTLYLNATLYRPYYHDPPCRARYYEGFEYLMRELGGRPHWAKNFDTAGDELERMYGKNMQQWRDVRQSVDPDGVFVGAWHRRHVLGNGPTLLNEETDAGSTEIFDHAIEFQGKVQATKAAL

SEQ ID NO: 7501 - DNA, 2076 bp, Muscodor strobelii
  misc_feature: SGI EST ID NO. CUFF.18548.0
  misc_feature: Variant of the nucleotide sequence at SEQ ID NO 7499
ctttaagctccatcccggtaagcagattctagaccccggtttgctcctcactgagttctctgatactgagacattttgttttcaccgtttcttttcaaattgtcccaagatgacgaagtgacgaacgtgcttttgcttccggattattaaaatctgaggcgtgcggatacaacggctaaaacttcaaattctcacgacgtggtttatcccggaggttccaggcgttcgttatctccgagcttgctttgacaagcatatatcaactgattgctctgtgccatggatcccctcatcgtatccgagctggccaagaacgatgatggtattccttttcgattcaagcaaggtcatgttcatagcacatgggcgaagacatttctctctcggcctgacctctatcttcaacccgagagtcttccggagatagagaagatcgtcaagttagctcaccgatgccatcgtcgtatcaccacgacaggatgtggtcattcgccgagctcattgacttgcacgtcatcatggctcgtcaacttggacaaattcaaccgcattctctcggtcgatgagaaaaccggcattgtcaccatgcaatcaggaattcgcctttaccaactctgcgaagaattagacaagtacggccttgccatgcctaatcttggaagtatcaatcagcaatccatcgctggtgcaatatcgactggcacccatggatcgactcttcgacatggcctcatgtccgaagacgtcctgtctctgcgcataaccactgccgatgggactacgcgattttgctcccccgacgagaattccgagctgttccgtgcttccctattatcactcggcgcattaggcatcatcaccgaggttaccttccgagccgttcctgagtttactctcaagtggcagcaggtgattgacactgatgtcaagatgctgaatgcatggaataaggatctttggacacatgccgaattcgtccgtgtttggtggtatccttacacacgtcgtgcggtagtctggtccgcagagaagacatctgagccgcctgccgatcctcttgtttcgtactatgatggcgcactaggttactatgtgtaccacaatttattgtaccttgctcagtatgtcccacgaattctaccctgggtagagtggttcgtcttcggcatgcagtatgggtttcccaacggctccaagaccggagctactcaaccgagccgcaaggcccttttgatgaactgcttgtactcacaatacgtgaatgagtgggcaataccactacacaagggccccgaagcgttgagaagattgagtagctgggtcaaccaacttccgccaactgacccggactatgtgccacacaatatcccattctccgctaagggactatgggtgcatgctccagttgaggtgcgagtctcgaacacttcgtcctcaaacccgaagtcaaacactcccaacagtcgaccatatctcgacccaacagacgaagatggtcctacgttatacctcaatgcaacactctacagaccctactaccatgacccgccctgccgtgcccgttattacgagggctttgagtacctgatgagagagcttggtggacgtcctcactgggccaagaatttcgatacggcgggagatgaacttgagagaatgtatggcaagaatatgcaacagtggcgagacgtccgacagagcgttgaccctgatggtgtattcgtaggagcatggcatcgcagacatgtcttaggaaatgggcctactttgctgaacgaagaaaccgacgctgggtcgactgagatttttgatcacgcgatcgaattccaaggtaaggttcaagcgacgaaggctgctttgtagattaaaagtctattacactcaacaaaacagcggaacatagcgaccacgtcacaagctctagttctctgaagctataggcgtggacaattagcattgtatttgattgcggctcggctacaaaaagagaataatatagttctgctggtaatggaacgaggcaacagcccgttactcgatccaaccaactcgagttaccgcattcaagactttttc

SEQ ID NO: 7502 - DNA, 2025 bp, Muscodor strobelii
  misc_feature: SGI cDNA ID NO. 562266
  misc_feature: Encodes the peptide sequence at SEQ ID NO 7503
atgttctatagccacgaaatagtcttaacgagccaccaatatggtgtggctactatttggctcgttgccaccattggcaacaagtcaacgacgagaaaagtgactcgcaaggctatccaggatgtcgacgttcagaaggcttgcggaaagatcctggagcctggcgcaccaattgctctgcgactgcagggcaatttgctatatggtgtctcacgagtatacaaccagcaatgcacatatcttgttaccgatcttaagaaggtgcaagacaacatgaatcttttcttcaagaccagcatcggaaaccagcttgatccagatgcagggcaaacaagaccagaaaatctcataatagaaaacgatcctgaatttgatccgagcatgcccattcccgatcttgatattgaaactctgttcgcgaatcaaagaagctcgcaaaagacttcttcacaaatgtctccctttgccagccagatttctcgtctgtcaaactcacacagtccgatgtcaggggcgttccaattggacgttagtcattcagtatcttctggccaaggaggatctccctttggtctagaaggcttgtcaggagcacacaagctggatgatgaacctctgatattcgatcaagaggaggacgtatttggcgctaatcaagattggggccttgagatggacgaagacggaaacctcatcccatccgcaggcgcgattgctattcacgaggatgaactacaacttccccctcttccacaaacacgaggtacaggcggtatgcaactcgacgcagcacatcctgacgcacaaccagaattctacgagcagcttgatattatcatgcaagaagatcccttgcctgaggccgagcctttccctgagcgtagaggagagcatgcaccgttccaaaatgacgaacatcctgccaggcaagcacaccaggcaccgggtcgcaagaggaagatcttcatggacacagagacccaagtctcaagacgtgctctccgcgattggcagagagactacctgagcctgtgtgggaagcacccggctcgtgctatcaccgcaggtaaagcaaagagaaacgcaatgatgctcacttttggtctgggacttggcaacatcggccagaatattggtgtgccgaacttcattcatcctttggccgtagagttttcaggtgataagttgttcactatgcttaccggagttgaagtagtggagaagcctcgtggtagacgtcgaaaggtgtcggaggccattgaagatgacgaggagcaagaagagcgacgcgtgaaacctcgactagagggcgaagaagagcaggaggagcaagacgagcaagcacgagcacagcaagacgacataattctcaatctcgacgatccatttgccgagagcgtgcttccagaagtgggcagagaggccgaacatcctatgtccgaccatatgtcttcttctctcatgccttggaaccgaaactcctcggtcgtaccaggctctgccattcgggctcctggctctgcccaacgtggtcgtgatctctctagcccgacaggcaagggcagtgacatgcaggatatcgtgcgctacagcgatgacggaccaatgggtggtgactatcctctgggatttggatcagcagattcatcatttgacggactggcactccctgatcgtgatatggaggcagaccatttcgaattgacggaagagcaggtgagagcacagaatgagagcatgaactcaatcctcgatatagagggacagaacttcatgaactacatgcaagaggctgtgaaggagaacggggaacgacgcatcgacgaagacttcgacattaatcgcaagtgggttgctttcgacgatattttcctgccgcgcacgacagcacgtgccaccgctgctcaggcgttctaccatacgctctgtcttgtcacaaagggtaagagttacgtcatgcaggatgacgcggacaagaagccgtttgggactatttgggtcggtacgagagtttctgaggaatga

SEQ ID NO: 7503 - protein, 674 aa, Muscodor strobelii
  misc_feature: SGI Peptide ID NO. 562266
  misc_feature (1)..(113): Pfam Id: PF04825 Pfam Desc: N terminus of Rad21 / Rec8 like protein
  misc_feature (1)..(674): NCBI GI: 256734077 Blast Desc: NECHADRAFT_91940 [Nectria haematococca mpVI 77-13-4]
  misc_feature (1)..(671): NCBI GI: 149209883 Blast Desc: MGCH7_ch7g423 [Magnaporthe grisea 70-15] gi|86196378|gb|EAQ71016.1| MGCH7_ch7g423 [Magnaporthe grisea 70-15]
  misc_feature (1)..(668): NCBI GI: 46128397 Blast Desc: FG08576.1 [Gibberella zeae PH-1]
  misc_feature (1)..(673): NCBI GI: 85117633 Blast Desc: NCU03190 [Neurospora crassa OR74A] gi|28927097|gb|EAA36054.1| [Neurospora crassa OR74A]
  misc_feature (1)..(673): NCBI GI: 123187104 Blast Desc: Rec8 [Sordaria macrospora]
  misc_feature (5)..(669): NCBI GI: 156056504 Blast Desc: SS1G_05606 [Sclerotinia sclerotiorum 1980] gi|154703388|gb|EDO03127.1| SS1G_05606 [Sclerotinia sclerotiorum 1980]
  misc_feature (21)..(671): NCBI GI: 261353660 Blast Desc: Rec8 [Verticillium albo-atrum VaMs.102]
  misc_feature (1)..(667): NCBI GI: 169609000 Blast Desc: SNOG_07585 [Phaeosphaeria nodorum SN15] gi|160701761|gb|EAT85051.2| SNOG_07585 [Phaeosphaeria nodorum SN15]
  misc_feature (68)..(671): NCBI GI: 116193163 Blast Desc: CHGG_06299 [Chaetomium globosum CBS 148.51] gi|88182212|gb|EAQ89680.1| CHGG_06299 [Chaetomium globosum CBS 148.51]
  misc_feature (1)..(656): NCBI GI: 255950894 Blast Desc: Pc22g23230 [Penicillium chrysogenum Wisconsin 54-1255] gi|211593231|emb|CAP99611.1| Pc22g23230 [Penicillium chrysogenum Wisconsin 54-1255]
MFYSHEIVLTSHQYGVATIWLVATIGNKSTTRKVTRKAIQDVDVQKACGKILEPGAPIALRLQGNLLYGVSRVYNQQCTYLVTDLKKVQDNMNLFFKTSIGNQLDPDAGQTRPENLIIENDPEFDPSMPIPDLDIETLFANQRSSQKTSSQMSPFASQISRLSNSHSPMSGAFQLDVSHSVSSGQGGSPFGLEGLSGAHKLDDEPLIFDQEEDVFGANQDWGLEMDEDGNLIPSAGAIAIHEDELQLPPLPQTRGTGGMQLDAAHPDAQPEFYEQLDIIMQEDPLPEAEPFPERRGEHAPFQNDEHPARQAHQAPGRKRKIFMDTETQVSRRALRDWQRDYLSLCGKHPARAITAGKAKRNAMMLTFGLGLGNIGQNIGVPNFIHPLAVEFSGDKLFTMLTGVEVVEKPRGRRRKVSEAIEDDEEQEERRVKPRLEGEEEQEEQDEQARAQQDDIILNLDDPFAESVLPEVGREAEHPMSDHMSSSLMPWNRNSSVVPGSAIRAPGSAQRGRDLSSPTGKGSDMQDIVRYSDDGPMGGDYPLGFGSADSSFDGLALPDRDMEADHFELTEEQVRAQNESMNSILDIEGQNFMNYMQEAVKENGERRIDEDFDINRKWVAFDDIFLPRTTARATAAQAFYHTLCLVTKGKSYVMQDDADKKPFGTIWVGTRVSEE

SEQ ID NO: 7504 - DNA, 1650 bp, Muscodor strobelii
  misc_feature: SGI cDNA ID NO. 562267
  misc_feature: Encodes the peptide sequence at SEQ ID NO 7505
atggagtcccttgatgaaaagccatgggatgtagtcatctgtggaacaggcttgccacagtcgctgcttgccctagctctgtcccggtcgaacaagcgtgtcctccatcttgatgccaacgacttctatggcgagcatgaagccgcgctgactctccaagaggccgacgcgtgggcgcagaagcatattgcaacaaacgtaatacctctgctgggcgccgctcccaattctctggatcctggacggaatgcagaagctgccacgacgaatgaatctacaaacgaagacgttgaatctgcgagtgcacttggagacgcgactctggacagtaccagcgcctctcaaaatcccagccccatcttccagaatgccagtatatggaaacatccagatgcacaggccgaaggactctcgtttccaagggcatattcacttgcattagctccccaggttatccacgcgagatcacaacttctgtcagaattagtttcctcgagggcatatcggcaagtggagttccttgcggtcggctcgttcttcgtctacgatgccacagataccgcctcaggagcccaacttgttcgcatacccagtagtcgtgaggatgtcttcgccgcacagaccatcccgtctcgctcaaagcgatcgttgatgaagtttctcaagttcgtggccgatttcgattcggacgagcaaacgtcagtctggcaagacaaagcaggcaagccactcgccgagttcgttttcgaggaattcaagcttgacgggactctgcgaaacagcgtcttggcactcacactgaccttggatggtcaggtgagcgtccagactggactcgcaacaatccagcgtcatttgacttcaataggactttttgggcctggctttgctgcagtgtatcccaagtggggtggcatctcagaaattgcacaggtaggatgtcgcgccggtgccgtaggtggcggtatttatatgcttgacacaagatcatcggtgaccgaaacaagcgacgacaatgaaatcgcactaagtctttcgaatggaatctctgtccgcacgtctgctcttgtcgactcacgacagacttcaacttcatcccgcaagattgcacgtctcgtggccgtagtgaaggcaacacttacctcgctattcggaacgctcgttgaaggagcaccgactcccgctgtcgcagtagctacatttccctctggtgctctgtcaaccatggccaagtctcattccagtgctcctgtttatgcatttgtgcactccagtgacaccggagagtgtccttctggccaatgcgtcatatacctgaccacacttgccagcccgcaagctaaaaacatccttgatacggctttggacgccctggtggaaaccacggacccctctgcaacatgtttgtacaagctttactacgagcaaactgccagcagccatgaattcgtgaatacaagtcaaggcaatgcatcggttttaacattcccatcaccatcactaagtctgtcatttgacgacgcgtgtctcgatgacgtgaagaaggcatggaagctcatcatgaaagaagatgcttcggatgacgagtacatggtgttcgaggaccgcgagggcgcagacgccgatgatgagaatgcgtatgatctatga

SEQ ID NO: 7505 - protein, 549 aa, Muscodor strobelii
  misc_feature: SGI Peptide ID NO. 562267
  misc_feature (4)..(534): Pfam Id: PF00996 Pfam Desc: GDP dissociation inhibitor
  misc_feature (4)..(54): Pfam Id: PF00996 Pfam Desc: GDP dissociation inhibitor
  misc_feature (1)..(545): NCBI GI: 171683895 Blast Desc: protein product [Podospora anserina] gi|170941908|emb|CAP67560.1| protein product [Podospora anserina]
  misc_feature (1)..(543): NCBI GI: 85117638 Blast Desc: NCU03191 [Neurospora crassa OR74A] gi|28927098|gb|EAA36055.1| conserved [Neurospora crassa OR74A]
  misc_feature (1)..(545): NCBI GI: 145610139 Blast Desc: MGG_12615 [Magnaporthe grisea 70-15] gi|149209881|ref|XP_001522315.1| MGCH7_ch7g422 [Magnaporthe grisea 70-15] gi|86196377|gb|EAQ71015.1| MGCH7_ch7g422 grisea
  misc_feature (1)..(533): NCBI GI: 256733574 Blast Desc: NECHADRAFT_77829 [Nectria haematococca mpVI 77-13-4]
  misc_feature (1)..(548): NCBI GI: 116193161 Blast Desc: CHGG_06298 [Chaetomium globosum CBS 148.51] gi|88182211|gb|EAQ89679.1| CHGG_06298 [Chaetomium globosum CBS 148.51]
  misc_feature (1)..(544): NCBI GI: 46128399 Blast Desc: FG08577.1 [Gibberella zeae PH-1]
  misc_feature (1)..(544): NCBI GI: 261353659 Blast Desc: rab proteins geranylgeranyltransferase component A [Verticillium albo-atrum VaMs.102]
  misc_feature (1)..(547): NCBI GI: 156056126 Blast Desc: SS1G_05415 [Sclerotinia sclerotiorum 1980] gi|154703199|gb|EDO02938.1| SS1G_05415 [Sclerotinia sclerotiorum 1980]
  misc_feature (1)..(543): NCBI GI: 154302260 Blast Desc: BC1G_09913 [Botryotinia fuckeliana B05.10] gi|150855402|gb|EDN30594.1| BC1G_09913 [Botryotinia fuckeliana B05.10]
  misc_feature (1)..(542): NCBI GI: 115386766 Blast Desc: conserved [Aspergillus terreus NIH2624] gi|114190922|gb|EAU32622.1| conserved [Aspergillus terreus NIH2624]
MESLDEKPWDVVICGTGLPQSLLALALSRSNKRVLHLDANDFYGEHEAALTLQEADAWAQKHIATNVIPLLGAAPNSLDPGRNAEAATTNESTNEDVESASALGDATLDSTSASQNPSPIFQNASIWKHPDAQAEGLSFPRAYSLALAPQVIHARSQLLSELVSSRAYRQVEFLAVGSFFVYDATDTASGAQLVRIPSSREDVFAAQTIPSRSKRSLMKFLKFVADFDSDEQTSVWQDKAGKPLAEFVFEEFKLDGTLRNSVLALTLTLDGQVSVQTGLATIQRHLTSIGLFGPGFAAVYPKWGGISEIAQVGCRAGAVGGGIYMLDTRSSVTETSDDNEIALSLSNGISVRTSALVDSRQTSTSSRKIARLVAVVKATLTSLFGTLVEGAPTPAVAVATFPSGALSTMAKSHSSAPVYAFVHSSDTGECPSGQCVIYLTTLASPQAKNILDTALDALVETTDPSATCLYKLYYEQTASSHEFVNTSQGNASVLTFPSPSLSLSFDDACLDDVKKAWKLIMKEDASDDEYMVFEDREGADADDENAYDL

SEQ ID NO: 7506 - DNA, 1807 bp, Muscodor strobelii
  misc_feature: SGI EST ID NO. CUFF.18574.1
  misc_feature: Variant of the nucleotide sequence at SEQ ID NO 7504
ctctcattttgtacactcttccaccaccattctcatgatggagtcccttgatgaaaagccatgggatgtagtcatctgtggaacaggcttgccacagtcgctgcttgccctcatcatcttgcgatgaagagctctgtcccggtcgaacaagcgtgtcctccatcttgatgccaacgacttctatggcgagcatgaagccgcgctgactctccaagaggccgacgcgtgggcgcagaagcatattgcaacaaacgtaatacctctgctgggcgccgctcccaattctctggatcctggacggaatgcagaagctgccacgacgaatgaatctacaaacgaagacgttgaatctgcgagtgcacttggagacgcgactctggacagtaccagcgcctctcaaaatcccagccccatcttccagaatgccagtatatggaaacatccagatgcacaggccgaaggactctcgtttccaagggcatattcacttgcattagctccccaggttatccacgcgagatcacaacttctgtcagaattagtttcctcgagggcatatcggcaagtggagttccttgcggtcggctcgttcttcgtctacgatgccacagataccgcctcaggagcccaacttgttcgcatacccagtagtcgtgaggatgtcttcgccgcacagaccatcccgtctcgctcaaagcgatcgttgatgaagtttctcaagttcgtggccgatttcgattcggacgagcaaacgtcagtctggcaagacaaagcaggcaagccactcgccgagttcgttttcgaggaattcaagcttgacgggactctgcgaaacagcgtcttggcactcacactgaccttggatggtcaggtgagcgtccagactggactcgcaacaatccagcgtcatttgacttcaataggactttttgggcctggctttgctgcagtgtatcccaagtggggtggcatctcagaaattgcacaggtaggatgtcgcgccggtgccgtaggtggcggtatttatatgcttgacacaagatcatcggtgaccgaaacaagcgacgacaatgaaatcgcactaagtctttcgaatggaatctctgtccgcacgtctgctcttgtcgactcacgacagacttcaacttcatcccgcaagattgcacgtctcgtggccgtagtgaaggcaacacttacctcgctattcggaacgctcgttgaaggagcaccgactcccgctgtcgcagtagctacatttccctctggtgctctgtcaaccatggccaagtctcattccagtgctcctgtttatgcatttgtgcactccagtgacaccggagagtgtccttctggccaatgcgtcatatacctgaccacacttgccagcccgcaagctaaaaacatccttgatacggctttggacgccctggtggaaaccacggacccctctgcaacatgtttgtacaagctttactacgagcaaactgccagcagccatgaattcgtgaatacaagtcaaggcaatgcatcggttttaacattcccatcaccatcactaagtctgtcatttgacgacgcgtgtctcgatgacgtgaagaaggcatggaagctcatcatgaaagaagatgcttcggatgacgagtacatggtgttcgaggaccgcgagggcgcagacgccgatgatgagaatgcgtatgatctatgatcattgcctaccaagcggcgattgtctacgcgctctgtatgtaatatgatgtagctttgcgtttacgatgcgatgagtaatgatacctaagttcgacctgac

SEQ ID NO: 7507 - DNA, 2112 bp, Muscodor strobelii
  misc_feature: SGI cDNA ID NO. 562268
  misc_feature: Reduced expression when VOC is produced
  misc_feature: Encodes the peptide sequence at SEQ ID NO 7508
atgccgtggtctagtttcacaatggccgcatggtcgcagcaccgcaccatgagcccctctccccagcgaactctgggccatctgcgctctctctccaccatgagcccctcgccgactacacccagccgttccaggtcgcccgccaagtctttctcgtcgtccaacgtcacagagatccagatcaccgcaccagcagacagcagcactctgtcaccaccgccccagccgagacggatgccttctgtgcaatcgttgatggaagacgctgatcatagcaccatccctgacccgcgacggcgcacgatgacaccggtcagcggctctgtcagtccggctctagctcatcacccagatctagaccaggaagtggctgccctcagtacgaagctcatcaacgctatcaatcactccacgatgctcgacgacaccctctccaccacgcggcaagaactcgacacctcgaaggaacggatacgcgaattggaagcgctcgttgagaggcaaaaggagactctatcgggcgatgtctgggtccagcgaaagaccgtcgaatcggaaaagagcagactattagggcgcattgcagatgagaagcacaaacgcaccgaggtggagaaggagaagaagaagatcgagcaggagctagagaacttgaccgtgtcactctttgaggaggcaaacaaaatggtcatcaccgccaaagaggacgccaaaagggagcaggatgtgctgatacggaagaacgatcaactcaaggcccagctcactgatacggaaggcttattgaaatcacagcaggaacaactagctcagcttaagctcgtcatggagcagatggctgatcaggacgaccatagcgggacgaccgcgccttcgtctccaggctttagcaaattcgacacgagagacgacgacactcagatatccgagggcacttcgcagcccggctccatggaatccattccgcccacctaccccacgaatttgccgcatttgctccaacctgtcttacggaatgacttgacatcctacgaggatttcctgtcacttatccagacctcgaagaggagctcgtctcggatttcgtcaggctcgtatggcggtctgccaatcttgagttttaacggcgctaccgccatcgccccaccatcgaatgcttccactgcatccttatctactgtaggaactccggcttcgacgactgtctcgccccaaacaccgaataccccagcttcgatgattagtgctggatcggcagtgtcatctaccccattaccgcctttgaaggaatcaaaattctacaagcgagttcttgccgaagatattgaacccacacttcgtctcgatatagcacctggtttatcatggctggctcggcgttcagtcctgagtgctatgaccgagggcaatctagtcgttgagcccattccagccaatggtccttttgcgtctattagcaagcctcagtattatccctgctcgctctgcggcgagtcgcgaaaagacgacacacatctacgaaaccaccgctttcgaaccaacgaatcagagtcggcacagcggtatcctctttgccaatattgtctcgctcgtgttcgctctacatgcgatttcttagtcttcttacggatggtcaaagatggacattggcgcgctgacaacagcgactcggaaaaggcagcatgggaagaaagtgtacggctgcgggatcagatgttctggtgccgcataggtggaggcgtagtgccaactcatagtacgcacacacaccacgcttctcttccagagaagactacggccgttgatactcaacaagcagtccgtctttctgaagaaggcagcctgaagaaggacaactcgaagctgcccgagggatccatcggatcagctagtaccatcaaagaagagcaatcttcaagggacgatgagacaccatccgttgaccaagtaagtgcagaggctgttcctgagacaggttcgaaaacatcacaacctgaaaaccagagcctagccactcctgccgtcaacacatcgacagagtctagcaaagatcgcggccaaaggctatctctgacaatccctggtgcgtttgacgacgctatatcaccataa

SEQ ID NO: 7508 - protein, 703 aa, Muscodor strobelii
  misc_feature: SGI Peptide ID NO. 562268
  misc_feature (184)..(293): Pfam Id: PF06428 Pfam Desc: GDP/GTP exchange factor Sec2p
  misc_feature (198)..(293): Pfam Id: PF06428 Pfam Desc: GDP/GTP exchange factor Sec2p
  misc_feature (5)..(695): NCBI GI: 46130664 Blast Desc: FG08936.1 [Gibberella zeae PH-1]
  misc_feature (3)..(591): NCBI GI: 116193833 Blast Desc: CHGG_06634 [Chaetomium globosum CBS 148.51] gi|88182547|gb|EAQ90015.1| CHGG_06634 [Chaetomium globosum CBS 148.51]
  misc_feature (3)..(577): NCBI GI: 171676235 Blast Desc: protein product [Podospora anserina] gi|170936183|emb|CAP60843.1| protein product [Podospora anserina]
  misc_feature (90)..(584): NCBI GI: 39970913 Blast Desc: MGG_02923 [Magnaporthe grisea 70-15] gi|149210423|ref|XP_001522586.1| MGCH7_ch7g686 [Magnaporthe grisea 70-15] gi|86196641|gb|EAQ71279.1| MGCH7_ch7g686 grisea
  misc_feature (115)..(583): NCBI GI: 164429547 Blast Desc: NCU01911 [Neurospora crassa OR74A] gi|157073523|gb|EAA36306.2| conserved [Neurospora crassa OR74A]
  misc_feature (79)..(583): NCBI GI: 156056569 Blast Desc: SS1G_04015 [Sclerotinia sclerotiorum 1980] gi|154701801|gb|EDO01540.1| SS1G_04015 [Sclerotinia sclerotiorum 1980]
  misc_feature (98)..(584): NCBI GI: 261353398 Blast Desc: conserved [Verticillium albo-atrum VaMs.102]
  misc_feature (92)..(583): NCBI GI: 225685250 Blast Desc: conserved [Paracoccidioides brasiliensis Pb03]
  misc_feature (92)..(583): NCBI GI: 226294584 Blast Desc: conserved [Paracoccidioides brasiliensis Pb18]
  misc_feature (83)..(584): NCBI GI: 240106214 Blast Desc: GDP/GTP exchange factor Sec2p family protein [Coccidioides posadasii C735 delta SOWgp]
  misc_feature: Useful for introducing or modulating the production of volatile compounds
MPWSSFTMAAWSQHRTMSPSPQRTLGHLRSLSTMSPSPTTPSRSRSPAKSFSSSNVTEIQITAPADSSTLSPPPQPRRMPSVQSLMEDADHSTIPDPRRRTMTPVSGSVSPALAHHPDLDQEVAALSTKLINAINHSTMLDDTLSTTRQELDTSKERIRELEALVERQKETLSGDVWVQRKTVESEKSRLLGRIADEKHKRTEVEKEKKKIEQELENLTVSLFEEANKMVITAKEDAKREQDVLIRKNDQLKAQLTDTEGLLKSQQEQLAQLKLVMEQMADQDDHSGTTAPSSPGFSKFDTRDDDTQISEGTSQPGSMESIPPTYPTNLPHLLQPVLRNDLTSYEDFLSLIQTSKRSSSRISSGSYGGLPILSFNGATAIAPPSNASTASLSTVGTPASTTVSPQTPNTPASMISAGSAVSSTPLPPLKESKFYKRVLAEDIEPTLRLDIAPGLSWLARRSVLSAMTEGNLVVEPIPANGPFASISKPQYYPCSLCGESRKDDTHLRNHRFRTNESESAQRYPLCQYCLARVRSTCDFLVFLRMVKDGHWRADNSDSEKAAWEESVRLRDQMFWCRIGGGVVPTHSTHTHHASLPEKTTAVDTQQAVRLSEEGSLKKDNSKLPEGSIGSASTIKEEQSSRDDETPSVDQVSAEAVPETGSKTSQPENQSLATPAVNTSTESSKDRGQRLSLTIPGAFDDAISP

SEQ ID NO: 7509 - DNA, 3210 bp, Muscodor strobelii
  misc_feature: SGI EST ID NO. CUFF.18914.1
  misc_feature: Variant of the nucleotide sequence at SEQ ID NO 7507
gccaacctttccagctccgagcctagctttcgccctctctctttaatcaatcacttcatcaattaaccaaccccggctcactgctccgtcacgtcttcccacttcattcgtctgagcactttcttgagcgcggccatccgttgcccaccggaaacagctataattcctacctcttcattcgtaatcttctcaggctttttttttgttgctctcgtcgccgaactctattcggataaaaagtctcccaagccacgaacattgcgccgaacactgcgccactaagacgactaagacgactaagacattgtccgccgttcgccgataccgacgaccttaattgcacgaacaaacaaacagtctcacctcgattccacctactcttcctgacgaatagacttttcttttgcacatttccattggctcccggagcctcgtctgggcaaacagtctcaaatgtgcctagtcgaaatcgattcacagccgtaacggatcgctgctgcgtctttgggccaccgaggtccaccagtcgtcaagctggattctttcacaatggccgcatggtcgcagcaccgcaccatgagcccctctccccagcgaactctgggccatctgcgctctctctccaccatgagcccctcgccgactacacccagccgttccaggtcgcccgccaagtctttctcgtcgtccaacgtcacagagatccagatcaccgcaccagcagacagcagcactctgtcaccaccgccccagccgagacggatgccttctgtgcaatcgttgatggaagacgctgatcatagcaccatccctgacccgcgacggcgcacgatgacaccggtcagcggctctgtcagtccggctctagctcatcacccagatctagaccaggaagtggctgccctcagtacgaagctcatcaacgctatcaatcactccacgatgctcgacgacaccctctccaccacgcggcaagaactcgacacctcgaaggaacggatacgcgaattggaagcgctcgttgagaggcaaaaggagactctatcgggcgatgtctgggtccagcgaaagaccgtcgaatcggaaaagagcagactattagggcgcattgcagatgagaagcacaaacgcaccgaggtggagaaggagaagaagaagatcgagcaggagctagagaacttgaccgtgtcactctttgaggaggcaaacaaaatggtcatcaccgccaaagaggacgccaaaagggagcaggatgtgctgatacggaagaacgatcaactcaaggcccagctcactgatacggaaggcttattgaaatcacagcaggaacaactagctcagcttaagctcgtcatggagcagatggctgatcaggacgaccatagcgggacgaccgcgccttcgtctccaggctttagcaaattcgacacgagagacgacgacactcagatatccgagggcacttcgcagcccggctccatggaatccattccgcccacctaccccacgaatttgccgcatttgctccaacctgtcttacggaatgacttgacatcctacgaggatttcctgtcacttatccagacctcgaagaggagctcgtctcggatttcgtcaggctcgtatggcggtctgccaatcttgagttttaacggcgctaccgccatcgccccaccatcgaatgcttccactgcatccttatctactgtaggaactccggcttcgacgactgtctcgccccaaacaccgaataccccagcttcgatgattagtgctggatcggcagtgtcatctaccccattaccgcctttgaaggaatcaaaattctacaagcgagttcttgccgaagatattgaacccacacttcgtctcgatatagcacctggtttatcatggctggctcggcgttcagtcctgagtgctatgaccgagggcaatctagtcgttgagcccattccagccaatggtccttttgcgtctattagcaagcctcagtattatccctgctcgctctgcggcgagtcgcgaaaagacgacacacatctacgaaaccaccgctttcgaaccaacgaatcagagtcggcacagcggtatcctctttgccaatattgtctcgctcgtgttcgctctacatgcgatttcttagtcttcttacggatggtcaaagatggacattggcgcgctgacaacagcgactcggaaaaggcagcatgggaagaaagtgtacggctgcgggatcagatgttctggtgccgcataggtggaggcgtagtgccaactcatagtacgcacacacaccacgcttctcttccagagaagactacggccgttgatactcaacaagcagtccgtctttctgaagaaggcagcctgaagaaggacaactcgaagctgcccgagggatccatcggatcagctagtaccatcaaagaagagcaatcttcaagggacgatgagacaccatccgttgaccaagtaagtgcagaggctgttcctgagacaggttcgaaaacatcacaacctgaaaaccagagcctagccactcctgccgtcaacacatcgacagagtctagcaaagatcgcggccaaaggctatctctgacaatccctggtgcgtttgacgacgctatatcaccataaacaagtcgcagtcccaagcggtctccaatttttcaacaagcggacgacttctatcagaagcctattctacatattttatttctccaattttatttctcaggccgaatacgtggccaataatgtacaatatttagtcatcacgagaaactattctcgattacacggcggggctcatggttcatctaccattaagcattactatggaaaacggcgttcgggcatgcattacagagtctactactacgactcctactactgctacaggccggagagggcaagcatactagttcggtatgaaagacagatatgctgtcgaagtaagggtctctttggattatctttggaattagttgcattttgcggggccagggcacaaggagtcgcggggatgaggaaatggcaacgcagaaacggatcgagttgtcgcgcgtgacattaaaagggacaagcatggcgcgattgtgggcttcatccagagtcagtagactgagcgggcgcactgcgcatattaggtgatggtaatgtgttctacaagagcgttaatgaaaataattcattttctatgtgcat

SEQ ID NO: 7510 - DNA, 2547 bp, Muscodor strobelii
  misc_feature: SGI cDNA ID NO. 562269
  misc_feature: Encodes the peptide sequence at SEQ ID NO 7511
atggccaagtcgaataccgacatggatgactctgagtttcagagtagagctcacaaagcactcgggctaggcttgcaggcagcaccgctcgtgagagtagagggcgatatgggttcggatacaagagactggaatcatgtcgtcttcattgcttctattgtgaatcatgatatcttcactcgcaatctcaataaatcgcgagtaaagggatcaaagaggctcgaggaaggtcaggcaggggctggaccatctgataatgaggagcatgagaacaaccctgacgtcgttgactcccaaccaaaacaaattcaagtgtcgttaaacatccaccctgataacttacctactaaagataattgtcgttgttcgagcttgtccaggctactcggtgaagcgcttcaagattcaacacaagaatatgcatcccaaactgctagctcaagccagaggaaagttcgttgggaaccgacaatacccgatgctcttctaggcgtatatgttggctgtccattctgcagtttcatcgcggagagatttttcgaaagcccaggcttcgtgatgaaatgcgcgtacattcctgaacaacgatggtacgcagacgagtcacagtttgaggaaaagcggatggatattataaagcgatgcggaaccaatcaatattattttggagatcgcgcgatcccgttcaacgtcgaattcgcaagcgggttgatcgattctttgaggttcgagatcgaccctgattgggctggcgagaatatcgagcatgcgatggggctgaatctttatgggtttaggttgctcgcttttgcgaagcatgatgataaacttgcaccgttcaccaagttgcgacccgcggatgcgacgccgacttctgacgcgagctttaagacagttctatcttggctcaaaaactgtgatgagaaccacggtgatatctgtagatcaaacaaagacggcaaggaatcgccactaccgacgagggtcattgacgtttcggggggaacgcatctgcgtcttcatgtcagctcgcccggcgagacaggcaaatttgctgcgctgacttactgctggggctcaagtctggccttcatgacaacgcaacagaagttcaacctacttcaagacgggtttgacgtatcggatcttccagcaactcttcaagacgctgtccaagtcgcgcagaaactcaatattcagtatctttgggtcgacgcactgtgtattatacaagattctgaagacgacaagaggcaggagattagcaaagtcggccaaacttacaaatcggcgtatctgacaatctctgcttcagctgggaagacagctaatacgggctttctacgcgatcatgcggatccaatcacaggtgtctccagaagcctctttcctctacagatccagttcccaaaagccagtgagacagagagcgatggtcgcggaactttgtggctctctgacgacatattcgatctgataggtctaaatgcagatccagtttcagagcgcgcgtggtgtctacaagaacgagtcctgtcaacacgaacaatcgcctacggtcgctatcccgtctggtcgtgcaaccagctgacttgcgcagatggtggtccagagctcacaagtgatgttctcggagcgcaatacgatcggactctcagccggctcattttggcgacggagaacgagccacataacacacttactgaaactgaagacttaaccgagtcctacgaatctcatcaagatttattcacagcttggtatcgatttatcggcgactacactcgcagagcattgacacacgaagaagatagactagcggctatcggcggtctagcagcagagatcacgaaaatcacacaccagcgatacgtatcagggctttgggaatcagatatgctcacaggcatgctatggaagaacaaagacacggtaggagaatgggaagctcgagcggctgtccagcgcgccccgacgtggtcgtgggctggtgtggagctcgcgaagatcgaaagcgacactgcgagtcttacaagctctgatgctggcttcgtgggagtcgcatcaccctgcgagatccagatacacggtccagtcaagaagatgtcgaagaaggcattcgtcacgttctggaaagcggcgtctatgaatcctgcgtttactacggaggatatgaatactacgatactcggccagtttcagtcagggaactcgcggggtgataagaaagaagattcatccgataaatcgcaagcaaaggaaggtagttcggaagtgaaagataaaagggacgagagtcgggaaaagaagattgagaattcggttcaggggttgggtcaactctacttgatgatactatgtagctacatcatccccgaggacgagccaaaaggtggtaggatgtggtatgcgggtatctggttgagtgagacgagcacagaaggtttttttgagcgtgttgctatgtttgagatgaagaatgcgagtgagacgggtgttgatgatgttattgcgagttgggagaggaggtcagtcaggattatttga

SEQ ID NO: 7511 - protein, 848 aa, Muscodor strobelii
  misc_feature: SGI Peptide ID NO. 562269
  misc_feature (351)..(509): Pfam Id: PF06985 Pfam Desc: Heterokaryon incompatibility protein (HET)
  misc_feature (351)..(445): Pfam Id: PF06985 Pfam Desc: Heterokaryon incompatibility protein (HET)
  misc_feature (265)..(676): NCBI GI: 256728256 Blast Desc: NECHADRAFT_87861 [Nectria haematococca mpVI 77-13-4]
  misc_feature (273)..(666): NCBI GI: 238502093 Blast Desc: conserved [Aspergillus flavus NRRL3357] gi|220691090|gb|EED47438.1| conserved [Aspergillus flavus NRRL3357]
  misc_feature (280)..(718): NCBI GI: 39969899 Blast Desc: MGG_10558 [Magnaporthe grisea 70-15] gi|149209225|ref|XP_001521987.1| MGCH7_ch7g105 [Magnaporthe grisea 70-15] gi|86196060|gb|EAQ70698.1| MGCH7_ch7g105 grisea
  misc_feature (271)..(666): NCBI GI: 256723310 Blast Desc: NECHADRAFT_86482 [Nectria haematococca mpVI 77-13-4]
  misc_feature (292)..(666): NCBI GI: 238494670 Blast Desc: conserved [Aspergillus flavus NRRL3357] gi|220695221|gb|EED51564.1| conserved [Aspergillus flavus NRRL3357]
  misc_feature (292)..(666): NCBI GI: 169777515 Blast Desc: [Aspergillus oryzae RIB40] gi|83771960|dbj|BAE62090.1| protein product [Aspergillus oryzae]
  misc_feature (270)..(666): NCBI GI: 256723935 Blast Desc: NECHADRAFT_78444 [Nectria haematococca mpVI 77-13-4]
  misc_feature (283)..(666): NCBI GI: 256720767 Blast Desc: NECHADRAFT_85408 [Nectria haematococca mpVI 77-13-4]
  misc_feature (266)..(759): NCBI GI: 46115654 Blast Desc: FG03669.1 [Gibberella zeae PH-1]
  misc_feature (290)..(663): NCBI GI: 256724255 Blast Desc: NECHADRAFT_87557 [Nectria haematococca mpVI 77-13-4]
MAKSNTDMDDSEFQSRAHKALGLGLQAAPLVRVEGDMGSDTRDWNHVVFIASIVNHDIFTRNLNKSRVKGSKRLEEGQAGAGPSDNEEHENNPDVVDSQPKQIQVSLNIHPDNLPTKDNCRCSSLSRLLGEALQDSTQEYASQTASSSQRKVRWEPTIPDALLGVYVGCPFCSFIAERFFESPGFVMKCAYIPEQRWYADESQFEEKRMDIIKRCGTNQYYFGDRAIPFNVEFASGLIDSLRFEIDPDWAGENIEHAMGLNLYGFRLLAFAKHDDKLAPFTKLRPADATPTSDASFKTVLSWLKNCDENHGDICRSNKDGKESPLPTRVIDVSGGTHLRLHVSSPGETGKFAALTYCWGSSLAFMTTQQKFNLLQDGFDVSDLPATLQDAVQVAQKLNIQYLWVDALCIIQDSEDDKRQEISKVGQTYKSAYLTISASAGKTANTGFLRDHADPITGVSRSLFPLQIQFPKASETESDGRGTLWLSDDIFDLIGLNADPVSERAWCLQERVLSTRTIAYGRYPVWSCNQLTCADGGPELTSDVLGAQYDRTLSRLILATENEPHNTLTETEDLTESYESHQDLFTAWYRFIGDYTRRALTHEEDRLAAIGGLAAEITKITHQRYVSGLWESDMLTGMLWKNKDTVGEWEARAAVQRAPTWSWAGVELAKIESDTASLTSSDAGFVGVASPCEIQIHGPVKKMSKKAFVTFWKAASMNPAFTTEDMNTTILGQFQSGNSRGDKKEDSSDKSQAKEGSSEVKDKRDESREKKIENSVQGLGQLYLMILCSYIIPEDEPKGGRMWYAGIWLSETSTEGFFERVAMFEMKNASETGVDDVIASWERRSVRII

SEQ ID NO: 7512 - DNA, 3311 bp, Muscodor strobelii
  misc_feature: SGI EST ID NO. CUFF.18576.0
  misc_feature: Variant of the nucleotide sequence at SEQ ID NO 7510
tggcacagcatccgagccctctcagccgtcccagttgatcgaatctttaggtatcaatcaagtgattcttctgtgagctcttggcgaaattgcctctggttgagtgaagcaaggcaagtgatgagacgcggaagtgcggtgcagatacggatcggacgtattgaggtgaggcaagccaagccaaggtgaggcatccaattgggcaccgatctaccgggtaggcagtatcgacaggggttaagctatgccaataactactagccaccacttgaccactactactattcactgactagactaaattctcttcgaaacatagatgatattcactttattgggttcattagatcttcttctgtctctcggtttattcaagtcagatagttctttcgttccatcgaccttcctcgctaagcagactctctcggtgacaaacctccaactctccactttacaaatcgcctggtagatgattgagtcttgcggtccagaagaataaaatggccaagtcgaataccgacatggatgactctgagtttcagagtagagctcacaaagcactcgggctaggcttgcaggcagcaccgctcgtgagagtagagggcgatatgggttcggatacaagagactggaatcatgtcgtcttcattgcttctattgtgaatcatgatatcttcactcgcaatctcaataaatcgcgagtaaagggatcaaagaggctcgaggaaggtcaggcaggggctggaccatctgataatgaggagcatgagaacaaccctgacgtcgttgactcccaaccaaaacaaattcaagtgtcgttaaacatccaccctgataacttacctactaaagataattgtcgttgttcgagcttgtccaggctactcggtgaagcgcttcaagattcaacacaagaatatgcatcccaaactgctagctcaagccagaggaaagttcgttgggaaccgacaatacccgatgctcttctaggcgtatatgttggctgtccattctgcagtttcatcgcggagagatttttcgaaagcccaggcttcgtgatgaaatgcgcgtacattcctgaacaacgatggtacgcagacgagtcacagtttgaggaaaagcggatggatattataaagcgatgcggaaccaatcaatattattttggagatcgcgcgatcccgttcaacgtcgaattcgcaagcgggttgatcgattctttgaggttcgagatcgaccctgattgggctggcgagaatatcgagcatgcgatggggctgaatctttatgggtttaggttgctcgcttttgcgaagcatgatgataaacttgcaccgttcaccaagttgcgacccgcggatgcgacgccgacttctgacgcgagctttaagacagttctatcttggctcaaaaactgtgatgagaaccacggtgatatctgtagatcaaacaaagacggcaaggaatcgccactaccgacgagggtcattgacgtttcggggggaacgcatctgcgtcttcatgtcagctcgcccggcgagacaggcaaatttgctgcgctgacttactgctggggctcaagtctggccttcatgacaacgcaacagaagttcaacctacttcaagacgggtttgacgtatcggatcttccagcaactcttcaagacgctgtccaagtcgcgcagaaactcaatattcagtatctttgggtcgacgcactgtgtattatacaagattctgaagacgacaagaggcaggagattagcaaagtcggccaaacttacaaatcggcgtatctgacaatctctgcttcagctgggaagacagctaatacgggctttctacgcgatcatgcggatccaatcacaggtgtctccagaagcctctttcctctacagatccagttcccaaaagccagtgagacagagagcgatggtcgcggaactttgtggctctctgacgacatattcgatctgataggtctaaatgcagatccagtttcagagcgcgcgtggtgtctacaagaacgagtcctgtcaacacgaacaatcgcctacggtcgctatcccgtctggtcgtgcaaccagctgacttgcgcagatggtggtccagagctcacaagtgatgttctcggagcgcaatacgatcggactctcagccggctcattttggcgacggagaacgagccacataacacacttactgaaactgaagacttaaccgagtcctacgaatctcatcaagatttattcacagcttggtatcgatttatcggcgactacactcgcagagcattgacacacgaagaagatagactagcggctatcggcggtctagcagcagagatcacgaaaatcacacaccagcgatacgtatcagggctttgggaatcagatatgctcacaggcatgctatggaagaacaaagacacggtaggagaatgggaagctcgagcggctgtccagcgcgccccgacgtggtcgtgggctggtgtggagctcggtgtgcattatccgcgtttttggtcatcgatcagaaaatacagaagaaggacatagcgaagatcgaaagcgacactgcgagtcttacaagctctgatgctggcttcgtgggagtcgcatcaccctgcgagatccagatacacggtccagtcaagaagatgtcgaagaaggcattcgtcacgttctggaaagcggcgtctatgaatcctgcgtttactacggaggatatgaatactacgatactcggccagtttcagtcagggaactcgcggggtgataagaaagaagattcatccgataaatcgcaagcaaaggaaggtagttcggaagtgaaagataaaagggacgagagtcgggaaaagaagattgagaattcggttcaggggttgggtcaactctacttgatgatactatgtagctacatcatccccgaggacgagccaaaaggtggtaggatgtggtatgcgggtatctggttgagtgagacgagcacagaaggtttttttgagcgtgttgctatgtttgagatgaagaatgcgagtgagacgggtgttgatgatgttattgcgagttgggagaggaggtcagtcaggattatttgagtgtgtgtaagaataatattacgttttgtattgccatgctgaaatcaggaagctgtggcatcagttgtgtatatagccaaacaagcaagagcgatatggttctaccttctctcacggggaaatagcaccatgaagtcgcgacaccaatatacacgattaaacactatcaaccacttggcgtggaatatcactgaccatagtaccaaga

SEQ ID NO: 7513 - DNA, 1956 bp, Muscodor strobelii
  misc_feature: SGI cDNA ID NO. 562270
  misc_feature: Encodes the peptide sequence at SEQ ID NO 7514
atggcagcatctcagccagagaccgactactatccaattcagctcggagtctggaccaattggtctcgtggtcaagtgcttgggtccacgttgaccttgaagcgacaacaaggcgatctcctcatcgctttcaccgcggtcttcattgcatttgtatcaacccgcggatggaagatagtggcatttgcatttcatcgatctttctcgtcaccggacccgcggaacgcagtctatcatcagcatcaagccattctgcggaactcctctgatccagaaagcagtctgcatcggatagcacacctgctatgggtcaatcgaaccaaaagcgtacaacttgcacctctactgactctgcttgttgctgcgatctatactctagggtttgctgtcgcagggggattttcgtcccaaatatccactgctattggatccgaagttctcgtgcaagctatgcattgtggtacagacggcactgcgtatacccttgacgatatatttgtcttagttcctcttaaagccgagcgcatcaacaatgcagccaattatgctcaacaatgttactcaaacaacaagaccgggattctgaattgtggaagtttcgtgaataacagaatactaacatccatagatactcatgccgactgtccttttcaagaagatatgtgtgcactacagtcaaccaacttgcgcattgattctggctatatcaatagccatatccacctcggtctcaatgcgcccgtaaatgagagaatgcactatggcaatattactacaagtacggggacgaaagactacatggccacagccaagtccgttgaagatcaatactcatacatactgtccactgagactcgcgctacagccttcaactatttactagatgcaggaactgtagccgtgagagacagggcagtcaatccgtctgcatcggcttttataccgatcaactcaatctttcgcgatgatgccgacctcgagttcatttttcttgcgggcaacggtgttctccacacatccccatcggatgacgcgtggtatcgagtgtcacccaccctgtcacatgtcggtacagcagctggtcaggaagaaggcaaacagacgtactatccgccactggaggctgcatcgcctttgggttgcacactacaatggcaattctgtggtaataccacagagaactgtgggcgtcttggcagtttttacgatgccatatcggatgccgcacccttattcaataccacatacgaagagattgcaagttcaaatgaccttagtgacattgccaccaggttccgttatttccgtaacactgtcggaaatgagaccatactcgatgatattcttgtgcaaatgggaccgacaatcctggcgtcgcagacctctgtgatcggatctcatcaaggcccattaccagccgaccagtggcaacaggacgttattcgcatgttcgacatagtgttggcgtctattcaactacggtttctgaacaccgtatatttcaatccaactgatcgccaactatttaaactacacgaagattacaacacaacagaggaacagagactatgtcgtaaccagaaaatgcgaagtaccgctcatagctccttcagcgtctttgggctagtattcatcttcatcattggtttcctaatcatcacgacatcgtacgtcttggagcccgccgcgcagcttctctacaaactcggctacgatagatatgcttatctagaatggatgagccacgggaccttgcagctgcagcgactagttcacgaagaattaggattcgggacttggtccaagggcagagatgaggtgccagtgacgcagccgggcgaattcttgggctgcctagacattagcaatccggatcatcccgttctgagctcgccatgtgcactgcgagactcggcggaagcgctgtccttgccctgcgcgagcgagaacaagtga

SEQ ID NO: 7514 - protein, 651 aa, Muscodor strobelii
  misc_feature: SGI Peptide ID NO. 562270
  misc_feature (8)..(632): NCBI GI: 189194015 Blast Desc: conserved [Pyrenophora tritici-repentis Pt-1C-BFP] gi|187978910|gb|EDU45536.1| conserved [Pyrenophora tritici-repentis Pt-1C-BFP]
  misc_feature (8)..(627): NCBI GI: 169615058 Blast Desc: SNOG_10683 [Phaeosphaeria nodorum SN15] gi|111060957|gb|EAT82077.1| SNOG_10683 [Phaeosphaeria nodorum SN15]
  misc_feature (13)..(629): NCBI GI: 115399382 Blast Desc: [Aspergillus terreus NIH2624] gi|114192163|gb|EAU33863.1| [Aspergillus terreus NIH2624]
  misc_feature (13)..(616): NCBI GI: 119474227 Blast Desc: NFIA_004500 [Neosartorya fischeri NRRL 181] gi|119407142|gb|EAW17092.1| conserved [Neosartorya fischeri NRRL 181]
  misc_feature (13)..(637): NCBI GI: 70986226 Blast Desc: conserved [Aspergillus fumigatus Af293] gi|66846236|gb|EAL86569.1| conserved [Aspergillus fumigatus Af293]
  misc_feature (13)..(637): NCBI GI: 159128250 Blast Desc: conserved [Aspergillus fumigatus A1163]
  misc_feature (13)..(608): NCBI GI: 169772941 Blast Desc: [Aspergillus oryzae RIB40] gi|83768800|dbj|BAE58937.1| protein product [Aspergillus oryzae]
  misc_feature (8)..(597): NCBI GI: 121699395 Blast Desc: ACLA_082720 [Aspergillus clavatus NRRL 1] gi|119396149|gb|EAW06581.1| ACLA_082720 [Aspergillus clavatus NRRL 1]
  misc_feature (11)..(617): NCBI GI: 46116086 Blast Desc: FG03885.1 [Gibberella zeae PH-1]
  misc_feature (16)..(634): NCBI GI: 256723662 Blast Desc: NECHADRAFT_86728 [Nectria haematococca mpVI 77-13-4]
MAASQPETDYYPIQLGVWTNWSRGQVLGSTLTLKRQQGDLLIAFTAVFIAFVSTRGWKIVAFAFHRSFSSPDPRNAVYHQHQAILRNSSDPESSLHRIAHLLWVNRTKSVQLAPLLTLLVAAIYTLGFAVAGGFSSQISTAIGSEVLVQAMHCGTDGTAYTLDDIFVLVPLKAERINNAANYAQQCYSNNKTGILNCGSFVNNRILTSIDTHADCPFQEDMCALQSTNLRIDSGYINSHIHLGLNAPVNERMHYGNITTSTGTKDYMATAKSVEDQYSYILSTETRATAFNYLLDAGTVAVRDRAVNPSASAFIPINSIFRDDADLEFIFLAGNGVLHTSPSDDAWYRVSPTLSHVGTAAGQEEGKQTYYPPLEAASPLGCTLQWQFCGNTTENCGRLGSFYDAISDAAPLFNTTYEEIASSNDLSDIATRFRYFRNTVGNETILDDILVQMGPTILASQTSVIGSHQGPLPADQWQQDVIRMFDIVLASIQLRFLNTVYFNPTDRQLFKLHEDYNTTEEQRLCRNQKMRSTAHSSFSVFGLVFIFIIGFLIITTSYVLEPAAQLLYKLGYDRYAYLEWMSHGTLQLQRLVHEELGFGTWSKGRDEVPVTQPGEFLGCLDISNPDHPVLSSPCALRDSAEALSLPCASENK

SEQ ID NO: 7515 - DNA, 1317 bp, Muscodor strobelii
  misc_feature: SGI EST ID NO. CUFF.18591.0
  misc_feature: Variant of the nucleotide sequence at SEQ ID NO 7513
gttcaatgtggccaacacctaaattgcttcccagtgcaggaactgtagccgtgagagacagggcagtcaatccgtctgcatcggcttttataccgatcaactcaatctttcgcgatgatgccgacctcgagttcatttttcttgcgggcaacggtgttctccacacatccccatcggatgacgcgtggtatcgagtgtcacccaccctgtcacatgtcggtacagcagctggtcaggaagaaggcaaacagacgtactatccgccactggaggctgcatcgcctttgggttgcacactacaatggcaattctgtggtaataccacagagaactgtgggcgtcttggcagtttttacgatgccatatcggatgccgcacccttattcaataccacatacgaagagattgcaagttcaaatgaccttagtgacattgccaccaggttccgttatttccgtaacactgtcggaaatgagaccatactcgatgatattcttgtgcaaatgggaccgacaatcctggcgtcgcagacctctgtgatcggatctcatcaaggcccattaccagccgaccagtggcaacaggacgttattcgcatgttcgacatagtgttggcgtctattcaactacggtttctgaacaccgtatatttcaatccaactgatcgccaactatttaaactacacgaagattacaacacaacagaggaacagagactatgtcgtaaccagaaaatgcgaagtaccgctcatagctccttcagcgtctttgggctagtattcatcttcatcattggtttcctaatcatcacgacatcgtacgtcttggagcccgccgcgcagcttctctacaaactcggctacgatagatatgcttatctagaatggatgagccacgggaccttgcagctgcagcgactagttcacgaagaattaggattcgggacttggtccaagggcagagatgaggtgccagtgacgcagccgggcgaattcttgggctgcctagacattagcaatccggatcatcccgttctgagctcgccatgtgcactgcgagactcggcggaagcgctgtccttgccctgcgcgagcgagaacaagtgattggccatgtgttagtcgatagagagtttggtgcgagtcttaaggcatcggatatctgcttgcgctcaggggtttattgcgagctgggcgcgaagaaagatcattcgaatacatatgctgctgctttgacataggggggcgccttatctaccacttcgaactttccttactttgcgtacctacaaattctctatacgaaactagtttttta

SEQ ID NO: 7516 - DNA, 1044 bp, Muscodor strobelii
  misc_feature: SGI cDNA ID NO. 562271
  misc_feature: Encodes the peptide sequence at SEQ ID NO 7517
atggcgacagacgcctcgtcgacgctatcgagcgccgcattcgccaagctatcaccgcacccttacttggtcgccagcctccaagcttcgtcgcccgcaaaacgcatcaacggccgcagcccaacccacgccagacccctcgccgttaacagatcttcgctcgcccacgcccacggtagcgccgtcgtacgtcagggcgacaccaccgtcatctgcggcgtgcgaggcgagacgctactcacttcccagatccccaactatcgtacctccctcttcggcggcgacgccacgggcagcaccgatgagctgcgcgactacgacctcctcgttcccaacatcgagttggccactggctgtgcccccgagttcctgcccggcgtaccacccaccacactggcacagactctgagcacgcgtatctactctctcctccacagctccggcattatcaatgtggaggacttgaggatatacaaccaagttgaagcctcgacagagacaaccgacgatgacgacatgcaagacgccgatgctgatgctgatgctcccgcaaaagaagtcaaggcttattgggtcttgtacatcgatctgctgttcgtctccttagacggcaaccccttcgacgctgcctgggccgctgtcctcgccgctttgcgccagacgaagctaccacatgcctactgggatgcagatcgcgagatggttttatgttcacggaagactcccccgacacctctatctgtatccgggctgccggtagcctgttcggctgccatattcactgccagagagaaactcaagcagatccagagtcggaaggccggtggtgacaatggcgaattttggatcctcgtcgaccctgatcgttttgaggagagtttgtgtgatgaacttgtgacggttgtagtcgattgctcagaaggcgacgagacgaagatcttgggtctctccaaaagcggtgggattattgttggaccggacatcatcaagagatttgtcagagtggctgaggaacgttggcaagagctcaaaactgtattatga

SEQ ID NO: 7517 - protein, 347 aa, Muscodor strobelii
  misc_feature: SGI Peptide ID NO. 562271
  misc_feature (43)..(224): Pfam Id: PF01138 Pfam Desc: 3' exoribonuclease family, domain 1
  misc_feature (43)..(78): Pfam Id: PF01138 Pfam Desc: 3' exoribonuclease family, domain 1
  misc_feature (191)..(224): Pfam Id: PF01138 Pfam Desc: 3' exoribonuclease family, domain 1
  misc_feature (3)..(347): NCBI GI: 39970415 Blast Desc: MGG_02674 [Magnaporthe grisea 70-15] gi|149209849|ref|XP_001522299.1| MGCH7_ch7g406 [Magnaporthe grisea 70-15] gi|86196361|gb|EAQ70999.1| MGCH7_ch7g406 grisea
  misc_feature (6)..(344): NCBI GI: 149274422 Blast Desc: [Mus musculus]
  misc_feature (6)..(344): NCBI GI: 85113698 Blast Desc: NCU03159 [Neurospora crassa OR74A] gi|28926352|gb|EAA35329.1| conserved [Neurospora crassa OR74A]
  misc_feature (5)..(347): NCBI GI: 46128401 Blast Desc: FG08578.1 [Gibberella zeae PH-1]
  misc_feature (6)..(347): NCBI GI: 171683893 Blast Desc: protein product [Podospora anserina] gi|170941907|emb|CAP67559.1| protein product [Podospora anserina]
  misc_feature (1)..(347): NCBI GI: 156056118 Blast Desc: SS1G_05411 [Sclerotinia sclerotiorum 1980] gi|154703195|gb|EDO02934.1| SS1G_05411 [Sclerotinia sclerotiorum 1980]
  misc_feature (9)..(303): NCBI GI: 261353658 Blast Desc: exosome complex exonuclease RRP43 [Verticillium albo-atrum VaMs.102]
  misc_feature (5)..(346): NCBI GI: 242781432 Blast Desc: 3' exoribonuclease family protein [Talaromyces stipitatus ATCC 10500] gi|218719946|gb|EED19365.1| 3' exoribonuclease family protein [Talaromyces stipitatus ATCC
  misc_feature (9)..(347): NCBI GI: 67903390 Blast Desc: AN8682.2 [Aspergillus nidulans FGSC A4] gi|40740914|gb|EAA60104.1| AN8682.2 [Aspergillus nidulans FGSC A4]
  misc_feature (6)..(346): NCBI GI: 212526640 Blast Desc: 3' exoribonuclease family protein [Penicillium marneffei ATCC 18224] gi|210072875|gb|EEA26962.1| 3' exoribonuclease family protein [Penicillium marneffei ATCC 18224]
MATDASSTLSSAAFAKLSPHPYLVASLQASSPAKRINGRSPTHARPLAVNRSSLAHAHGSAVVRQGDTTVICGVRGETLLTSQIPNYRTSLFGGDATGSTDELRDYDLLVPNIELATGCAPEFLPGVPPTTLAQTLSTRIYSLLHSSGIINVEDLRIYNQVEASTETTDDDDMQDADADADAPAKEVKAYWVLYIDLLFVSLDGNPFDAAWAAVLAALRQTKLPHAYWDADREMVLCSRKTPPTPLSVSGLPVACSAAIFTAREKLKQIQSRKAGGDNGEFWILVDPDRFEESLCDELVTVVVDCSEGDETKILGLSKSGGIIVGPDIIKRFVRVAEERWQELKTVL

SEQ ID NO: 7518 - DNA, 1325 bp, Muscodor strobelii
  misc_feature: SGI EST ID NO. CUFF.18594.0
  misc_feature: Variant of the nucleotide sequence at SEQ ID NO 7516
ctccattaggtaccagccgcgaagtggatcagaccccacgtagctgccccgcgacctgcagtagctcattgaaatttcccaagctcgaaacaccaacacggtggcgcatgccatcctcgacatcaccgcttttcacgtattcccctgacaagcgattgctgtcgatctctcctcgactccgaaccatggcgacagacgcctcgtcgacgctatcgagcgccgcattcgccaagctatcaccgcacccttacttggtcgccagcctccaagcttcgtcgcccgcaaaacgcatcaacggccgcagcccaacccacgccagacccctcgccgttaacagatcttcgctcgcccacgcccacggtagcgccgtcgtacgtcagggcgacaccaccgtcatctgcggcgtgcgaggcgagacgctactcacttcccagatccccaactatcgtacctccctcttcggcggcgacgccacgggcagcaccgatgagctgcgcgactacgacctcctcgttcccaacatcgagttggccactggctgtgcccccgagttcctgcccggcgtaccacccaccacactggcacagactctgagcacgcgtatctactctctcctccacagctccggcattatcaatgtggaggacttgaggatatacaaccaagttgaagcctcgacagagacaaccgacgatgacgacatgcaagacgccgatgctgatgctgatgctcccgcaaaagaagtcaaggcttattgggtcttgtacatcgatctgctgttcgtctccttagacggcaaccccttcgacgctgcctgggccgctgtcctcgccgctttgcgccagacgaagctaccacatgcctactgggatgcagatcgcgagatggttttatgttcacggaagactcccccgacacctctatctgtatccgggctgccggtagcctgttcggctgccatattcactgccagagagaaactcaagcagatccagagtcggaaggccggtggtgacaatggcgaattttggatcctcgtcgaccctgatcgttttgaggagagtttgtgtgatgaacttgtgacggttgtagtcgattgctcagaaggcgacgagacgaagatcttgggtctctccaaaagcggtgggattattgttggaccggacatcatcaagagatttgtcagagtggctgaggaacgttggcaagagctcaaaactgtattatgattcaatgagaaatctctagacggagaacaataatgacaatgatacccaatgctaatgactctttttgatatgagatttaccatctacattttcttc

SEQ ID NO: 7519 - DNA, 2604 bp, Muscodor strobelii
  misc_feature: SGI cDNA ID NO. 562272
  misc_feature: Encodes the peptide sequence at SEQ ID NO 7520
atggctccgaccggggagcctgttctggcgagagccactaggcacattgtggaacttgcaaaacgtatctacataccactcacaccaacgagcccgcctggtctggtgcaggcgaacacagctgatccgtggatcaagtctggaaagtatgcccttgcatggacatacttcagcttggcattactcgcgatagtggtattgactaggatatggcattggtggcaagacaaaattcgtcaggcgatatataagcaagaggtggaacagcattatcgcgatatttacagcctcgacccgagttacgaggtgactggaatgcagacaagccagacgggcagacatttcttcccagatgaaggcggagagaaaagagacttcaaaccaaagagcgatttttcggccgttggaccgattctcgacacccttgctttattcagatggatattttacagaccaattcccgacattgtatggcgcaaacaccgattcacattttcgtcgctcgcggtactcgttgtgggattcattgctctagcattcgtgtctctattcaccttcctccagcaacccctatattggcagagtatccgttatggctcgcctcccgttgccatccgatccggcatgttggctgttgcaatgaccccttggattattgcaaccagcatgaaagcgaatttactcacacttgtcactgggattggaccagaacgcctcaacgtcttccatcgatgggctggatatttgtgtcttttcctctcgttgatacacacggttccattcttcattcaacctgtctgggaagatggcggcttgcaagtatttggaaagatttttccacagggcagcggtatcgtttatggcacaggtatcgcctgcctagtgcccctcggttggctctgcatcgcatccctcccaattgtccgcagagtcgcatacgaggtattcgttacgcttcacgtaccagtaggatttgtgtatgtgggcgtactcttctggcacaccaagaactatttggcctcctgggactatctatatgccacacttgccatctggttcgtatgctatgtataccgcctcacgaaactgaactgggtcaaaccatggcgcatgtcgttcatggttggtgatgaagctgccattacattgatgaccgagaatgccatcaagatcactatccctacacagatgaagtggaagcccggacaatttgtttatcttcgaatgccagggatttcgtttttcgacaaccacccttttactatatcctcgctttgtagcgaagacttcccctctgagtacggagagcaataccgagattgcacgattgtctttaagccctatggtggctttacgagaagagtattagagacggctattcaaaaggggcccttccatacatatcgtgcatatctcgacggcccctacggtggcatgcgccgagagcttgctgctttcgacactgttatattgatcgctgggggaagcggcgtcactgcgttgatgtctcagctactcaacttgatcaagaggatgagagatggcaaagcaattaccaaaaagatcgtcgtcgtatgggcattaaagcgtctcgaggcgatggattggtttcgcgaggagctacgtatctgccgcgattctgcaccacctgagagtgtaacatgcaagttcttcgtcactgcagcagtaagacagtcgcgaataccaccacagcacgctcgtgccccacgtccgctcagcaaccatttccacgatagactggatgggtttgttgctggcattgcttcgaagaggaattcacaaatgattcgagaggaagcacatggcaattcagaatacgagcaagagctacgagcggaagacgaggatagatttacagctctacctcaacaaaagtatcttcagccgcactacgtcccaccgcaacggccaatgccttcgactggactgtctcctcaggaggactcgcttcggaaactagagggaagggatctcagtgacactgaagggcatgagggtgaagaggctccgcgcctcactgaaaatggatttcccgaagagaagaagagagaattccacttcccgcccctgaagactcggccagatttgcagccgcacttcaacttcgcacctccttcgccacgaaggctcccaccccaatctgacggggaacaaatagaagaggcactcccagtacgagcccccgagtttgctcacctccgcacaacaaatctccccggccaaccagggttccgaccaacgtccacatttgggccgccatcgggattcgattttggctttcccgaaacgccgaccgagttccagaagagtctgatgcgttttgccttccctgtaccacatcagattgacggaggatggagcgtcgaatacggccgaccggatctaggttacatgctgcgcgaatggaccaccggtggcgccgatggcagaggtattctgggacggagaacagctgtcttcgtctgcggaccaccgggaatgcgtgttggtgtcgcaaatacggtggcgcgactacaagccgagatctggggcgatcctcagctcgaagagatatatctccacacggaaaactacgctttgtag

SEQ ID NO: 7520 - protein, 867 aa, Muscodor strobelii
  misc_feature: SGI Peptide ID NO. 562272
  misc_feature (207)..(331): Pfam Id: PF01794 Pfam Desc: Ferric reductase like transmembrane component
  misc_feature (372)..(480): Pfam Id: PF08022 Pfam Desc: FAD-binding domain
  misc_feature (486)..(541): Pfam Id: PF08030 Pfam Desc: Ferric reductase NAD binding domain
  misc_feature (33)..(643): NCBI GI: 119181422 Blast Desc: CIMG_05821 [Coccidioides immitis RS]
  misc_feature (14)..(649): NCBI GI: 255950940 Blast Desc: Pc22g23460 [Penicillium chrysogenum Wisconsin 54-1255] gi|211593254|emb|CAP99634.1| Pc22g23460 [Penicillium chrysogenum Wisconsin 54-1255]
  misc_feature (1)..(661): NCBI GI: 238838039 Blast Desc: ferric reductase [Microsporum canis CBS 113480]
  misc_feature (16)..(654): NCBI GI: 169778793 Blast Desc: [Aspergillus oryzae RIB40] gi|83772600|dbj|BAE62728.1| protein product [Aspergillus oryzae]
  misc_feature (16)..(630): NCBI GI: 121704098 Blast Desc: metalloreductase transmembrane component, [Aspergillus clavatus NRRL 1] gi|119398457|gb|EAW08887.1| metalloreductase transmembrane component, [Aspergillus clavatus NRRL 1]
  misc_feature (8)..(700): NCBI GI: 154280583 Blast Desc: conserved [Ajellomyces capsulatus NAm1] gi|150411283|gb|EDN06671.1| conserved [Ajellomyces capsulatus NAm1]
  misc_feature (1)..(867): NCBI GI: 46128403 Blast Desc: FG08579.1 [Gibberella zeae PH-1]
  misc_feature (1)..(867): NCBI GI: 171684957 Blast Desc: protein product [Podospora anserina] gi|170942439|emb|CAP68091.1| protein product [Podospora anserina]
  misc_feature (16)..(867): NCBI GI: 116193619 Blast Desc: CHGG_06527 [Chaetomium globosum CBS 148.51] gi|88182440|gb|EAQ89908.1| CHGG_06527 [Chaetomium globosum CBS 148.51]
  misc_feature (8)..(867): NCBI GI: 39970723 Blast Desc: MGG_02828 [Magnaporthe grisea 70-15] gi|149210211|ref|XP_001522480.1| MGCH7_ch7g583 [Magnaporthe grisea 70-15] gi|86196538|gb|EAQ71176.1| MGCH7_ch7g583 grisea
MAPTGEPVLARATRHIVELAKRIYIPLTPTSPPGLVQANTADPWIKSGKYALAWTYFSLALLAIVVLTRIWHWWQDKIRQAIYKQEVEQHYRDIYSLDPSYEVTGMQTSQTGRHFFPDEGGEKRDFKPKSDFSAVGPILDTLALFRWIFYRPIPDIVWRKHRFTFSSLAVLVVGFIALAFVSLFTFLQQPLYWQSIRYGSPPVAIRSGMLAVAMTPWIIATSMKANLLTLVTGIGPERLNVFHRWAGYLCLFLSLIHTVPFFIQPVWEDGGLQVFGKIFPQGSGIVYGTGIACLVPLGWLCIASLPIVRRVAYEVFVTLHVPVGFVYVGVLFWHTKNYLASWDYLYATLAIWFVCYVYRLTKLNWVKPWRMSFMVGDEAAITLMTENAIKITIPTQMKWKPGQFVYLRMPGISFFDNHPFTISSLCSEDFPSEYGEQYRDCTIVFKPYGGFTRRVLETAIQKGPFHTYRAYLDGPYGGMRRELAAFDTVILIAGGSGVTALMSQLLNLIKRMRDGKAITKKIVVVWALKRLEAMDWFREELRICRDSAPPESVTCKFFVTAAVRQSRIPPQHARAPRPLSNHFHDRLDGFVAGIASKRNSQMIREEAHGNSEYEQELRAEDEDRFTALPQQKYLQPHYVPPQRPMPSTGLSPQEDSLRKLEGRDLSDTEGHEGEEAPRLTENGFPEEKKREFHFPPLKTRPDLQPHFNFAPPSPRRLPPQSDGEQIEEALPVRAPEFAHLRTTNLPGQPGFRPTSTFGPPSGFDFGFPETPTEFQKSLMRFAFPVPHQIDGGWSVEYGRPDLGYMLREWTTGGADGRGILGRRTAVFVCGPPGMRVGVANTVARLQAEIWGDPQLEEIYLHTENYAL

SEQ ID NO: 7521 - DNA, 492 bp, Muscodor strobelii
  misc_feature: SGI cDNA ID NO. 562273
  misc_feature: Encodes the peptide sequence at SEQ ID NO 7522
atgccaccaccctggtttcgcatcgcaacaccaacatacaaaaacacaggatctgtcgcgagggaccatctagcatcggagcgcacgttcctcgcctggatacgaacaggtctagggttcgtggcgctgggcatagctatcgagcggttctcacagctcgatctaagcgagctcgtacctcacccaactgcccagactgcccaaactccagcgcatcaacagagtcttgaacagagaaagagagaaaaggatgaggataaagagcaatcacatgttttggtcggtgtactgatggctcttgggtcgggatcgattgtttatgggacgggtcggtatttcagtaatatgcggtatctggagcgtggcgagtttaaacccgcgtatcatggggctgccgtcatgggcgcggctgtggctggtcttgcgggtggtgtttatgggtctgctttgaagaggaggagggctgagagagaggatgttagggatgggtaa

SEQ ID NO: 7522 - protein, 163 aa, Muscodor strobelii
  misc_feature: SGI Peptide ID NO. 562273
  misc_feature (21)..(50): Pfam Id: PF02656 Pfam Desc: Domain of function DUF
  misc_feature (1)..(144): NCBI GI: 154301648 Blast Desc: BC1G_10151 [Botryotinia fuckeliana B05.10] gi|150855813|gb|EDN31005.1| BC1G_10151 [Botryotinia fuckeliana B05.10]
  misc_feature (14)..(142): NCBI GI: 71003952 Blast Desc: UM00495.1 [Ustilago maydis 521] gi|46095714|gb|EAK80947.1| UM00495.1 [Ustilago maydis 521]
  misc_feature (5)..(140): NCBI GI: 258572542 Blast Desc: conserved [Uncinocarpus reesii 1704] gi|237905303|gb|EEP79704.1| conserved [Uncinocarpus reesii 1704]
  misc_feature (5)..(150): NCBI GI: 189208043 Blast Desc: PTRG_10023 [Pyrenophora tritici-repentis Pt-1C-BFP] gi|187976448|gb|EDU43074.1| PTRG_10023 [Pyrenophora tritici-repentis Pt-1C-BFP]
  misc_feature (12)..(151): NCBI GI: 149239154 Blast Desc: conserved [Lodderomyces elongisporus NRRL YB-4239] gi|146450946|gb|EDK45202.1| conserved [Lodderomyces elongisporus NRRL YB-4239]
  misc_feature (12)..(151): NCBI GI: 238879838 Blast Desc: conserved [Candida albicans WO-1]
  misc_feature (12)..(151): NCBI GI: 241958440 Blast Desc: conserved [Candida dubliniensis CD36] gi|223645284|emb|CAX39940.1| conserved [Candida dubliniensis CD36]
  misc_feature (4)..(150): NCBI GI: 240108916 Blast Desc: CPC735_024210 [Coccidioides posadasii C735 delta SOWgp]
  misc_feature (4)..(150): NCBI GI: 119181226 Blast Desc: CIMG_05748 [Coccidioides immitis RS]
  misc_feature (12)..(151): NCBI GI: 255722007 Blast Desc: [Candida tropicalis MYA-3404] gi|240136427|gb|EER35980.1| [Candida tropicalis MYA-3404]
MPPPWFRIATPTYKNTGSVARDHLASERTFLAWIRTGLGFVALGIAIERFSQLDLSELVPHPTAQTAQTPAHQQSLEQRKREKDEDKEQSHVLVGVLMALGSGSIVYGTGRYFSNMRYLERGEFKPAYHGAAVMGAAVAGLAGGVYGSALKRRRAEREDVRDG

SEQ ID NO: 7523 - DNA, 817 bp, Muscodor strobelii
  misc_feature: SGI EST ID NO. CUFF.18621.0
  misc_feature: Variant of the nucleotide sequence at SEQ ID NO 7521
atctcagtaaacgaggcatcaaaactagctttcacctaacttaacgattatataatactataccgacatctttagtgtcgccgtttctgcgcacctacggtgtaatccataaatactcatcaaacttcaaccccatcatgccaccaccctggtttcgcatcgcaacaccaacatacaaaaacacaggatctgtcgcgagggaccatctagcatcggagcgcacgttcctcgcctggatacgaacaggtctagggttcgtggcgctgggcatagctatcgagcggttctcacagctcgatctaagcgagctcgtacctcacccaactgcccagactgcccaaactccagcgcatcaacagagtcttgaacagagaaagagagaaaaggatgaggataaagagcaatcacatgttttggtcggtgtactgatggctcttgggtcgggatcgattgtttatgggacgggtcggtatttcagtaatatgcggtatctggagcgtggcgagtttaaacccgcgtatcatggggctgccgtcatgggcgcggctgtggctggtcttgcgggtggtgtttatgggtctgctttgaagaggaggagggctgagagagaggatgttagggatgggtaaacctttcgcgataagtgagagaaacattgacgatttgatgttatagtcttattccttaactcgaaatgtgtgcgaagtgcgtgtgtatccgaccctcctcacgtgtgcaatggtgaatatacagtacgggcagtagatgtgatatagctgggaatatatagtttgaatcttaaggcgatgctccaggt

SEQ ID NO: 7524 - DNA, 1347 bp, Muscodor strobelii
  misc_feature: SGI cDNA ID NO. 562274
  misc_feature: Reduced expression when VOC is produced
  misc_feature: Encodes the peptide sequence at SEQ ID NO 7525
atggcatcaaaccacgattcctcagacgatggggatgttgagatggggggcactgggttgaacagcaacaagacggatagcaacaggactgctggtggggattcttccaacacagcaaacaacacacctcacacatcctctttatttgaagttaaaaccgaaccccatgaagacaagcaagaaccaccatcatcatcatctcctgacaaaatgagacctgcacctaagaagaagggtacggctgcgactaagaaggcacccaagaaatcaaaggggcccaaaagcaagaccaaaactgcagcgttgtctaacgtcgatgacagtaatgccgtcaccggcaatgcaggtagctcagaggatgagacagataacggaccctactgcatctgtcggggtccggatgatcacaggtggatgataggatgcgaagtatgcgaggactggttccatggagaatgcgtcgacctgtctaaggaaattggcgagaagcttgtggagcgtttcgtctgcccgaattgtaccgacggcaaacttaactacaccaagtacaaaaagacatgttcgctacccggctgtacaaaccctgcccgcctttacactaaggatgtcaacgaccgaagtgttttctgcagcagcgaccactgtgatgcttggtggtctcagatcatatctaccttacccactaaggcagcctcgaagaaggctatcgaagttctcacacaagaagacttcctgggtctgctcaaggccactaccgggaaaagtggctggaaactcggcgataagccctttggcaacaccgaaggcctttggtcaaatggcctccccacgcgtcctgggttgcttagtgaagaagaacaaagcttcctccagacctctgccgctgaacgcctcgcccttggtaacgaaatagttcaatacaagaagatgatgcagctactagactgggctgcctcccgtcgccaagccgcaatagaagccgggaaatttaacaaggacagctgcggctacgactggcgcctcgacaacatctcggtgcgcgtccaattcgctgcttggctcgagacacccgaaggacaggctgtattcaagacaggcaaactcgatgtaccgatcgaacccgattcgagcaacacgccagtcccaggtgcttgtgagaagaagagatgcaaaccgcacaatggctggtataagatcctcacgggtgctgtgcgcgtcttggtcaaggagactgcgaccgcggctgccgagaagcttgatgctgagcaggcgatgaggcaggaggccgaggcaaggtatgagaggagacagctggaggagaactcggtcgagattctaaatggatga

SEQ ID NO: 7525 - protein, 448 aa, Muscodor strobelii
  misc_feature: SGI Peptide ID NO. 562274
  misc_feature (127)..(176): Pfam Id: PF00628 Pfam Desc: PHD-finger
  misc_feature (21)..(446): NCBI GI: 46136055 Blast Desc: FG09543.1 [Gibberella zeae PH-1]
  misc_feature (74)..(448): NCBI GI: 256727640 Blast Desc: NECHADRAFT_76669 [Nectria haematococca mpVI 77-13-4]
  misc_feature (34)..(443): NCBI GI: 149210627 Blast Desc: MGCH7_ch7g786 [Magnaporthe grisea 70-15] gi|86196741|gb|EAQ71379.1| MGCH7_ch7g786 [Magnaporthe grisea 70-15]
  misc_feature (34)..(443): NCBI GI: 145609756 Blast Desc: MGG_03005 [Magnaporthe grisea 70-15] gi|145017153|gb|EDK01516.1| MGG_03005 [Magnaporthe grisea 70-15]
  misc_feature (35)..(448): NCBI GI: 171680095 Blast Desc: protein product [Podospora anserina] gi|170939674|emb|CAP64900.1| protein product [Podospora anserina]
  misc_feature (1)..(373): NCBI GI: 85113780 Blast Desc: NCU03178 [Neurospora crassa OR74A] gi|28926371|gb|EAA35348.1| [Neurospora crassa OR74A] gi|38567239|emb|CAE76530.1| conserved [Neurospora crassa]
  misc_feature (109)..(363): NCBI GI: 116193183 Blast Desc: CHGG_06309 [Chaetomium globosum CBS 148.51] gi|88182222|gb|EAQ89690.1| CHGG_06309 [Chaetomium globosum CBS 148.51]
  misc_feature (55)..(253): NCBI GI: 261353293 Blast Desc: conserved [Verticillium albo-atrum VaMs.102]
  misc_feature (67)..(446): NCBI GI: 154302280 Blast Desc: BC1G_09924 [Botryotinia fuckeliana B05.10] gi|150855412|gb|EDN30604.1| BC1G_09924 [Botryotinia fuckeliana B05.10]
  misc_feature (64)..(446): NCBI GI: 156056148 Blast Desc: SS1G_05426 [Sclerotinia sclerotiorum 1980] gi|154703210|gb|EDO02949.1| SS1G_05426 [Sclerotinia sclerotiorum 1980]
  misc_feature: Useful for introducing or modulating the production of volatile compounds
MASNHDSSDDGDVEMGGTGLNSNKTDSNRTAGGDSSNTANNTPHTSSLFEVKTEPHEDKQEPPSSSSPDKMRPAPKKKGTAATKKAPKKSKGPKSKTKTAALSNVDDSNAVTGNAGSSEDETDNGPYCICRGPDDHRWMIGCEVCEDWFHGECVDLSKEIGEKLVERFVCPNCTDGKLNYTKYKKTCSLPGCTNPARLYTKDVNDRSVFCSSDHCDAWWSQIISTLPTKAASKKAIEVLTQEDFLGLLKATTGKSGWKLGDKPFGNTEGLWSNGLPTRPGLLSEEEQSFLQTSAAERLALGNEIVQYKKMMQLLDWAASRRQAAIEAGKFNKDSCGYDWRLDNISVRVQFAAWLETPEGQAVFKTGKLDVPIEPDSSNTPVPGACEKKRCKPHNGWYKILTGAVRVLVKETATAAAEKLDAEQAMRQEAEARYERRQLEENSVEILNG

SEQ ID NO: 7526 - DNA, 2094 bp, Muscodor strobelii
  misc_feature: SGI EST ID NO. CUFF.18624.0
  misc_feature: Variant of the nucleotide sequence at SEQ ID NO 7524
acggatatgaggtatattggaatggaggtttaatggcccctgtgctacgaacatcagataccactccatcgtgatgtagagcacggtgcatccatacagtgcaggatctgccacacgacctatcgatagtggactggaacgcagcctcccagaatggttcgcctcatcgcgccttcacttcgcatgacatcttttcgagaccttccatgactttttttccttgctagtgaagacttgggtgcgcaaagctaatacgtttgctttatatacttgtattcaagagtacaaataccttcttgcagcccatgaattatcctgtgcgccgataatgcgcacggaccattcatcgcattttccagctattgctttcgaggacgaggcaaaagtaggcgattgaggatattgagtaaatttgatgacgtctcgggctcgagaaacgactagcttattgtcaaagaatagtctcattgtatcatcttatttggaagtcatagtttagcttgcgcagtggaaaacaatggcatcaaaccacgattcctcagacgatggggatgttgagatggggggcactgggttgaacagcaacaagacggatagcaacaggactgctggtggggattcttccaacacagcaaacaacacacctcacacatcctctttatttgaagttaaaaccgaaccccatgaagacaagcaagaaccaccatcatcatcatctcctgacaaaatgagacctgcacctaagaagaagggtacggctgcgactaagaaggcacccaagaaatcaaaggggcccaaaagcaagaccaaaactgcagcgttgtctaacgtcgatgacagtaatgccgtcaccggcaatgcaggtagctcagaggatgagacagataacggaccctactgcatctgtcggggtccggatgatcacaggtggatgataggatgcgaagtatgcgaggactggttccatggagaatgcgtcgacctgtctaaggaaattggcgagaagcttgtggagcgtttcgtctgcccgaattgtaccgacggcaaacttaactacaccaagtacaaaaagacatgttcgctacccggctgtacaaaccctgcccgcctttacactaaggatgtcaacgaccgaagtgttttctgcagcagcgaccactgtgatgcttggtggtctcagatcatatctaccttacccactaaggcagcctcgaagaaggctatcgaagttctcacacaagaagacttcctgggtctgctcaaggccactaccgggaaaagtggctggaaactcggcgataagccctttggcaacaccgaaggcctttggtcaaatggcctccccacgcgtcctgggttgcttagtgaagaagaacaaagcttcctccagacctctgccgctgaacgcctcgcccttggtaacgaaatagttcaatacaagaagatgatgcagctactagactgggctgcctcccgtcgccaagccgcaatagaagccgggaaatttaacaaggacagctgcggctacgactggcgcctcgacaacatctcggtgcgcgtccaattcgctgcttggctcgagacacccgaaggacaggctgtattcaagacaggcaaactcgatgtaccgatcgaacccgattcgagcaacacgccagtcccaggtgcttgtgagaagaagagatgcaaaccgcacaatggctggtataagatcctcacgggtgctgtgcgcgtcttggtcaaggagactgcgaccgcggctgccgagaagcttgatgctgagcaggcgatgaggcaggaggccgaggcaaggtatgagaggagacagctggaggagaactcggtcgagattctaaatggatgagtatgaggcggtagagaatatgagtttatggcattgcgtgggggctgagtagtgttatactaattagcctcacgcttgtgatgaaatgattgctgaacgcacgatggccaatgatgcgcgctcacagatcgttggagaaatcttactccagattgctggcgagcctctgttaaaacttagcaggtagaagacagaataaccggtacgaccgaataatacaacgcttgaag

SEQ ID NO: 7527 - DNA, 564 bp, Muscodor strobelii
  misc_feature: SGI cDNA ID NO. 562275
  misc_feature: Encodes the peptide sequence at SEQ ID NO 7528
atgccgtcgaacgaggcaaacaccgtcgatgacacgcacttgggtttgaccgacgaagagatcgcccttctgcggtaccaccaggcccaggctgccggatcatcctcctcgcgcgccgcaagtcgggcgtcgtcacagggccgtttactactcgacagctcgagtctagcggcgctctcgcgtcatctagatcggctgctacgccaaattcatgaacgtatagaatatctcagcgagcagagctcaattgtgaccctacagcaatttgaccatgccggccatctggtagacaatgcagatgctgagatcgcgcgttatcaagagctcatggcgcagatcgatgagctcgaagtcgacttcgatcgcatagagcatatccgcgacattgtgagggattatcgccagcgcgtcgagcaaatggaacgtgagctggaacagagttcttcatcgcgacgggatcgcgatggacatagacatcattcttccagccatcgccatgggcacggtcatagtcatggtcatggacactcatcaggctctttgtcgcgcagacacaggcattaa

SEQ ID NO: 7528 - protein, 187 aa, Muscodor strobelii
  misc_feature: SGI Peptide ID NO. 562275
  misc_feature (3)..(159): NCBI GI: 156056166 Blast Desc: SS1G_05435 [Sclerotinia sclerotiorum 1980] gi|154703219|gb|EDO02958.1| SS1G_05435 [Sclerotinia sclerotiorum 1980]
  misc_feature (3)..(149): NCBI GI: 154302264 Blast Desc: BC1G_09916 [Botryotinia fuckeliana B05.10] gi|150855404|gb|EDN30596.1| BC1G_09916 [Botryotinia fuckeliana B05.10]
  misc_feature (6)..(160): NCBI GI: 85113784 Blast Desc: NCU03179 [Neurospora crassa OR74A] gi|28926372|gb|EAA35349.1| conserved [Neurospora crassa OR74A] gi|38567238|emb|CAE76529.1| [Neurospora crassa]
  misc_feature (2)..(135): NCBI GI: 116193181 Blast Desc: CHGG_06308 [Chaetomium globosum CBS 148.51] gi|88182221|gb|EAQ89689.1| CHGG_06308 [Chaetomium globosum CBS 148.51]
  misc_feature (1)..(155): NCBI GI: 261353299 Blast Desc: conserved [Verticillium albo-atrum VaMs.102]
  misc_feature (2)..(133): NCBI GI: 171684445 Blast Desc: protein product [Podospora anserina] gi|170942183|emb|CAP67835.1| protein product [Podospora anserina]
  misc_feature (3)..(150): NCBI GI: 39971113 Blast Desc: MGG_03023 [Magnaporthe grisea 70-15] gi|149210671|ref|XP_001522710.1| MGCH7_ch7g808 [Magnaporthe grisea 70-15] gi|86196763|gb|EAQ71401.1| MGCH7_ch7g808 grisea
  misc_feature (8)..(152): NCBI GI: 240111734 Blast Desc: CPC735_011970 [Coccidioides posadasii C735 delta SOWgp]
  misc_feature (8)..(152): NCBI GI: 258569080 Blast Desc: conserved [Uncinocarpus reesii 1704] gi|237906730|gb|EEP81131.1| conserved [Uncinocarpus reesii 1704]
  misc_feature (46)..(152): NCBI GI: 119173032 Blast Desc: CIMG_10054 [Coccidioides immitis RS]
MPSNEANTVDDTHLGLTDEEIALLRYHQAQAAGSSSSRAASRASSQGRLLLDSSSLAALSRHLDRLLRQIHERIEYLSEQSSIVTLQQFDHAGHLVDNADAEIARYQELMAQIDELEVDFDRIEHIRDIVRDYRQRVEQMERELEQSSSSRRDRDGHRHHSSSHRHGHGHSHGHGHSSGSLSRRHRH

SEQ ID NO: 7529 - DNA, 3025 bp, Muscodor strobelii
  misc_feature: SGI EST ID NO. CUFF.18627.0
  misc_feature: Variant of the nucleotide sequence at SEQ ID NO 7527
cagacatgcactcttggcaaatccgggggcttttgaagctaccgacgcagcctatgaagataccctgtcgcttgccccgctggtttccgagactatcttcgcgtcaagtttgcccatgctgtcggatttgattttcacgctcatgcatgccttcgtccctcgagagcgtccgccatccaattgccagtccgcaatcatcgcctaacttccccagagattgatagggcaaggggcgagtacataacacgtgcaagtggagggatccccgacgtcgacgattgtgatatcgcacatgccaaggggcacagaaaagaaaacggcattccagactacttgtacaggctgaacctgggaatatcacacctccctcggccataattcgcatcctgctagcttccccttccgtcaaagacccggtctcttgctgaggcaccacaacacagagactgttggtgggtgtggtgaggatcacaattggtagtgccagtggcttgtctctgtcttgtcttgtatcaccatacctgtagaccgcccatctccgacgcagaggcgacgggagaaaaagacaccctcctccttctcctctcgagatcctggtctggtcgcgcgtcgcctcacctggtcccctgcgaacgcctgcacccttcaatcgatcgagcagccgtcctgcagcacgcaagcaggtcattgtgcgcgcaggccttttctccgttcccatctgtctgggccaaacaggaaaagatccgaggccgacctgccctcatcctctgcttggctacctctccgggtctgtttcaactttcttgccctacactggctgcgcaaacactctccaaaccacatcgccggctccaactatcgtgcgatgacaggcgttctgaccatcgccctcccgagacaatgaagccgctgcgcgcccaggcagactcgacgcttggtgacttcatggtgtcacatagtctttcgacccgaatcgagacgacgttgcatccgcatgtgccccgcctacgacagccgcccttacgccccctggcccagtcgccgacgctacacagcgcttgattgcgacctgcgactcgctcccgtcctcggcccccgtccgttgccgacgccgtcgccgctgctgtcgtggggaattcgtgccgtggcctgtggtcgcggaggacgcagcacatcacctcctgcctcccgtgggttgagccatgccgtcgaacgaggcaaacaccgtcgatgacacgcacttgggtttgaccgacgaagagatcgcccttctgcggtaccaccaggcccaggctgccggatcatcctcctcgcgcgccgcaagtcgggcgtcgtcacagggccgtttactactcgacagctcgagtctagcggcgctctcgcgtcatctagatcggctgctacgccaaattcatgaacgtatagaatatctcagcgagcagagctcaattgtgaccctacagcaatttgaccatgccggccatctggtagacaatgcagatgctgagatcgcgcgttatcaagagctcatggcgcagatcgatgagctcgaagtcgacttcgatcgcatagagcatatccgcgacattgtgagggattatcgccagcgcgtcgagcaaatggaacgtgagctggaacagagttcttcatcgcgacgggatcgcgatggacatagacatcattcttccagccatcgccatgggcacggtcatagtcatggtcatggacactcatcaggctctttgtcgcgcagacacaggcattaatgatgtcctttacgtggacacgaaataatacaagaaatcatgggctcagaaatacgagtcaggaagtagagggctcactcaaagcggtgggggaaaggtacattgataccgcggaagatcatatttggcgaagatcgtaccttcagagacgaggattgaagcggacaaaagatgagaaatggacaattgccgatggtagataaggcatttgcgtaacacaaacctagcctcgtggcgggaaaaaggcggcaacatgaggcaactgccgacaatcgttgttgcctcaccaatgacaagtatcaggctggatacaacaataccgcgaccgaaaaaaggaaccaattgaagtattgtcgtcaccaagcaatcacacgaaacaccggatcaatggggaagaaaacgaagaaaaaacaaaaatctagagagaaaaacccagctcaacgctcgacagaacaaggtgctcaaaaacgtactattgatcaaccaattgaccaatcggtcaagcaaattataccccggaatataaagaataggagaagcctcacggctggaacgagatatcaaataccaagacgagggcgaagaaagaggagatttggcctcgcggctgcattatgagtctcacattacggcgttggaggatgcttcttgtttacttctatacgatttatttttactccggtattgtcgccggtttctcctggcccttatcactgggcttgacgatggaccgaagcagatctaatctcgttttcggagggcgcatcctggacgccattcaatgtccatgattactgcaattacctcttcgggtcgcacccgaagatgagttgttcgttagcgataccatttgcttcttatgttattttcatgtttaataagttgtacgaaatacctagtagtcttgtgacaaaagttggaatttgaaattctcgttgagcattctctactcttatggcaatgcggcgtcgtgttcgataagatgatgataactgatcttggtgtgggctgtcacatgtctgcgatccatctggggagaatactgaaacaatggccattaggagtatttttattattattatgacatgggaaagccacgcctggccgtagatcgacccagcggaacggcagtctggtactaagtaagcaaagccatagaacaggtgaatgatacattcttatttgcattccagtaccaccggcaacatattttttcagatgaacatcatctaagtcgacttcggccgtaaagatagtcc

SEQ ID NO: 7530 - DNA, 1224 bp, Muscodor strobelii
  misc_feature: SGI cDNA ID NO. 562276
  misc_feature: Encodes the peptide sequence at SEQ ID NO 7531
atgtcgactattaacgactttgatcccactattccacagccagaggttgatcgtttgtggcgtaaactcagggacacacggttgccgcaaacaccagttgtccctgacgccggcgacgactacggccctcccctggaatgggttcataaactctacaattattggacccgaaatttcgactggagcgcagctcagtgcaagatattgcaatggaaacattacaccgccgagatcgagggattgaccatccatttcgtgcaccaacctgctgcagctgatcgcaaaaaagacgctgtccctcttctactagttcacgggtggccaggtagttggtttgaattctcgcggtgcctagatgcgttgagcagcccaggaatcgaatccgaaccggccttccacctggtcgtaccttcgattccggggtttacatggtccagtggtccgcctcgcggctggacgttgcaagatacggctcgcgtcttcgacaaactcatgcagcggctgggatacgattcttatgtcgcacaagccggcgactggggacattttgttattcgtgagttgggcactagtcggtatagctcacgttgcaaagccgtacacacgaacatgtgcccttctgttccttctgttccggaaagcgaatatacagaaagagagaagatcgctcagaagacaacaaattggtggtttggtaaaccgggctatgagtcgcatatgggatatgccgtcgagatgcgaacgcgaccacaaaccatcggtgttgcgctctcggacaatcctgttgggatcatgatgtgggttggagagaaatactacgagcatgttgatcccccatatcgcgatcttgatagcgacgcctctagatccggctttttggatgatttgtgcactacactctgtctgtatttctttacaagtcccagcatcatgaccagcgcgctgtgttacacgaacaacgtacgacaggagaaatacgccgagtttaacacccagaaggagaactggattgaagttccctttggtgtttctagtttccgctatgatgtttcgcctgtgtcggaaagggctgcagctacgacaggcaattgtcaatggtttagagaatatgaccacggtggtcattttgctgctctcgagtgcccgcaggaattcgttcacgatctccgggattgcttttcgcagctgtatattgcaagaatggcagcagaaaaggggctttaa

SEQ ID NO: 7531 - protein, 407 aa, Muscodor strobelii
  misc_feature: SGI Peptide ID NO. 562276
  misc_feature (132)..(391): Pfam Id: PF00561 Pfam Desc: alpha/beta hydrolase fold
  misc_feature (5)..(118): Pfam Id: PF06441 Pfam Desc: Epoxide hydrolase N terminus
  misc_feature (132)..(181): Pfam Id: PF00561 Pfam Desc: alpha/beta hydrolase fold
  misc_feature (1)..(397): NCBI GI: 169612992 Blast Desc: SNOG_09624 [Phaeosphaeria nodorum SN15] gi|111061769|gb|EAT82889.1| SNOG_09624 [Phaeosphaeria nodorum SN15]
  misc_feature (7)..(397): NCBI GI: 7620492 Blast Desc: AF172998_1 epoxide hydrolase [Rhodotorula glutinis] gi|23451107|gb|AAN32661.1|AF416991_1 epoxide hydrolase [Rhodosporidium toruloides] gi|29243392|gb|AAO67343.1| epoxide
  misc_feature (7)..(397): NCBI GI: 23451110 Blast Desc: AF416992_1 epoxide hydrolase [Rhodosporidium toruloides]
  misc_feature (7)..(401): NCBI GI: 6601358 Blast Desc: AF166258_1 epoxide hydrolase [Xanthophyllomyces dendrorhous]
  misc_feature (5)..(397): NCBI GI: 6165232 Blast Desc: epoxide hydrolase [Aspergillus niger] gi|6165234|emb|CAB59813.1| epoxide hydrolase [Aspergillus niger]
  misc_feature (5)..(397): NCBI GI: 239781878 Blast Desc: epoxide hydrolase [Aspergillus niger] gi|6165234|emb|CAB59813.1| epoxide hydrolase [Aspergillus niger]
  misc_feature (5)..(397): NCBI GI: 7245812 Blast Desc: epoxide hydrolase [Aspergillus niger] gi|6165234|emb|CAB59813.1| epoxide hydrolase [Aspergillus niger]
  misc_feature (14)..(396): NCBI GI: 29374142 Blast Desc: epoxide hydrolase [Rhodosporidium paludigenum]
  misc_feature (3)..(397): NCBI GI: 67525119 Blast Desc: AN3017.2 [Aspergillus nidulans FGSC A4] gi|40744412|gb|EAA63588.1| AN3017.2 [Aspergillus nidulans FGSC A4] gi|259486036|tpe|CBF83559.1| TPA: epoxide hydrolase, nidulans
  misc_feature (7)..(397): NCBI GI: 145252034 Blast Desc: epoxide hydrolase [Aspergillus niger] gi|94471802|gb|ABF21120.1| epoxide hydrolase [Aspergillus niger] gi|134083073|emb|CAL00441.1| epoxide hydrolase hyl1-Aspergillus
  misc_feature (3)..(396): SWISSPROT Homolog: EC 3.3.2.9 Microsomal epoxide hydrolase
MSTINDFDPTIPQPEVDRLWRKLRDTRLPQTPVVPDAGDDYGPPLEWVHKLYNYWTRNFDWSAAQCKILQWKHYTAEIEGLTIHFVHQPAAADRKKDAVPLLLVHGWPGSWFEFSRCLDALSSPGIESEPAFHLVVPSIPGFTWSSGPPRGWTLQDTARVFDKLMQRLGYDSYVAQAGDWGHFVIRELGTSRYSSRCKAVHTNMCPSVPSVPESEYTEREKIAQKTTNWWFGKPGYESHMGYAVEMRTRPQTIGVALSDNPVGIMMWVGEKYYEHVDPPYRDLDSDASRSGFLDDLCTTLCLYFFTSPSIMTSALCYTNNVRQEKYAEFNTQKENWIEVPFGVSSFRYDVSPVSERAAATTGNCQWFREYDHGGHFAALECPQEFVHDLRDCFSQLYIARMAAEKGL

SEQ ID NO: 7532 - DNA, 864 bp, Muscodor strobelii
  misc_feature: SGI cDNA ID NO. 562277
  misc_feature: Encodes the peptide sequence at SEQ ID NO 7533
atggcgacggccatgtatacgaatcagtatgggtatcctcagcctccaccttcacctccattggatgactcctcaaaatgctcgcttccttcaatctcgaatctgttggtaatggcggacgctggatcgccaacttcagagcactcgcctcagtcgcaacaagcgtcttcaataaaagcagatactcgtccaaactcatctcatcactcacacagtggacattcacgaacagcgttgcccccgacgccacctatgagcacagatgcttcatttgagggatacaattcgcccccaacgaaaccagtcagcgtgatctcagggccaagtagttactactatgagactacgccacctctagaggacattcatcgtcaaaacatggctgcaaacgttccgcggctagctatgcaatcccaatcctacccgcagcaagctttcgcctcatacatgaaccaacccactatgtcttcatactatgcaccttccatctctgccgcgccctcagctcagtctcaaatatctggactattttaccagcggcccctccctcagacattccctccattgcccgtcgccgtctccatagcaccatcctctggagctaacccatggcaacaccatcattatatctcaccctcttcagctgcgtctttcccccaatcgcaggatcgatacatctgccagacttgcaacaaggctttttcgcgacccagttctctccggattcatagccactcacacacgggagaaaagcccttcaaatgtcctcatgctggatgtggcaaagccttcagcgttcgaagcaatatgaagcggcacgaacgaggatgccacagttttgatggtggtgcatcgttacgataa

SEQ ID NO: 7533 - protein, 287 aa, Muscodor strobelii
  misc_feature: SGI Peptide ID NO. 562277
  misc_feature (253)..(278): Pfam Id: PF00096 Pfam Desc: Zinc finger, C2H2 type
  misc_feature (225)..(247): Pfam Id: PF00096 Pfam Desc: Zinc finger, C2H2 type
  misc_feature (9)..(281): NCBI GI: 116193177 Blast Desc: CHGG_06306 [Chaetomium globosum CBS 148.51] gi|88182219|gb|EAQ89687.1| CHGG_06306 [Chaetomium globosum CBS 148.51]
  misc_feature (21)..(281): NCBI GI: 85113805 Blast Desc: NCU03184 [Neurospora crassa OR74A] gi|28926377|gb|EAA35354.1| conserved [Neurospora crassa OR74A] gi|38567234|emb|CAE76525.1| related to C2H2 zinc finger protein
  misc_feature (9)..(285): NCBI GI: 149210677 Blast Desc: MGCH7_ch7g811 [Magnaporthe grisea 70-15] gi|86196766|gb|EAQ71404.1| MGCH7_ch7g811 [Magnaporthe grisea 70-15]
  misc_feature (9)..(285): NCBI GI: 145609744 Blast Desc: MGG_12536 [Magnaporthe grisea 70-15] gi|145017134|gb|EDK01497.1| MGG_12536 [Magnaporthe grisea 70-15]
  misc_feature (21)..(284): NCBI GI: 261353297 Blast Desc: conserved [Verticillium albo-atrum VaMs.102]
  misc_feature (16)..(286): NCBI GI: 46135789 Blast Desc: FG09410.1 [Gibberella zeae PH-1]
  misc_feature (23)..(286): NCBI GI: 256727643 Blast Desc: NECHADRAFT_76677 [Nectria haematococca mpVI 77-13-4]
  misc_feature (75)..(286): NCBI GI: 154302274 Blast Desc: BC1G_09921 [Botryotinia fuckeliana B05.10] gi|150855409|gb|EDN30601.1| BC1G_09921 [Botryotinia fuckeliana B05.10]
  misc_feature (13)..(279): NCBI GI: 169778881 Blast Desc: [Aspergillus oryzae RIB40] gi|238499469|ref|XP_002380969.1| C2H2 finger domain protein, [Aspergillus flavus NRRL3357] gi|83772644|dbj|BAE62772.1| protein
  misc_feature (13)..(279): NCBI GI: 121704000 Blast Desc: C2H2 finger domain protein, [Aspergillus clavatus NRRL 1] gi|119398408|gb|EAW08838.1| C2H2 finger domain protein, [Aspergillus clavatus NRRL 1]
MATAMYTNQYGYPQPPPSPPLDDSSKCSLPSISNLLVMADAGSPTSEHSPQSQQASSIKADTRPNSSHHSHSGHSRTALPPTPPMSTDASFEGYNSPPTKPVSVISGPSSYYYETTPPLEDIHRQNMAANVPRLAMQSQSYPQQAFASYMNQPTMSSYYAPSISAAPSAQSQISGLFYQRPLPQTFPPLPVAVSIAPSSGANPWQHHHYISPSSAASFPQSQDRYICQTCNKAFSRPSSLRIHSHSHTGEKPFKCPHAGCGKAFSVRSNMKRHERGCHSFDGGASLR

SEQ ID NO: 7534 - DNA, 1984 bp, Muscodor strobelii
  misc_feature: SGI EST ID NO. CUFF.18726.0
  misc_feature: Variant of the nucleotide sequence at SEQ ID NO 7532
cccatgccgttgatgcaggagtacattcgatactaatgatcgactgttgcgtccatcccaagtctgccgtggcccacatgtccaatttgcgacagtcgtgccccagggattcttgatacttgcagattggcacttgatcatcttcgccatatacatccggacgatctgatagatagcatcgtctcacctcccactattctgtcatatttaagtatccacactcccccgatcctgcctcattctcatgaagcccttgaacttgacaaaatataatactcgacttcgatcgcatattcctagatccgacgacataaatacgtcagaaagctatatacgcgcctataatacaacacattacgatcgcagaacatctagacattaatcaaacataagctaaatacaaacacctcaacgatttttaatcccgaaatagtcacaaaatggcgacggccatgtatacgaatcagtatgggtatcctcagcctccaccttcacctccattggatgactcctcaaaatgctcgcttccttcaatctcgaatctgttggtaatggcggacgctggatcgccaacttcagagcactcgcctcagtcgcaacaagcgtcttcaataaaagcagatactcgtccaaactcatctcatcactcacacagtggacattcacgaacagcgttgcccccgacgccacctatgagcacagatgcttcatttgagggatacaattcgcccccaacgaaaccagtcagcgtgatctcagggccaagtagttactactatgagactacgccacctctagaggacattcatcgtcaaaacatggctgcaaacgttccgcggctagctatgcaatcccaatcctacccgcagcaagctttcgcctcatacatgaaccaacccactatgtcttcatactatgcaccttccatctctgccgcgccctcagctcagtctcaaatatctggactattttaccagcggcccctccctcagacattccctccattgcccgtcgccgtctccatagcaccatcctctggagctaacccatggcaacaccatcattatatctcaccctcttcagctgcgtctttcccccaatcgcaggatcgatacatctgccagacttgcaacaaggctttttcgcgacccagttctctccggattcatagccactcacacacgggagaaaagcccttcaaatgtcctcatgctggatgtggcaaagccttcagcgttcgaagcaatatgaagcggcacgaacgaggatgccacagttttgatggtggtgcatcgttacgataatccagaactcattgagttaaacgagcattttgcattgggcccgggttgctcgaatatttagcactattaatcacgctcggaccgatggagcgactcagaaataatggcaaatatgccgattacgatattacgggcgatactcctaatggcgaagcttgactacgaagcaagcagagggctccatagagtcttcaattcggatattactcttgatttggatggggattacgaggcgtcacaaggcacaaattttgggatcggttgtgaagcacaggagtccaggcgttccagttcgacatgagcattttcaccggcgttttgagtcacaaacggggcgaaaaagttcctgggatacacagttgtatgaattttgccgaagacatgattctgctttagtataatgtatataaaccaagagcttataagactggcatggtaacgcctgaccagatatgagagatctactatgagatctacgatgagatcgccataacttgtatatcagaagattgcctgacaagcaccctctgctcatactccgatgtgataatgtgaatggggcactcccagactggtatacataaggtatatcacaggataactattcgaagtcatatttagggatttagctacaaaatatgtcaaagctggtacatattggcggaggagcatgaatacac

SEQ ID NO: 7535 - DNA, 450 bp, Muscodor strobelii
  misc_feature: SGI cDNA ID NO. 562278
  misc_feature: Encodes the peptide sequence at SEQ ID NO 7536
atggcgaacgggcaacttctcgttcttggagccacgagcccgacaggaaaagtcattgtgagccgagcccttgagcttggctggagagtaaccgtctacggccggaggaccttgccggaacatgatcaaaaccctgatatcaagacaattataggacaattagacgatgagccacagctacgcactacgatacggggtcaggacgtcatcatttctgtgatcggaccctcgggtccaagatcgcccacagatgtcttcgtgccggcatacaagctgatcctcgagaccatgaagcgcgaaggagtacaccgtataatcgctttgagcacgttcagtgcgcaggatcccgccgacaggtttgactttgtcatatggttcctcacaacggcgatttgggctttgctgtaccgtacatggaaagctgtcgtcgatgttgccggtgttttttga

SEQ ID NO: 7536 - protein, 149 aa, Muscodor strobelii
  misc_feature: SGI Peptide ID NO. 562278
  misc_feature (5)..(148): NCBI GI: 119716420 Blast Desc: NmrA family protein [Nocardioides sp. JS614] gi|119537081|gb|ABL81698.1| NmrA family protein [Nocardioides sp. JS614]
  misc_feature (1)..(148): NCBI GI: 239503584 Blast Desc: AbauAB_14842 [Acinetobacter baumannii AB900]
  misc_feature (5)..(147): NCBI GI: 251790903 Blast Desc: Dd1591_3327 [Dickeya zeae Ech1591] gi|247539524|gb|ACT08145.1| conserved [Dickeya zeae Ech1591]
  misc_feature (5)..(149): NCBI GI: 119192686 Blast Desc: CIMG_00720 [Coccidioides immitis RS]
  misc_feature (1)..(149): NCBI GI: 240105995 Blast Desc: CPC735_055580 [Coccidioides posadasii C735 delta SOWgp]
  misc_feature (5)..(123): NCBI GI: 238841089 Blast Desc: NmrA family protein [Microsporum canis CBS 113480]
  misc_feature (5)..(149): NCBI GI: 258574035 Blast Desc: [Uncinocarpus reesii 1704] gi|237901465|gb|EEP75866.1| [Uncinocarpus reesii 1704]
  misc_feature (2)..(122): NCBI GI: 270494807 Blast Desc: NAD-dependent epimerase/dehydratase [Acidovorax avenae subsp. avenae ATCC 19860] gi|270328299|gb|EFA39108.1| NAD-dependent epimerase/dehydratase [Acidovorax avenae subsp.
  misc_feature (5)..(124): NCBI GI: 227114564 Blast Desc: PcarbP_16463 [Pectobacterium carotovorum subsp. brasiliensis PBR1692]
  misc_feature (5)..(122): NCBI GI: 86360093 Blast Desc: RHE_PC00048 [Rhizobium etli CFN 42] gi|86284195|gb|ABC93255.1| conserved protein [Rhizobium etli CFN 42]
  misc_feature (1)..(116): SWISSPROT Homolog: EC 1.5.1.30 Flavin reductase
  misc_feature (1)..(116): SWISSPROT Homolog: EC 1.3.1.24 Biliverdin reductase
MANGQLLVLGATSPTGKVIVSRALELGWRVTVYGRRTLPEHDQNPDIKTIIGQLDDEPQLRTTIRGQDVIISVIGPSGPRSPTDVFVPAYKLILETMKREGVHRIIALSTFSAQDPADRFDFVIWFLTTAIWALLYRTWKAVVDVAGVF

SEQ ID NO: 7537 - DNA, 830 bp, Muscodor strobelii
  misc_feature: SGI EST ID NO. CUFF.18712.0
  misc_feature: Variant of the nucleotide sequence at SEQ ID NO 7535
agaaactttacgctatcgcacattcattcttcttaagccctggaactttcatttgatatggcgaacgggcaacttctcgttcttggagccacgagcccgacaggaaaagtcattgtgagccgagcccttgagcttggctggagagtaaccgtctacggccggaggaccttgccggaacatgatcaaaaccctgatatcaagacaattataggacaattagacgatgagccacagctacgcactacgatacggggtcaggacgtcatcatttctgtgatcggaccctcgggtccaagatcgcccacagatgtcttcgtgccggcatacaagctgatcctcgagaccatgaagcgcgaaggagtacaccgtataatcgctttgagcacgttcagtgcgcaggatcccgccgacaggtttgactttgtcatatggttcctcacaacggcgatttgggctttgctgtaccgtacatggaaagctgtcgtcgatgttgccggtgttttttgactcggatggcgatggtatcgattggacggtatttcgcgtgggattcctcaacgatggtccgcggggcaaaatcacggagggatacgttggtgatggcaggctcggtcacagtattagtcgagcgtctatcgcagagtgggctctgatgcaagcggaaaagtcgcccactgaaaatgtacatgagaagcctggaatttcatcggttgcgtcaggttaataggtatatgcctccattcccctcgttgatgctcactagacaactttcctgcttcgcggtagttattcagggcaaatattagcctcagattagacacacgttcaag

SEQ ID NO: 7538 - DNA, 1716 bp, Muscodor strobelii
  misc_feature: SGI cDNA ID NO. 562279
  misc_feature: Encodes the peptide sequence at SEQ ID NO 7539
atgatgactacattcttattgattgcagtgtccctgctggtgcatcttaaatctgtcctgtccacagcaacgggtccattcttgagccagatagacgacggaacgtggatgattgggaatgaactgtggaatttgacacagggtcctacgtatggagtcaagctatactatcaagatagtgactgtgttggtgatgcagtgggccattatgtgagctacaatggcgcagcaagcaatctaaagtggacttcggcttcagtagtcaagcaggacacatatgaaggttccaatttcatcgatgttgcattcacagctgccgaaggcgaaatgcactgggtgattttctctggactgtcaggtgcttatcagtacttcgtcaaccatgctttacctcagctcggggaattccgcaccctttggcgtcttgataacacgacgtttcctcgaggcaagacgagtcttcgggatgaggaattgcctcctcttagcgactacatagatgcgaacaaggtccaagatgagacctggcttcgtcctgatggaacggggtatatcactaagtatgacttcacggattggatccggacgcagacatactacggcgtctatggagaggagttcgggagctggtatatcaatgctggcaaagattattataatggcaatcatctgaagcaagaacttatggtgcatcgtgaatcagcaacaggagatgccgttcagctcaacatgatccatgggacgcactttcaagtttcgtctgcggacgactttcccgaaggtaagatgtggggaccatggctttggtatctcaacaatggatcgaaggacgatgcagcggaaagagcagaggcagaattctctacttggccatacgcatggctcgatgatgttgcatataacgcacgcggattggtaaaaggcctcctcgttctgtccgatggccggccaggggctaatgctgccgttttcctgggtgacaacaatccgaataagactgcgttggatatgggatcttcatactactatactacatacgcggattccgacggacagttcgagttcacgcatgtgcgctcagcgacgtacgggctacaagcatggtcaaatggcagtaccatcgcagatgtaacaaccagcttcttgcgaaatgatgtcgaagtcagtagcacagatacaactaatctggggatcttgagctgggcagtgtcaaacaagactcaaatcttccggattggagacttcgaccggacttcctatggttttgcgtatggaggcgcgccacatcagcacgcgcttgtcagcaagtgcccagcagacctcgtatacaacgttagcagttccatttactcggactggtgtttcggacaaacatatctgggaaactggacagtgtccttcgagcttgcatctactaccgcaatcgagggcaccgctaatctaatagtatcgcttgctggctactccacaggggcaagctcgactatctgggctaacaaccatcaaatcggcaacctcactagtggcactcctgagttactgaatgaccccagcttgtatcgatctggaacgactgctggcgaatggaggtatttcgagtttggattcgacgctgcaagcgtgctaacaactggaacgaacgagatcacatttcaactgacaagaaacacgacctggcatggatttatgtgggatagcatcgtgctggaattatag

SEQ ID NO: 7539 - protein, 571 aa, Muscodor strobelii
  misc_feature: SGI Peptide ID NO. 562279
  misc_feature (1)..(570): NCBI GI: 119483602 Blast Desc: NFIA_094270 [Neosartorya fischeri NRRL 181] gi|119409860|gb|EAW19807.1| conserved [Neosartorya fischeri NRRL 181]
  misc_feature (2)..(570): NCBI GI: 70983191 Blast Desc: rhamnogalacturonase [Aspergillus fumigatus Af293] gi|66844748|gb|EAL85085.1| rhamnogalacturonase, [Aspergillus fumigatus Af293] gi|159124007|gb|EDP49126.1| rhamnogalacturonase,
  misc_feature (2)..(571): NCBI GI: 189192456 Blast Desc: rhamnogalacturonate lyase precursor [Pyrenophora tritici-repentis Pt-1C-BFP] gi|187974173|gb|EDU41672.1| rhamnogalacturonate lyase precursor [Pyrenophora tritici-repentis
  misc_feature (2)..(570): NCBI GI: 169599619 Blast Desc: SNOG_02633 [Phaeosphaeria nodorum SN15] gi|111068244|gb|EAT89364.1| SNOG_02633 [Phaeosphaeria nodorum SN15]
  misc_feature (25)..(438): NCBI GI: 115402239 Blast Desc: [Aspergillus terreus NIH2624] gi|114189042|gb|EAU30742.1| [Aspergillus terreus NIH2624]
  misc_feature (7)..(570): NCBI GI: 256723523 Blast Desc: NECHADRAFT_106167 [Nectria haematococca mpVI 77-13-4]
  misc_feature (26)..(570): NCBI GI: 238500780 Blast Desc: rhamnogalacturonase, [Aspergillus flavus NRRL3357] gi|220691861|gb|EED48208.1| rhamnogalacturonase, [Aspergillus flavus NRRL3357]
  misc_feature (26)..(570): NCBI GI: 169782329 Blast Desc: [Aspergillus oryzae RIB40] gi|83774370|dbj|BAE64494.1| protein product [Aspergillus oryzae]
  misc_feature (25)..(570): NCBI GI: 261352672 Blast Desc: rhamnogalacturonate lyase [Verticillium albo-atrum VaMs.102]
  misc_feature (20)..(567): NCBI GI: 254572684 Blast Desc: [Pichia pastoris GS115] gi|238033250|emb|CAY71272.1| [Pichia pastoris GS115]
MMTTFLLIAVSLLVHLKSVLSTATGPFLSQIDDGTWMIGNELWNLTQGPTYGVKLYYQDSDCVGDAVGHYVSYNGAASNLKWTSASVVKQDTYEGSNFIDVAFTAAEGEMHWVIFSGLSGAYQYFVNHALPQLGEFRTLWRLDNTTFPRGKTSLRDEELPPLSDYIDANKVQDETWLRPDGTGYITKYDFTDWIRTQTYYGVYGEEFGSWYINAGKDYYNGNHLKQELMVHRESATGDAVQLNMIHGTHFQVSSADDFPEGKMWGPWLWYLNNGSKDDAAERAEAEFSTWPYAWLDDVAYNARGLVKGLLVLSDGRPGANAAVFLGDNNPNKTALDMGSSYYYTTYADSDGQFEFTHVRSATYGLQAWSNGSTIADVTTSFLRNDVEVSSTDTTNLGILSWAVSNKTQIFRIGDFDRTSYGFAYGGAPHQHALVSKCPADLVYNVSSSIYSDWCFGQTYLGNWTVSFELASTTAIEGTANLIVSLAGYSTGASSTIWANNHQIGNLTSGTPELLNDPSLYRSGTTAGEWRYFEFGFDAASVLTTGTNEITFQLTRNTTWHGFMWDSIVLEL

SEQ ID NO: 7540 - DNA, 1215 bp, Muscodor strobelii
  misc_feature: SGI cDNA ID NO. 562280
  misc_feature: Encodes the peptide sequence at SEQ ID NO 7541
atgtggcttctcgacacatctacaattcagctcaaattctttgaagtctcgccggaaagatacgccattctgtcacacgtgtggggcgaggatgaagtgctctttcacgaactcgaggaacagcgcaatacaactttgaagaaaagcggatggcggaaaatcacgacgttttgtgaaaaagcgcaagctattgggcttgaatatggatgggtcgatacttgctgcattgacaaacgcagcagcgcggagctgagcgaggccattaactcgatgttcgagtattatagcaacgcggaagcctgcatcatctacctcgcggacgtcttaggggacgaagacgacggcgaagcgcgactaaagtcgtttagactgagcaaatggttgagaagaggatggacactacaagaactcattgctcctaggaaacgactcttcttcacctcgaactggtctgctctttctgatgatcttccactcttgattcagaccctggctgagattactcatatttcacatgacgtactagatcacaccactggacttcacagaatacctttggcaactcgcttctcttgggccgcaggccgcattacaaagcgacctgaggatactgcctacagcttgatgggtatctgtcaagtgaaaatgccaattctttatggagaaggaaaggatcgcgcatttcgcaggctacaattggagactatgcaattatcgtgcgacatgagcatatttgcgtggcgacgtggccctactgctagcattctagccgagtcgccggatgacttcaaaaacagtcgtgatgtctttccaatactggagtcgacgtattctccctactacatgaccaacgctgggctatttattcgattgaaaattgccacggtcagagagatctcagaacaggtttttgctactacacttgatgagaaaggtgatcttcgtgccgcattacactgcagagtgccttgtcccacggaagaatcacaagctctgttgatacacgtagtatgtttacaccataactacgtggttaacggaaaaccaactttgggcatctgtcggagcgaatgcgataaatgggagatgatccctttttctcatatggataaatgtccatcctacgacgttttaatgctagaagaccaccacttcaagcaatttattctaacacgtgtcaaggaggtgacacatggaaagtataacctaaactga

SEQ ID NO: 7541 - protein, 404 aa, Muscodor strobelii
  misc_feature: SGI Peptide ID NO. 562280
  misc_feature (21)..(136): Pfam Id: PF06985 Pfam Desc: Heterokaryon incompatibility protein (HET)
  misc_feature (21)..(106): Pfam Id: PF06985 Pfam Desc: Heterokaryon incompatibility protein (HET)
  misc_feature (1)..(402): NCBI GI: 171688176 Blast Desc: protein product [Podospora anserina] gi|170944050|emb|CAP70160.1| protein product [Podospora anserina]
  misc_feature (1)..(321): NCBI GI: 46139867 Blast Desc: FG11448.1 [Gibberella zeae PH-1]
  misc_feature (11)..(293): NCBI GI: 256722427 Blast Desc: NECHADRAFT_35001 [Nectria haematococca mpVI 77-13-4]
  misc_feature (1)..(339): NCBI GI: 238493477 Blast Desc: conserved [Aspergillus flavus NRRL3357] gi|220696469|gb|EED52811.1| conserved [Aspergillus flavus NRRL3357]
  misc_feature (1)..(293): NCBI GI: 256722255 Blast Desc: NECHADRAFT_52327 [Nectria haematococca mpVI 77-13-4]
  misc_feature (1)..(291): NCBI GI: 256733553 Blast Desc: [Nectria haematococca mpVI 77-13-4]
  misc_feature (1)..(296): NCBI GI: 164425178 Blast Desc: NCU06304 [Neurospora crassa OR74A] gi|157070820|gb|EAA33330.2| conserved [Neurospora crassa OR74A]
  misc_feature (1)..(263): NCBI GI: 46107392 Blast Desc: FG00579.1 [Gibberella zeae PH-1]
  misc_feature (1)..(291): NCBI GI: 46128083 Blast Desc: FG08419.1 [Gibberella zeae PH-1]
  misc_feature (1)..(293): NCBI GI: 119481395 Blast Desc: HET domain protein [Neosartorya fischeri NRRL 181] gi|119408880|gb|EAW18829.1| HET domain protein [Neosartorya fischeri NRRL 181]
MWLLDTSTIQLKFFEVSPERYAILSHVWGEDEVLFHELEEQRNTTLKKSGWRKITTFCEKAQAIGLEYGWVDTCCIDKRSSAELSEAINSMFEYYSNAEACIIYLADVLGDEDDGEARLKSFRLSKWLRRGWTLQELIAPRKRLFFTSNWSALSDDLPLLIQTLAEITHISHDVLDHTTGLHRIPLATRFSWAAGRITKRPEDTAYSLMGICQVKMPILYGEGKDRAFRRLQLETMQLSCDMSIFAWRRGPTASILAESPDDFKNSRDVFPILESTYSPYYMTNAGLFIRLKIATVREISEQVFATTLDEKGDLRAALHCRVPCPTEESQALLIHVVCLHHNYVVNGKPTLGICRSECDKWEMIPFSHMDKCPSYDVLMLEDHHFKQFILTRVKEVTHGKYNLN

SEQ ID NO: 7542 - DNA, 1609 bp, Muscodor strobelii
  misc_feature: SGI EST ID NO. CUFF.18732.0
  misc_feature: Variant of the nucleotide sequence at SEQ ID NO 7540
cccacttgacccctcgccccccacgctacgtcaactcttcagattcatctgcgtctacgcccaggaggtgtgaagcaagtattcagcactcacctacgcatctggcagaaaattagacatgtggcttctcgacacatctacaattcagctcaaattctttgaagtctcgccggaaagatacgccattctgtcacacgtgtggggcgaggatgaagtgctctttcacgaactcgaggaacagcgcaatacaactttgaagaaaagcggatggcggaaaatcacgacgttttgtgaaaaagcgcaagctattgggcttgaatatggatgggtcgatacttgctgcattgacaaacgcagcagcgcggagctgagcgaggccattaactcgatgttcgagtattatagcaacgcggaagcctgcatcatctacctcgcggacgtcttaggggacgaagacgacggcgaagcgcgactaaagtcgtttagactgagcaaatggttgagaagaggatggacactacaagaactcattgctcctaggaaacgactcttcttcacctcgaactggtctgctctttctgatgatcttccactcttgattcagaccctggctgagattactcatatttcacatgacgtactagatcacaccactggacttcacagaatacctttggcaactcgcttctcttgggccgcaggccgcattacaaagcgacctgaggatactgcctacagcttgatgggtatctgtcaagtgaaaatgccaattctttatggagaaggaaaggatcgcgcatttcgcaggctacaattggagactatgcaattatcgtgcgacatgagcatatttgcgtggcgacgtggccctactgctagcattctagccgagtcgccggatgacttcaaaaacagtcgtgatgtctttccaatactggagtcgacgtattctccctactacatgaccaacgctgggctatttattcgattgaaaattgccacggtcagagagatctcagaacaggtttttgctactacacttgatgagaaaggtgatcttcgtgccgcattacactgcagagtgccttgtcccacggaagaatcacaagctctgttgatacacgtagtatgtttacaccataactacgtggttaacggaaaaccaactttgggcatctgtcggagcgaatgcgataaatgggagatgatccctttttctcatatggataaatgtccatcctacgacgttttaatgctagaagaccaccacttcaagcaatttattctaacacgtgtcaaggaggtgacacatggaaagtataacctaaactgagtaaatacaggcaatgtaggaacgaacaagcgcacgaaacagatattgtaagggtatatttctgttaagccgttacggtatcgagcatgcgcacttgattgaaggacttgaggacggcaatactctaagtacgctataagcttcgctgcgaacccattcgggccctgatatacgtcttgccatatcgttatgtccttctgcaatacgcaattgttatgctcatgaaggtcatagacagcccataatacgtgaatttggtttaatttcttgccgagc

SEQ ID NO: 7543 - DNA, 1173 bp, Muscodor strobelii
  misc_feature: SGI cDNA ID NO. 562281
  misc_feature: Encodes the peptide sequence at SEQ ID NO 7544
atgagcttgatcttcacctttctacaaatgtgcgatttggacaacaaaatgccattctttgcaagggattttccgacgaccaaaaagccaagccaatggcccatggacgatgtcgagaccaaggatacgggactagaggccggaggtacagtcctatcgggcattatttgcgaggctcaggattccagctctgacgagtctgccgttcctcggattagatcgatccagcacagaccgagcatgcgtgtgatcaacatggatatagaatcagagcagaaaggacggtggacatctgtcgtcaagcatagtctcggctccgaggaaaattccaaaacttgcttcgccggagcgaacgacgaagtgaccgataacgagaggcacgaagagaatcacagtgggggctggccggaagcgaaggagagcgatatagaaagacacaaagcaactagttactggggagaatcgtatgaagagatgcaagagaaagcggaacaactcctcgcagggacagacgaagaatggctatcacgagtctggaaatctggtttcgtcaacgaattacttccagccttcatcgaaaaggggaagtcaggcacgatctccaagaaaacaagaagaggggtcaaggaaacaatcgatactgaagtatcccgaggcaaagaatggcctatcaaattctgcgaatttcctgacgagcttctatccgccgtccgcgacgcaaaagacacaacgcccatcgacgcgcggagagaagtatacgtccttctcaagcaccggtttatgggccccagacacaccacagtctgcatacactacgtaagcgacacgaaacatggtgcaaacgaacgaatgatggattacgtcgactattttagaggaatattgtttccgagaatagatccgagagtaaaattcacccgcatttccgagatcgatcctaaaacgaagtacgcgcgcgtctcagacggaaagggagaattgttctgggatatcggctcgtggaacggtggtctcctagagatcaagtttgaacacatcgctggcttcggtgagctgtttgagacggtgaaaatggacgttgatgagtatctgtcgcatttaacgcgcgtggcatctgggtataacgcgagccgcgggcttatacctgaatctgtggcgatcgaggaagagtga

SEQ ID NO: 7544 - protein, 390 aa, Muscodor strobelii
  misc_feature: SGI Peptide ID NO. 562281
MSLIFTFLQMCDLDNKMPFFARDFPTTKKPSQWPMDDVETKDTGLEAGGTVLSGIICEAQDSSSDESAVPRIRSIQHRPSMRVINMDIESEQKGRWTSVVKHSLGSEENSKTCFAGANDEVTDNERHEENHSGGWPEAKESDIERHKATSYWGESYEEMQEKAEQLLAGTDEEWLSRVWKSGFVNELLPAFIEKGKSGTISKKTRRGVKETIDTEVSRGKEWPIKFCEFPDELLSAVRDAKDTTPIDARREVYVLLKHRFMGPRHTTVCIHYVSDTKHGANERMMDYVDYFRGILFPRIDPRVKFTRISEIDPKTKYARVSDGKGELFWDIGSWNGGLLEIKFEHIAGFGELFETVKMDVDEYLSHLTRVASGYNASRGLIPESVAIEEE

SEQ ID NO: 7545 - DNA, 1314 bp, Muscodor strobelii
  misc_feature: SGI EST ID NO. CUFF.18741.0
  misc_feature: Variant of the nucleotide sequence at SEQ ID NO 7543
cgagaccaaggatacgggactagaggccggaggtacagtcctatcgggcattatttgcgaggctcaggattccagctctgacgagtctgccgttcctcggattagatcgatccagcacagaccgagcatgcgtgtgatcaacatggatatagaatcagagcagaaaggacggtggacatctgtcgtcaagcatagtctcggctccgaggaaaattccaaaacttgcttcgccggagcgaacgacgaagtgaccgataacgagaggcacgaagagaatcacagtgggggctggccggaagcgaaggagagcgatatagaaagacacaaagcaactagttactggggagaatcgtatgaagagatgcaagagaaagcggaacaactcctcgcagggacagacgaagaatggctatcacgagtctggaaatctggtttcgtcaacgaattacttccagccttcatcgaaaaggggaagtcaggcacgatctccaagaaaacaagaagaggggtcaaggaaacaatcgatactgaagtatcccgaggcaaagaatggcctatcaaattctgcgaatttcctgacgagcttctatccgccgtccgcgacgcaaaagacacaacgcccatcgacgcgcggagagaagtatacgtccttctcaagcaccggtttatgggccccagacacaccacagtctgcatacactacgtaagcgacacgaaacatggtgcaaacgaacgaatgatggattacgtcgactattttagaggaatattgtttccgagaatagatccgagagtaaaattcacccgcatttccgagatcgatcctaaaacgaagtacgcgcgcgtctcagacggaaagggagaattgttctgggatatcggctcgtggaacggtggtctcctagagatcaagtttgaacacatcgctggcttcggtgagctgtttgagacggtgaaaatggacgttgatgagtatctgtcgcatttaacgcgcgtggcatctgggtataacgcgagccgcgggcttatacctgaatctgtggcgatcgaggaagagtgatagataccaaaaggcaatgagtggagtccggaacgtgttcggttacaatagagaggaggtatctcgcgggatgaaaacgagaacggcgattgcttctgatattaaatggctacctttgggctttttttggaggcaacggctttggattttatcaccttcaatggttcaccactaataatcgagagcagtaaagagagtaatctagacacagaaaaaatttcagtaacaatagataattattcctaatacccagc

SEQ ID NO: 7546 - DNA, 1962 bp, Muscodor strobelii
  misc_feature: SGI cDNA ID NO. 562282
  misc_feature: Reduced expression when VOC is produced
  misc_feature: Encodes the peptide sequence at SEQ ID NO 7547
atggcgcccgagcctcggtcgacgagtccgacgtcgccggctctcgaacacgacacttttcccaaccctcagttcccgcctggacccgcgagtatcatctcctcccgcatgacggatattgcatcccaagatggtgaccacgacgacaagaacggctcgagtccaaagaggggcgcacccggcgcaacctccgaatcacgcccaggcactgcgaggactggcgtctcgtcctctcgaggtggcgtctggccccaggccatcccactgcgcatgggtttgcagagaggctcggtaagcagcgcctcgggaagtggacgtcccatcagttccgccagtcgaagccacgcccctctagcgtcccatggtttctttcgccccatgagcgctcagaaactccaggcccagcgaggagccggccggcctccgtctatgagccagatgaaccagtcattcacccacaacttggccgacgacgatgctcagaccccgtcccctggagcattcgctcagaatctacgacctacgagtggctcggacgatctacagccgccgccttcgagaggaacagaaatcacggagccatatgatcgtttcacagccaccacaagtcccacccaagggcaccatgccactgagagtgtcaccgagagcatgcggcctgtgctgcgaaagaaggcagaagagaagggccttaccttgaatctagatcagagcgcatcccgacctgctggcaacctgcctagtcctatcaagacgccccggtccttcagatccagcatattcatgtcgggcaagggcgatgccatgtccaatgcgcctaaccataacatgcgtggagctgagaagttatcgtcaggtgcctcatcgccgcacttgaatgcccacgccgctgatgctgctgataacagcatgaagcacgcaaatcctgtatttgggcatgggcgcaaccacgaatatttcgagggaaatactgtcttctgtgccggcggacgtctgcaaaatacccgccatcgcccgataaacatagcgaccggctcgctagtggtcattccgtccgttctcttcttcgcggcatcggccccttggctttggcataacgtatcccccgccattccaatcatttacgcctatctcttctacataaccatgtcatcctttatccgcgcatcagcttcggatccaggaatcatgcctcgcaatttgcatcagttccctcccgcggatgagaatgaagacccgttgcgactggctccaccaactaacgactggacgctgataaaatcagcagagtcatccaccgcggccatggaagtgccgaccaagttctgtaagacttgtggtatctggcgaccaccacgagcccaccattgtcgcttgtgcgataattgtgtggagacccaggatcatcattgtgtatggatcaacaactgtgtgggacgacggaactatcgatacttcttcacctttgttacttcggcctctattttgtgcctttacttaattggcacatcccttgcccagatcctcctctattctaaccgcgagcacatctcattcggccaggccataaaccacttccgcatccctttcgccttagtcatttacggtgtcttcggcctgctttacccctctgccttgactggctatcatcttttcctcatgggacgaggtgagacaaccagagagtttttgaactcacacaagttcatgaagaaggatcgttaccgcgccttcacccagggcaatatatttaagaactggattgtcgtcttatgtcgtcccagaccaccgacgtactatcggttcaagaaccgttttgaagaaggcgaccagcgctttggcgagagacggaatgctcaggaaaccagagctcccagagtggatcaagagctggaaatggattcagtgcgaccgtttcaggggccaatgactttacaaaacgaaacctcggctactcgataa

SEQ ID NO: 7547 - protein, 653 aa, Muscodor strobelii
  misc_feature: SGI Peptide ID NO. 562282
  misc_feature (432)..(496): Pfam Id: PF01529 Pfam Desc: DHHC zinc finger domain
  misc_feature (28)..(644): NCBI GI: 39943168 Blast Desc: MGG_03664 [Magnaporthe grisea 70-15] gi|145009745|gb|EDJ94401.1| MGG_03664 [Magnaporthe grisea 70-15]
  misc_feature (1)..(652): NCBI GI: 74629087 Blast Desc: MGG_03664 [Magnaporthe grisea 70-15] gi|145009745|gb|EDJ94401.1| MGG_03664 [Magnaporthe grisea 70-15]
  misc_feature (40)..(647): NCBI GI: 116193629 Blast Desc: CHGG_06532 [Chaetomium globosum CBS 148.51] gi|88182445|gb|EAQ89913.1| CHGG_06532 [Chaetomium globosum CBS 148.51]
  misc_feature (29)..(649): NCBI GI: 46128307 Blast Desc: FG08531.1 [Gibberella zeae PH-1] gi|82592831|sp|Q4I2M7.1|ERFB_GIBZE RecName: Full=Palmitoyltransferase ERF2; AltName: Full=DHHC cysteine-rich
  misc_feature (1)..(652): NCBI GI: 38566895 Blast Desc: conserved [Neurospora crassa]
  misc_feature (5)..(623): NCBI GI: 171684967 Blast Desc: protein product [Podospora anserina] gi|170942444|emb|CAP68096.1| protein product [Podospora anserina]
  misc_feature (1)..(636): NCBI GI: 225685246 Blast Desc: palmitoyltransferase erf2 [Paracoccidioides brasiliensis Pb03]
  misc_feature (26)..(636): NCBI GI: 226279299 Blast Desc: palmitoyltransferase erf2 [Paracoccidioides brasiliensis Pb01]
  misc_feature (1)..(636): NCBI GI: 226294580 Blast Desc: palmitoyltransferase erf2 [Paracoccidioides brasiliensis Pb18]
  misc_feature (27)..(641): NCBI GI: 255945049 Blast Desc: Pc20g07690 [Penicillium chrysogenum Wisconsin 54-1255] gi|211588027|emb|CAP86098.1| Pc20g07690 [Penicillium chrysogenum Wisconsin 54-1255]
  misc_feature: Useful for introducing or modulating the production of volatile compounds
MAPEPRSTSPTSPALEHDTFPNPQFPPGPASIISSRMTDIASQDGDHDDKNGSSPKRGAPGATSESRPGTARTGVSSSRGGVWPQAIPLRMGLQRGSVSSASGSGRPISSASRSHAPLASHGFFRPMSAQKLQAQRGAGRPPSMSQMNQSFTHNLADDDAQTPSPGAFAQNLRPTSGSDDLQPPPSRGTEITEPYDRFTATTSPTQGHHATESVTESMRPVLRKKAEEKGLTLNLDQSASRPAGNLPSPIKTPRSFRSSIFMSGKGDAMSNAPNHNMRGAEKLSSGASSPHLNAHAADAADNSMKHANPVFGHGRNHEYFEGNTVFCAGGRLQNTRHRPINIATGSLVVIPSVLFFAASAPWLWHNVSPAIPIIYAYLFYITMSSFIRASASDPGIMPRNLHQFPPADENEDPLRLAPPTNDWTLIKSAESSTAAMEVPTKFCKTCGIWRPPRAHHCRLCDNCVETQDHHCVWINNCVGRRNYRYFFTFVTSASILCLYLIGTSLAQILLYSNREHISFGQAINHFRIPFALVIYGVFGLLYPSALTGYHLFLMGRGETTREFLNSHKFMKKDRYRAFTQGNIFKNWIVVLCRPRPPTYYRFKNRFEEGDQRFGERRNAQETRAPRVDQELEMDSVRPFQGPMTLQNETSATR

SEQ ID NO: 7548 - DNA, 3277 bp, Muscodor strobelii
  misc_feature: SGI EST ID NO. CUFF.18766.0
  misc_feature: Variant of the nucleotide sequence at SEQ ID NO 7546
gacatggtgatttcttttccaacgccagcctccatcgtcacccgcgacgccgcctcaatccccgagtctcttcgcctgcgggcgtgacggatctctcgccattcctttatacccatttccttctcatcctgaacatagtccgccgcttgaccagccggtttctttcaaacgcccccaaatcagaccgtcgattcccttcttcccacgacactaagcccacattcctttaccaagtcgcccccaacaacaacggaccagagtataatatctgaccaccctccttgagaaaagtcttgaaggttaccagtccgacaacatccgacaagttcgccaggcgcatattggtcggattgaaaactgagaacgtttcggaagaccagactcctgcattcaccccgagttgatgatatcaaacgaaaagtactgcacgtcgcgattgagtactcgagacttacccattcatcatggcgcccgagcctcggtcgacgagtccgacgtcgccggctctcgaacacgacacttttcccaaccctcagttcccgcctggacccgcgagtatcatctcctcccgcatgacggatattgcatcccaagatggtgaccacgacgacaagaacggctcgagtccaaagaggggcgcacccggcgcaacctccgaatcacgcccaggcactgcgaggactggcgtctcgtcctctcgaggtggcgtctggccccaggccatcccactgcgcatgggtttgcagagaggctcggtaagcagcgcctcgggaagtggacgtcccatcagttccgccagtcgaagccacgcccctctagcgtcccatggtttctttcgccccatgagcgctcagaaactccaggcccagcgaggagccggccggcctccgtctatgagccagatgaaccagtcattcacccacaacttggccgacgacgatgctcagaccccgtcccctggagcattcgctcagaatctacgacctacgagtggctcggacgatctacagccgccgccttcgagaggaacagaaatcacggagccatatgatcgtttcacagccaccacaagtcccacccaagggcaccatgccactgagagtgtcaccgagagcatgcggcctgtgctgcgaaagaaggcagaagagaagggccttaccttgaatctagatcagagcgcatcccgacctgctggcaacctgcctagtcctatcaagacgccccggtccttcagatccagcatattcatgtcgggcaagggcgatgccatgtccaatgcgcctaaccataacatgcgtggagctgagaagttatcgtcaggtgcctcatcgccgcacttgaatgcccacgccgctgatgctgctgataacagcatgaagcacgcaaatcctgtatttgggcatgggcgcaaccacgaatatttcgagggaaatactgtcttctgtgccggcggacgtctgcaaaatacccgccatcgcccgataaacatagcgaccggctcgctagtggtcattccgtccgttctcttcttcgcggcatcggccccttggctttggcataacgtatcccccgccattccaatcatttacgcctatctcttctacataaccatgtcatcctttatccgcgcatcagcttcggatccaggaatcatgcctcgcaatttgcatcagttccctcccgcggatgagaatgaagacccgttgcgactggctccaccaactaacgactggacgctgataaaatcagcagagtcatccaccgcggccatggaagtgccgaccaagttctgtaagacttgtggtatctggcgaccaccacgagcccaccattgtcgcttgtgcgataattgtgtggagacccaggatcatcattgtgtatggatcaacaactgtgtgggacgacggaactatcgatacttcttcacctttgttacttcggcctctattttgtgcctttacttaattggcacatcccttgcccagatcctcctctattctaaccgcgagcacatctcattcggccaggccataaaccacttccgcatccctttcgccttagtcatttacggtgtcttcggcctgctttacccctctgccttgactggctatcatcttttcctcatgggacgaggtgagacaaccagagagtttttgaactcacacaagttcatgaagaaggatcgttaccgcgccttcacccagggcaatatatttaagaactggattgtcgtcttatgtcgtcccagaccaccgacgtactatcggttcaagaaccgttttgaagaaggcgaccagcgctttggcgagagacggaatgctcaggaaaccagagctcccagagtggatcaagagctggaaatggattcagtgcgaccgtttcaggggccaatgactttacaaaacgaaacctcggctactcgataaatcacaccacgtcttacttcatcttctaatacaaccccagggggcatgttcaaacaccctgttcacgttccgatcgtgctttttacgctttatacccataataatcgttctcttttatgacaatttctttgaatctcggaccctttgccaggcgaagccttcgtgcaaacactttacttacatctaatcaggccattagggctttcatccaccatacgagcaatgagacgcaaagcacctttcgagagtggggacacgggaacgtctttcgatcgatggacgttagcaatcagagggcaaggaaaaggtgttgaaaacgaagatcatgtttacatttgagacgtgtactgtacaacagagggggaactgaactggcttgattctaactgcgtctgtctttagatacactgtatcgtagcctatttggtggtctataccaattctccttcaattcatgtacattgcttcttacatgactcgattttcatgcctagtgtgactaggagacaagttaatcgtctagatagggagtcgcaactactgcagcaaccaccctaacgacaactcatgcctcctataacactacaccggactattatcgataccatcatatacgtccgaatagcggcaggtgctggtttgggcaactgctcccttaggtgctacccacctacctaggcaactgcgctggcaaaactccggacaaggcagcaagcacccttataaggtccaatgtggagccactctttcacctaggggttgatggcttgagttggctggttgtatgttaaatgtcgtcccagacttctctgtgacgtccccttaggcttattttttcgattcccgtactg

SEQ ID NO: 7549 - DNA, 405 bp, Muscodor strobelii
  misc_feature: SGI cDNA ID NO. 562283
  misc_feature: Reduced expression when VOC is produced
  misc_feature: Encodes the peptide sequence at SEQ ID NO 7550
atggcttccttcatcgcccgccgcgccgccctgtcctccaggaccttctctacctccgcccgccgcttcgccgagacgaacccggctctcaaggaggagacaaagcgcaaccccgagcttatgatcctcggtgccgtcatggtcgccgctcttggtggtgcaggtctctacttcggccgttcgcccaccggttccacatccgaaaccaaagtcggcatcgcccgcgagggtatgccctgggagaccgatgccaccgagggcaagtaccgctaccaccccggcggtgacacctctcaagagccaaaggacgccccctccgctgtcaatgtcgtcgtcgtccccgatgtcaacctgcccaagcacctccacgagaagtacaacaagtggggaaaagacggctactag

SEQ ID NO: 7550 - protein, 134 aa, Muscodor strobelii
  misc_feature: SGI Peptide ID NO. 562283
  misc_feature (1)..(134): NCBI GI: 46128305 Blast Desc: FG08530.1 [Gibberella zeae PH-1]
  misc_feature (1)..(134): NCBI GI: 171684965 Blast Desc: protein product [Podospora anserina] gi|170942443|emb|CAP68095.1| protein product [Podospora anserina]
  misc_feature (1)..(134): NCBI GI: 261357925 Blast Desc: [Verticillium albo-atrum VaMs.102]
  misc_feature (1)..(134): NCBI GI: 39943166 Blast Desc: MGG_03663 [Magnaporthe grisea 70-15] gi|145009746|gb|EDJ94402.1| MGG_03663 [Magnaporthe grisea 70-15]
  misc_feature (1)..(134): NCBI GI: 85115461 Blast Desc: NCU02016 [Neurospora crassa OR74A] gi|28926677|gb|EAA35645.1| NCU02016 [Neurospora crassa OR74A] gi|38566896|emb|CAE76201.1| conserved [Neurospora crassa]
  misc_feature (30)..(134): NCBI GI: 154296170 Blast Desc: BC1G_12912 [Botryotinia fuckeliana B05.10] gi|150843476|gb|EDN18669.1| BC1G_12912 [Botryotinia fuckeliana B05.10]
  misc_feature (30)..(134): NCBI GI: 156056591 Blast Desc: SS1G_04026 [Sclerotinia sclerotiorum 1980] gi|154701812|gb|EDO01551.1| SS1G_04026 [Sclerotinia sclerotiorum 1980]
  misc_feature (1)..(134): NCBI GI: 169595258 Blast Desc: SNOG_00366 [Phaeosphaeria nodorum SN15] gi|111070741|gb|EAT91861.1| SNOG_00366 [Phaeosphaeria nodorum SN15]
  misc_feature (1)..(134): NCBI GI: 189202684 Blast Desc: conserved [Pyrenophora tritici-repentis Pt-1C-BFP] gi|187984777|gb|EDU50265.1| conserved [Pyrenophora tritici-repentis Pt-1C-BFP]
  misc_feature (1)..(134): NCBI GI: 238505948 Blast Desc: conserved [Aspergillus flavus NRRL3357] gi|220690290|gb|EED46640.1| conserved [Aspergillus flavus NRRL3357]
  misc_feature: Useful for introducing or modulating the production of volatile compounds
MASFIARRAALSSRTFSTSARRFAETNPALKEETKRNPELMILGAVMVAALGGAGLYFGRSPTGSTSETKVGIAREGMPWETDATEGKYRYHPGGDTSQEPKDAPSAVNVVVVPDVNLPKHLHEKYNKWGKDGY

SEQ ID NO: 7551 - DNA, 842 bp, Muscodor strobelii
  misc_feature: SGI EST ID NO. CUFF.18753.0
  misc_feature: Variant of the nucleotide sequence at SEQ ID NO 7549
ccgcaactcaacctgcatcgtcctttgaactgcgaaaacaccagacagtcccgacctcacttccacactcatacaatcgccgacatctccactccaaaccgcaacaatggcttccttcatcgcccgccgcgccgccctgtcctccaggaccttctctacctccgcccgccgcttcgccgagacgaacccggctctcaaggaggagacaaagcgcaaccccgagcttatgatcctcggtgccgtcatggtcgccgctcttggtggtgcaggtctctacttcggccgttcgcccaccggttccacatccgaaaccaaagtcggcatcgcccgcgagggtatgccctgggagaccgatgccaccgagggcaagtaccgctaccaccccggcggtgacacctctcaagagccaaaggacgccccctccgctgtcaatgtcgtcgtcgtccccgatgtcaacctgcccaagcacctccacgagaagtacaacaagtggggaaaagacggctactagattccaataccgataccgacatatcaagaaagacggagcgaggaggagtgaaggatgtgctatcaatatgaaacctgttaaagccccgtttcctttgtccctactagacagacggctcgatgattggtatccgcccgccttgtacataaatacagagtcaacaatcaaattataaacaaatcctacgttttcacctcctttcctaatgttacttaccgtgagttagagaggatcgggagaaacctgcaaatcacctaagtatcaaatgcatttcatgttcgctcgtcgtctacaagataatgatgatctggctagattttgttcatcatcg

SEQ ID NO: 7552 - DNA, 1428 bp, Muscodor strobelii
  misc_feature: SGI cDNA ID NO. 562284
  misc_feature: Reduced expression when VOC is produced
  misc_feature: Encodes the peptide sequence at SEQ ID NO 7553
atggacacgaagactaaccccgcgaagcaagcgccgttgggccggcctcaactctcgatgcggaacagctcgtacctcaaagagcaccagcaataccgctctcccgttcagcctgagaaccatttcggcatcgacgctgttgtagaagacttgcaaggctctcgcatctcgccgcccgcagctttcagtcccttcagcggcgtccctagcaaagacgacccgcccccgcgcatcgtcgagggactgagccatgatttcatccacccaaattgcgcgcctcctcgcggcacggcatcgcagcgcatcattgccaccttgatgtacaagacgaagacgtcttctggtccaaaagatgaaaatgctcctcgctcgatcaactcgtcgacctccgatctccccgccaactttgcgcccaccaccaatatcgaggacttcccgcttgagccaccagacgccactgagcccgagcccctggacaatatctacggctcctacgtgtcgccaatgtgcatcagctcattcctacatctcatgtccaccttccccctccccaaaggcgtagagcaagccacctcttcccaccgttgtctcgatgacccggagcatcccttggtcgtagagctgacacttgctccggccccatcccccgactacctgtcgctgaaagatctgcgaaaacacgaacttatctaccgcttcgaacgagaatggaacgtagacatcaccctccaagccgatactctatggcggcgccacccccgtctagtagtcttcgacatggacagcacgctgatcactcaagaagtcatcgatctaatggcacagacactcagcgacccgcctgatctcgcagaaaaagtctctgcaatcacacaccgcgccatggtcggcgaactcgagtttgaagctgcgttccgggagcgcgttgcgttattaaagggtctaccagagactgtgtttaatatacttcgaccaaaactacagatcacccctggcatcccacaacttataaaggcgttgaagaaattaggaatcacaactgcggtactctccggtggattcctacctcttaccgcatgggtggcgaaggatctaggcatcgactacgcgcacgcgaacgacgtcgtcatcgacgataatggtcgattcacaggtgaggtcaagggcaagatagtaggcaaggagatgaagaaggagatgcttcttagcatcgcgaagagggagggtatacagctcgaacaggtcgtggctgtgggcgatggcgcgaacgatctgcttatgctgggcgcagctggactaggcgtcgcgtggaatgcgaagcctagggtgcagatggaggctagtgccagattgaacggggagagtctattggatttgctgtacctctttgggttcatgagggaggaggttgagatgctcgtttcgtga

SEQ ID NO: 7553 - protein, 475 aa, Muscodor strobelii
  misc_feature: SGI Peptide ID NO. 562284
  misc_feature (253)..(441): Pfam Id: PF00702 Pfam Desc: haloacid dehalogenase-like hydrolase
  misc_feature (401)..(436): Pfam Id: PF08282 Pfam Desc: haloacid dehalogenase-like hydrolase
  misc_feature (6)..(473): NCBI GI: 171684989 Blast Desc: protein product [Podospora anserina] gi|170942455|emb|CAP68107.1| protein product [Podospora anserina]
  misc_feature (6)..(474): NCBI GI: 39943162 Blast Desc: MGG_03661 [Magnaporthe grisea 70-15] gi|145009748|gb|EDJ94404.1| MGG_03661 [Magnaporthe grisea 70-15]
  misc_feature (15)..(475): NCBI GI: 261357924 Blast Desc: phosphoserine phosphatase [Verticillium albo-atrum VaMs.102]
  misc_feature (25)..(474): NCBI GI: 85115410 Blast Desc: NCU02004 [Neurospora crassa OR74A] gi|28926665|gb|EAA35633.1| conserved [Neurospora crassa OR74A] gi|38566884|emb|CAE76189.1| related to phosphoserine phosphatase
  misc_feature (1)..(475): NCBI GI: 256734122 Blast Desc: [Nectria haematococca mpVI 77-13-4]
  misc_feature (1)..(473): NCBI GI: 46128303 Blast Desc: FG08529.1 [Gibberella zeae PH-1]
  misc_feature (11)..(475): NCBI GI: 156057181 Blast Desc: phosphoserine phosphatase [Sclerotinia sclerotiorum 1980] gi|154702107|gb|EDO01846.1| phosphoserine phosphatase [Sclerotinia sclerotiorum 1980]
  misc_feature (6)..(475): NCBI GI: 154297142 Blast Desc: BC1G_12230 [Botryotinia fuckeliana B05.10] gi|150843059|gb|EDN18252.1| BC1G_12230 [Botryotinia fuckeliana B05.10]
  misc_feature (12)..(475): NCBI GI: 71000535 Blast Desc: phosphoserine phosphatase [Aspergillus fumigatus Af293] gi|66852588|gb|EAL92913.1| phosphoserine phosphatase [Aspergillus fumigatus Af293] gi|159127964|gb|EDP53079.1| A1163]
  misc_feature (12)..(475): NCBI GI: 119493156 Blast Desc: phosphoserine phosphatase [Neosartorya fischeri NRRL 181] gi|119411957|gb|EAW21900.1| phosphoserine phosphatase [Neosartorya fischeri NRRL 181]
  misc_feature (222)..(470): SWISSPROT Homolog: EC 3.1.3.3 Phosphoserine phosphatase
  misc_feature: Useful for introducing or modulating the production of volatile compounds
MDTKTNPAKQAPLGRPQLSMRNSSYLKEHQQYRSPVQPENHFGIDAVVEDLQGSRISPPAAFSPFSGVPSKDDPPPRIVEGLSHDFIHPNCAPPRGTASQRIIATLMYKTKTSSGPKDENAPRSINSSTSDLPANFAPTTNIEDFPLEPPDATEPEPLDNIYGSYVSPMCISSFLHLMSTFPLPKGVEQATSSHRCLDDPEHPLVVELTLAPAPSPDYLSLKDLRKHELIYRFEREWNVDITLQADTLWRRHPRLVVFDMDSTLITQEVIDLMAQTLSDPPDLAEKVSAITHRAMVGELEFEAAFRERVALLKGLPETVFNILRPKLQITPGIPQLIKALKKLGITTAVLSGGFLPLTAWVAKDLGIDYAHANDVVIDDNGRFTGEVKGKIVGKEMKKEMLLSIAKREGIQLEQVVAVGDGANDLLMLGAAGLGVAWNAKPRVQMEASARLNGESLLDLLYLFGFMREEVEMLVS

SEQ ID NO: 7554 - DNA, 1986 bp, Muscodor strobelii
  misc_feature: SGI EST ID NO. CUFF.18759.0
  misc_feature: Variant of the nucleotide sequence at SEQ ID NO 7552
gccttttcgtcgtatgcggcccgagcaaagctgaagctacccagtagtcagaagacctcttgatctgtgatgcgcgcattgcagattcaggcacttaaatatatatcattctgacaatcattgttcgaagagcctcgcgtctcttatccattccttatcggccatctcactgcgcaccttaagccagctaagcaggatggacacgaagactaaccccgcgaagcaagcgccgttgggccggcctcaactctcgatgcggaacagctcgtacctcaaagagcaccagcaataccgctctcccgttcagcctgagaaccatttcggcatcgacgctgttgtagaagacttgcaaggctctcgcatctcgccgcccgcagctttcagtcccttcagcggcgtccctagcaaagacgacccgcccccgcgcatcgtcgagggactgagccatgatttcatccacccaaattgcgcgcctcctcgcggcacggcatcgcagcgcatcattgccaccttgatgtacaagacgaagacgtcttctggtccaaaagatgaaaatgctcctcgctcgatcaactcgtcgacctccgatctccccgccaactttgcgcccaccaccaatatcgaggacttcccgcttgagccaccagacgccactgagcccgagcccctggacaatatctacggctcctacgtgtcgccaatgtgcatcagctcattcctacatctcatgtccaccttccccctccccaaaggcgtagagcaagccacctcttcccaccgttgtctcgatgacccggagcatcccttggtcgtagagctgacacttgctccggccccatcccccgactacctgtcgctgaaagatctgcgaaaacacgaacttatctaccgcttcgaacgagaatggaacgtagacatcaccctccaagccgatactctatggcggcgccacccccgtctagtagtcttcgacatggacagcacgctgatcactcaagaagtcatcgatctaatggcacagacactcagcgacccgcctgatctcgcagaaaaagtctctgcaatcacacaccgcgccatggtcggcgaactcgagtttgaagctgcgttccgggagcgcgttgcgttattaaagggtctaccagagactgtgtttaatatacttcgaccaaaactacagatcacccctggcatcccacaacttataaaggcgttgaagaaattaggaatcacaactgcggtactctccggtggattcctacctcttaccgcatgggtggcgaaggatctaggcatcgactacgcgcacgcgaacgacgtcgtcatcgacgataatggtcgattcacaggtgaggtcaagggcaagatagtaggcaaggagatgaagaaggagatgcttcttagcatcgcgaagagggagggtatacagctcgaacaggtcgtggctgtgggcgatggcgcgaacgatctgcttatgctgggcgcagctggactaggcgtcgcgtggaatgcgaagcctagggtgcagatggaggctagtgccagattgaacggggagagtctattggatttgctgtacctctttgggttcatgagggaggaggttgagatgctcgtttcgtgatgtcacctgggggttatgttattcacgcgaggagttgctaatcgagagtcttggaaaaagcctattgctgaggcgcggtgtcataagagcgagcatggtgatgaagggaggcaagaagaaggcatagacgggaattcatcgagatatcaacatcgagataccaactagatcaaagacagagtctagaaaagacgggtgacgattcatgagggacatgggcttaggtatcggtggccaaggttgatatgcatcaataaaaaagactactcactaaaagttgatctcagtcatggcatgcagctattcataaaatctaaaatccacctgttgcacaggccccaaagcgctaacgatgcgacgag

SEQ ID NO: 7555 - DNA, 591 bp, Muscodor strobelii
  misc_feature: SGI cDNA ID NO. 562285
  misc_feature: Encodes the peptide sequence at SEQ ID NO 7556
atggctccaacgcagcccagtcctggaactgagaagatggccgaggccaaggagaaacaagccattgagacgactcctgccgccgcgcctgagaatcgggatgccgctccgccctcggctgcggcgcccgaaccgtctcgacccaccgagtccgagacgccgaaacgacaaaaccccatatccgcatttttcggtgctctacgctctattttgatcactacgctgggacttggccatggcatgtcaaaaatgtggtggcaggttccggccctgtatggcgacacagccacacagaggccttggccacagatcacaagtttcgggagcggttgctctgctggtggcaaggctctcttctacggcttctacgacggcgtgacgggcatcgtgacccagccgatcagaggcgccaaagctggtgggtcgaagggattcttccaaggtatattttacgggttgcttggttcgattatcaagccacttcaaggattctggggacttattgggcatcctctatacggcatttcacaaagcatgaagagcggccgtgaggagcggccccgcaatgcgacggccgtttcgcctgtttga

SEQ ID NO: 7556 - protein, 196 aa, Muscodor strobelii
  misc_feature: SGI Peptide ID NO. 562285
  misc_feature (51)..(180): NCBI GI: 154297279 Blast Desc: BC1G_12475 [Botryotinia fuckeliana B05.10] gi|150843002|gb|EDN18195.1| BC1G_12475 [Botryotinia fuckeliana B05.10]
  misc_feature (51)..(180): NCBI GI: 156054106 Blast Desc: SS1G_05901 [Sclerotinia sclerotiorum 1980] gi|154703681|gb|EDO03420.1| SS1G_05901 [Sclerotinia sclerotiorum 1980]
  misc_feature (23)..(180): NCBI GI: 261191490 Blast Desc: UDP-glucose,sterol transferase [Ajellomyces dermatitidis SLH14081] gi|239589919|gb|EEQ72562.1| UDP-glucose,sterol transferase [Ajellomyces dermatitidis
  misc_feature (23)..(180): NCBI GI: 239612674 Blast Desc: UDP-glucose,sterol transferase [Ajellomyces dermatitidis ER-3]
  misc_feature (74)..(180): NCBI GI: 256730584 Blast Desc: NECHADRAFT_56998 [Nectria haematococca mpVI 77-13-4]
  misc_feature (70)..(194): NCBI GI: 115449555 Blast Desc: conserved [Aspergillus terreus NIH2624] gi|114187586|gb|EAU29286.1| conserved [Aspergillus terreus NIH2624]
  misc_feature (75)..(180): NCBI GI: 258578383 Blast Desc: CHIP6 protein [Uncinocarpus reesii 1704] gi|237903639|gb|EEP78040.1| CHIP6 protein [Uncinocarpus reesii 1704]
  misc_feature (43)..(196): NCBI GI: 169598988 Blast Desc: SNOG_02306 [Phaeosphaeria nodorum SN15] gi|160704513|gb|EAT90518.2| SNOG_02306 [Phaeosphaeria nodorum SN15]
  misc_feature (75)..(184): NCBI GI: 154295508 Blast Desc: BC1G_13379 [Botryotinia fuckeliana B05.10] gi|150844005|gb|EDN19198.1| BC1G_13379 [Botryotinia fuckeliana B05.10]
  misc_feature (75)..(183): NCBI GI: 256729700 Blast Desc: NECHADRAFT_122767 [Nectria haematococca mpVI 77-13-4]
MAPTQPSPGTEKMAEAKEKQAIETTPAAAPENRDAAPPSAAAPEPSRPTESETPKRQNPISAFFGALRSILITTLGLGHGMSKMWWQVPALYGDTATQRPWPQITSFGSGCSAGGKALFYGFYDGVTGIVTQPIRGAKAGGSKGFFQGIFYGLLGSIIKPLQGFWGLIGHPLYGISQSMKSGREERPRNATAVSPV

SEQ ID NO: 7557 - DNA, 439 bp, Muscodor strobelii
  misc_feature: SGI EST ID NO. CUFF.18775.1
  misc_feature: Variant of the nucleotide sequence at SEQ ID NO 7555
cgccaaagctggtgggtcgaagggattcttccaaggtatattttacgggttgcttggttcgattatcaagccacttcaaggattctggggacttattgggcatcctctatacggcatttcacaaagcatgaagagcggccgtgaggagcggccccgcaatgcgacggccgtttcgcctgtttgacggcagcgcgatcggacgcagggatactgtcaagttcccgaatcgtacgggttgagtcgaaagcgtaataggaacttacacaaggttcgaaggatgtagtaatcattagagacgtgtgatgcagatgtgcatcagaggcgatcattgcatgttttaaacatacccaaatccagcacctgttgtcatcaattggtacatcaattatatatctttggaataaagaaccctttgcagattcggctgggcttgtacgac

SEQ ID NO: 7558 - DNA, 390 bp, Muscodor strobelii
  misc_feature: SGI cDNA ID NO. 562286
  misc_feature: Encodes the peptide sequence at SEQ ID NO 7559
atgcggcttctcaacacagcttcttttcggcttcagctatttatgccgggtcatatcccggattacgcgatcttgtctcacctatgggataagcaagaggtcgtctttgaggattttacgagacggggcacactcgctacagatctcggagttggaaataagttgggcttcacaaagctcaaaggcgcttgtacgcttgctagccaacatggctacgaatggatctggatcgatacttgctgcatcgacaaatccagcagcgcagagcttcaggaggctatcaacaccatgtggaaatactatgcgaaatcaaatgtctgctacgcgtatatggctgatgtggctgactccaaagctgggtggagagaacatttcaaggacagtcgatga

SEQ ID NO: 7559 - protein, 129 aa, Muscodor strobelii
  misc_feature: SGI Peptide ID NO. 562286
  misc_feature (22)..(117): Pfam Id: PF06985 Pfam Desc: Heterokaryon incompatibility protein (HET)
  misc_feature (1)..(115): NCBI GI: 46139867 Blast Desc: FG11448.1 [Gibberella zeae PH-1]
  misc_feature (1)..(116): NCBI GI: 154318644 Blast Desc: BC1G_02711 [Botryotinia fuckeliana B05.10] gi|150857841|gb|EDN33033.1| BC1G_02711 [Botryotinia fuckeliana B05.10]
  misc_feature (1)..(115): NCBI GI: 171683780 Blast Desc: protein product [Podospora anserina] gi|170941850|emb|CAP67503.1| protein product [Podospora anserina]
  misc_feature (1)..(118): NCBI GI: 261354085 Blast Desc: HET domain-containing protein [Verticillium albo-atrum VaMs.102]
  misc_feature (1)..(116): NCBI GI: 256732223 Blast Desc: NECHADRAFT_93752 [Nectria haematococca mpVI 77-13-4]
  misc_feature (1)..(114): NCBI GI: 238485594 Blast Desc: ankyrin repeat-containing protein, [Aspergillus flavus NRRL3357] gi|220698914|gb|EED55253.1| ankyrin repeat-containing protein, [Aspergillus flavus NRRL3357]
  misc_feature (1)..(113): NCBI GI: 115491647 Blast Desc: [Aspergillus terreus NIH2624] gi|114197311|gb|EAU39011.1| [Aspergillus terreus NIH2624]
  misc_feature (1)..(115): NCBI GI: 169609611 Blast Desc: SNOG_07898 [Phaeosphaeria nodorum SN15] gi|160701877|gb|EAT84174.2| SNOG_07898 [Phaeosphaeria nodorum SN15]
  misc_feature (1)..(119): NCBI GI: 256720831 Blast Desc: NECHADRAFT_28122 [Nectria haematococca mpVI 77-13-4]
  misc_feature (1)..(117): NCBI GI: 256728051 Blast Desc: NECHADRAFT_83471 [Nectria haematococca mpVI 77-13-4]
MRLLNTASFRLQLFMPGHIPDYAILSHLWDKQEVVFEDFTRRGTLATDLGVGNKLGFTKLKGACTLASQHGYEWIWIDTCCIDKSSSAELQEAINTMWKYYAKSNVCYAYMADVADSKAGWREHFKDSR

SEQ ID NO: 7560 - DNA, 3672 bp, Muscodor strobelii
  misc_feature: SGI EST ID NO. CUFF.18775.2
  misc_feature: Variant of the nucleotide sequence at SEQ ID NO 7558
atacactttgttgaagtcataaaatgacacagcgtttgatgagataggttcttttatctcctggacgtattcgagaacaacaatgggagacatgaaagacaaccggcaagcaggacatggtcctcgaaggcccccagcttgaactgactctgaccagaccatgcagatgctggatggccatgatacagtgcgaagtgcgcggttttagtatcaggtactgtttagctactaatccgtagaatggccagtgagtgtttctggtaggcatttcttcatccagaggcataggatgaaacagacaactcaccaaacgcgcatcgtatgggaagcccatctcatagcatttaattaccaatgcccaaaactacacatagaagagccctgcagtgagtgattgactatcactgatataacagccttccgacatctcagcctattattcctcttccaacgccggatcgtagtatcggcggatctatcttggtcagcttgggaaacatcagaataagacttcaagtatgttgagagttggtgatcagtcagaatgttgctccaatgatcctagagctggcgaggctcagctcggctgcatgcaaagctgccccgcagttgccagcctcatcactggaaatgattatgcctgacgtcgtcctggcatcggcgtcagatcaagcgatgcacgaaccgcacacagcaacaactcattatttcgcaaagtttgtctcaattttctaatacaggcgtcatgcggcttctcaacacagcttcttttcggcttcagctatttatgccgggtcatatcccggattacgcgatcttgtctcacctatgggataagcaagaggtcgtctttgaggattttacgagacggggcacactcgctacagatctcggagttggaaataagttgggcttcacaaagctcaaaggcgcttgtacgcttgctagccaacatggctacgaatggatctggatcgatacttgctgcatcgacaaatccagcagcgcagagcttcaggaggctatcaacaccatgtggaaatactatgcgaaatcaaatgtctgctacgcgtatatggctgatgtggctgactccaaagctgggtggagagaacatttcaaggacagtcgatgattcacacgcggctggacgttgcaagagcttatcgcgccaccatttgtcgagttttatgccaaagattggtcagctattggcacaaaggggcagcgaagcgacgaagtctcaataattacaggcaccaaccggaatgccttactgaacctgcgactcatcgattcacttagtgcagcggagaagctttcgtgggcagcacatcgtcaagtcactcgcgaagaagacgaagcttatgcgcttctgggattgttcgaagtaaacatgactctgctctatggagaagggagactgagagcctttttcagactgcaggaagctatttacagacttaggcaggatgggtcacttttccttttccgccgcgagactccacagccttgggcgtcttttcttactacttctccgaccgaattctgctcgagcgcgacctgccattgcagagcctctcaagattccacgacattttctggattcccgtatactgatctgatcatgacacgcaattggaaccctctagcccatgagcaactgattactatagtcacgacttcgcagattggagtatcgtgctctctaccattgttaactttacaaggaagcgacgaatcatctaatctcatacgctttgaaccagcaacaggtcaggccgtcactcacgttgctgtactcaacgtcacaatgaagggccgcgaggatgatgcgcttggcttgctgctaaaccgtccctgcagagaccgaatccgtttcgaccgcatcaattgtttcccggttatgctaccgtttgtccggaaacgatggcgggaattgcatcaacaacgcatgcttatctacgataattggtcagatactcttgacatgggagctgatctgagagccggcatcaggatctcccttattagtgatgaactcgtacgctgggaatggagcacggtggtgtacggacaccggaattgttggccaagggacactggcgccggatcgatggacctggaggtaggattcgtgggtgaaggccgcctgttctgttcgattcacgacgccgtcaagaacacttggcaaatcatcgtagttttaatccgtgagtgcggaaactggtatattcaagaactgcgagatttaaggacaaatctctggcaagatgaagatagaaagtacggggaatcgaaatctcgcatgcgaaccgatcgtcttctatttcgaacggttgacggcattacactgtcaatcctacttcggaagcagcctaggtcaggagtgccgttgccagaaaaacgtcgattgagggcttatcaaatcatggtgagacgtcttgacaacgtccaacagaccgaaggcggcgaaactgttgacctcaattcgcaaaccgcgtcgaggaactagcctccgagctgcgagcggatgtgtccaggtcagcacagcaatgacgttttgaagtcatctgatgccgacgacgatggtttcagccaggttgtgactagcagtagtgtctaaggccacacacgttcaagtaagtccaaccgcatgtcactcgagagcccacgccgtatttgtcaggcataatagagcaagtcctcgtcttcgatgtacttggtggtcgcctccaatcttttccgtggctgtgcagctattagatgcatggtgtatcctcaatttcgtcgctgccaagacgagaccctgctcttgatccgagcatgggccatcaagatgtcgcgatacatacaagctaaaaggcattccacagcataggagtaggtgctagcaaacctcatttccgatacgaattaacaacttaattgacactgtaaactatgtattaccttttctctccagagaaaatgaaaccctgtactataattcaggaccctgtaatcagctgtcattcactgtctgcaagcacagctgtcacatcctaccaaggcttggcgtctttcgcactcgcattcgctgcgctcaagtgcgcatagtaactgaagagacatgcaggagcaatgatcaatttgtcatggcagcaatgacggttgtgtgtcttgacttgagttcacccaattacttttaagtatgcatgcactattaaatgacaagcgatagagattcctaaagtagagtaaagttcaccatttcccgtctccccctctctacgacaagcccgcaaccttcgactcacacgtacagcgcctagaatcacattatcgacatggcagaaacaatggctccaacgcagcccagtcctggaactgagaagatggccgaggccaaggagaaacaagccattgagacgactcctgccgccgcgcctgagaatcgggatgccgctccgccctcggctgcggcgcccgaaccgtctcgacccaccgagtccgagacgccgaaacgacaaaaccccatatccgcatttttcggtgctctacgctctattttgatcactacgctgggacttggccatggcatgtcaaaaatgtggtggcaggttccggccctgtatggcgacacagccacacagaggccttggccacagatcacaagtttcgggagcggtt

SEQ ID NO: 7561 - DNA, 1035 bp, Muscodor strobelii
  misc_feature: SGI cDNA ID NO. 562287
  misc_feature: Encodes the peptide sequence at SEQ ID NO 7562
atgaacaccaccaccttgtcatcaggctcatcatcacctcgcctaaacacagcaatgaagcacacagactccgaactggaatctggctatgcctcggccacctcctccacaagtagctcatcgtcctcactcccgcagatcatgctcacaaagcctcatgtaaggcatctcaacgcacaactagagcgtatgagcgccgtggagcgtatccgattcagcatggctctcttcccttctctataccaaaccacagccttcggactgacaggtctcgtgaccatcgacatgctgtctaagctccaggctgctgacccgtctctcacgccggttgacacgatcttcttggacactctctaccactttcaagagacgcatgatcttgtggctcgtgtcaaagcccagtatccaggattccaacttcacgtatacaagcccgatggcgcttcgacgactgccgaattcgaggctcggtatagcgagaaattgtacgagacatcttctgagttatacgactggatcgccaaggttgaaccacagcagcgagcatacgccgagcttggcgtcgcagccgttttcacgggacgccgacgctcacaaggaggagagcgcgacaagatcggagtcatcgaggtcgacgaagagcgcggaattatcaagatcaacccccttgttgactggtcgttcgcccaggtcaaggcctatatcacggagaacggtgttccatacaacgcactcttggatagaggatacaagtccgttggagattggcactcaacgtctcctgttaccgccggtgaggacgagcgagctggccggtggaagggccaggataagaccgaatgcgggatccacaacaagaaatctcgctatgcccaattcctagaggaacagcaattgaagaaggagcaggaggagagagaagccgagcagagaaaattgtcgcaggctcttgaaaagatcgagcgggagcaaaaagaggccgaggagagagaacgccaacagactgaacaggcgcgctggatttccgtcctatga

SEQ ID NO: 7562 - protein, 344 aa, Muscodor strobelii
  misc_feature: SGI Peptide ID NO. 562287
  misc_feature (79)..(261): Pfam Id: PF01507 Pfam Desc: Phosphoadenosine phosphosulfate reductase family
  misc_feature (7)..(301): NCBI GI: 85115415 Blast Desc: phosphoadenosine phosphosulfate reductase [Neurospora crassa OR74A] gi|28926666|gb|EAA35634.1| phosphoadenosine phosphosulfate reductase [Neurospora crassa OR74A] PHOSPHOSULFATE
  misc_feature (17)..(327): NCBI GI: 261357923 Blast Desc: phosphoadenosine phosphosulfate reductase [Verticillium albo-atrum VaMs.102]
  misc_feature (24)..(294): NCBI GI: 145615958 Blast Desc: MGG_03662 [Magnaporthe grisea 70-15] gi|145009747|gb|EDJ94403.1| MGG_03662 [Magnaporthe grisea 70-15]
  misc_feature (23)..(296): NCBI GI: 171684987 Blast Desc: protein product [Podospora anserina] gi|170942454|emb|CAP68106.1| protein product [Podospora anserina]
  misc_feature (11)..(304): NCBI GI: 116193649 Blast Desc: CHGG_06542 [Chaetomium globosum CBS 148.51] gi|88182455|gb|EAQ89923.1| CHGG_06542 [Chaetomium globosum CBS 148.51]
  misc_feature (25)..(320): NCBI GI: 46128301 Blast Desc: FG08528.1 [Gibberella zeae PH-1]
  misc_feature (24)..(321): NCBI GI: 156057159 Blast Desc: SS1G_04310 [Sclerotinia sclerotiorum 1980] gi|154702096|gb|EDO01835.1| SS1G_04310 [Sclerotinia sclerotiorum 1980]
  misc_feature (25)..(320): NCBI GI: 256733625 Blast Desc: [Nectria haematococca mpVI 77-13-4]
  misc_feature (24)..(325): NCBI GI: 154297136 Blast Desc: BC1G_12227 [Botryotinia fuckeliana B05.10] gi|150843056|gb|EDN18249.1| BC1G_12227 [Botryotinia fuckeliana B05.10]
  misc_feature (22)..(304): NCBI GI: 258573609 Blast Desc: phosphoadenosine phosphosulfate reductase [Uncinocarpus reesii 1704] gi|237901252|gb|EEP75653.1| phosphoadenosine phosphosulfate reductase [Uncinocarpus reesii
  misc_feature (44)..(290): SWISSPROT Homolog: EC 1.8.4.8 Phosphoadenylyl-sulfate reductase (thioredoxin)
MNTTTLSSGSSSPRLNTAMKHTDSELESGYASATSSTSSSSSSLPQIMLTKPHVRHLNAQLERMSAVERIRFSMALFPSLYQTTAFGLTGLVTIDMLSKLQAADPSLTPVDTIFLDTLYHFQETHDLVARVKAQYPGFQLHVYKPDGASTTAEFEARYSEKLYETSSELYDWIAKVEPQQRAYAELGVAAVFTGRRRSQGGERDKIGVIEVDEERGIIKINPLVDWSFAQVKAYITENGVPYNALLDRGYKSVGDWHSTSPVTAGEDERAGRWKGQDKTECGIHNKKSRYAQFLEEQQLKKEQEEREAEQRKLSQALEKIEREQKEAEERERQQTEQARWISVL

SEQ ID NO: 7563 - DNA, 2488 bp, Muscodor strobelii
  misc_feature: SGI EST ID NO. CUFF.18771.0
  misc_feature: Variant of the nucleotide sequence at SEQ ID NO 7561
aaaactttgaggtagggtatcgggatccgagatgcggctgaagagatgtcgcaattgccgccacgaggtccaaaccacgacggtccaaaacgctgtgcctgaagcggtctcgacgtgaaccaaaatcagacgggtccggccaatcaatcgcgcacctcgtccggtttcaccggctagcgtagatgtcgtgatctctatgtaaaatttccattgttcgaatctctgacagcttgttccatagcgatcgagccatgttatgatattccggtttgaccctagtttgtcagtcggactttggaaatatgcagcattgtagcgaattatatgaatttggccgaacccaaacgaagcacataccccctacgtattccataaccgaattagtcaggcgggattgtgtgatatactcttacaaaccaagattgtaaaccagatatcccatgttgacattgatatagtccagccattgctcctgatttcgccttccagtagtccatatcctggaacatacttctttccaatctaataataacaatactcaacacttacatcattcatccttctcatcatcaccctataccaaacaaaccatagccttatatccgaactatacacctaagaaatctatagcaacctcataccctaatactgagaggattcttccacctatagagatagaagtgtacccagacaaaggacacagaccttagggaatagagcgacccctcatccgcatccccggacataacccctttgtcctcaagcatcttctgtctcagacaatctatacacgcacacaatgaacaccaccaccttgtcatcaggctcatcatcacctcgcctaaacacagcaatgaagcacacagactccgaactggaatctggctatgcctcggccacctcctccacaagtagctcatcgtcctcactcccgcagatcatgctcacaaagcctcatgtaaggcatctcaacgcacaactagagcgtatgagcgccgtggagcgtatccgattcagcatggctctcttcccttctctataccaaaccacagccttcggactgacaggtctcgtgaccatcgacatgctgtctaagctccaggctgctgacccgtctctcacgccggttgacacgatcttcttggacactctctaccactttcaagagacgcatgatcttgtggctcgtgtcaaagcccagtatccaggattccaacttcacgtatacaagcccgatggcgcttcgacgactgccgaattcgaggctcggtatagcgagaaattgtacgagacatcttctgagttatacgactggatcgccaaggttgaaccacagcagcgagcatacgccgagcttggcgtcgcagccgttttcacgggacgccgacgctcacaaggaggagagcgcgacaagatcggagtcatcgaggtcgacgaagagcgcggaattatcaagatcaacccccttgttgactggtcgttcgcccaggtcaaggcctatatcacggagaacggtgttccatacaacgcactcttggatagaggatacaagtccgttggagattggcactcaacgtctcctgttaccgccggtgaggacgagcgagctggccggtggaagggccaggataagaccgaatgcgggatccacaacaagaaatctcgctatgcccaattcctagaggaacagcaattgaagaaggagcaggaggagagagaagccgagcagagaaaattgtcgcaggctcttgaaaagatcgagcgggagcaaaaagaggccgaggagagagaacgccaacagactgaacaggcgcgctggatttccgtcctatgagcggttccctggatgtctgttatcattttcgctgagcgtctcatgatttgatgaattgcattggttggggtttattgttagcatttccacggtcaaaaaggggtggcatattccatgatcgcaggattgagcttgttcattgcgaggcgttcggtgttccagcaagcgttaaacggctgaggccgacgcgatttagttaccattgatatctattggttagaatccaaatctgattcgatacaaaatataatgctttgtccacattatctcgtgtcttcacaggtcaccgtaggcatataggaataagtccccggagacgccaacacgagccctgggtgaacaaacagcacaaggcattgcttggcctatactctgagcttgagctactaccctggtgatagaggacagctcttgccatctccaaattccggggtatcggtattattgtttgctagcccgcttgtaggtatttctggggacgttttgtgggtggtgtatagtgtgggtgccatcgttgcatcattacgccaggccgatcagaccagctaggttctgtgaccggatgaaagatcgaagctctttgactttatgattttgaatccgctagtgttgagggattagagactgaagaaaagatggtaaatcaagctgagc

SEQ ID NO: 7564 - DNA, 960 bp, Muscodor strobelii
  misc_feature: SGI cDNA ID NO. 562288
  misc_feature: Elevated expression when VOC is produced
  misc_feature: Encodes the peptide sequence at SEQ ID NO 7565
atgtcacatctcagatctactcgtattttcagcttcatgctcacctctctcgttgtcgtggcgagccaggaagacagctggatatatttcagacaattcggtttcccatatcccaagccaactctgagctataccattgacctcttcgagcaagctcttcatcatcctaatgcctcccgttctgttcgcttcaacccatttccttctcaaaatgacagtcagtggacatggcgtgtaaacgtgaccgacttctccgcacccaatgccgcgccctacaccctggatgagtacagcaataaatacgtgaatgctaccttcgtcgacccgcatgtcgtcagcacatctttcgagttcatctcgaataacgaatccaacgaaacgagtgtgttcaatagtgcgagagagcagacagcgcccttctgcgtcacaaatttagagctagacactgctatgccgccaaatgtgacggatcgctacacagaggatgacaccaacagtccagattgtgcgcacgcccttggatcagattgtgtcaaagcactcgtaggttcaagcctaggtgggccagataacgactgcccggcgctcaaggactggctcagcatgcccgagtgcgcggatacgattggttatgcccggcagcagtcgctaaatccaaatgcgtcgactcatagcaggaagtggactgttggtgagcgagaccttagcagtgtgctcaacaactacttttatgggttcagcacggcggctttcaatggctctaatactaccgtgtacgagaatgctgcaaacctgctgcatattatgatggtgaacagcggggatggaccaccgcaactgttgtgcatgagagtcaatactacgcagcgggatgtcgggagtggtgcggctgctgtaggcgcaaagagaggcctgttgataggatgggtgttgctggttcttggagtttgtttgttgtag

SEQ ID NO: 7565 - protein, 319 aa, Muscodor strobelii
  misc_feature: SGI Peptide ID NO. 562288
  misc_feature (46)..(292): NCBI GI: 171690030 Blast Desc: protein product [Podospora anserina] gi|170944970|emb|CAP71081.1| protein product [Podospora anserina]
  misc_feature (102)..(315): NCBI GI: 116194898 Blast Desc: [Chaetomium globosum CBS 148.51] gi|88179960|gb|EAQ87428.1| [Chaetomium globosum CBS 148.51]
  misc_feature: Useful for introducing or modulating the production of volatile compounds
MSHLRSTRIFSFMLTSLVVVASQEDSWIYFRQFGFPYPKPTLSYTIDLFEQALHHPNASRSVRFNPFPSQNDSQWTWRVNVTDFSAPNAAPYTLDEYSNKYVNATFVDPHVVSTSFEFISNNESNETSVFNSAREQTAPFCVTNLELDTAMPPNVTDRYTEDDTNSPDCAHALGSDCVKALVGSSLGGPDNDCPALKDWLSMPECADTIGYARQQSLNPNASTHSRKWTVGERDLSSVLNNYFYGFSTAAFNGSNTTVYENAANLLHIMMVNSGDGPPQLLCMRVNTTQRDVGSGAAAVGAKRGLLIGWVLLVLGVCLL

SEQ ID NO: 7566 - DNA, 1727 bp, Muscodor strobelii
  misc_feature: SGI EST ID NO. CUFF.18782.0
  misc_feature: Variant of the nucleotide sequence at SEQ ID NO 7564
gaggaaccgcatttcgcaccggagcgagacccgagaaaacacaagttcgttgagagcctcgccgtcttatctgcggcacagtacacaaggcattcatggcaagcaacacactctgaggaagataattgatcttccgatatgaatattaattcagactgccgatattttccaagagaattttctccagagataggagcgattgggagcgcaaagatatatgaacgtgtacgtctacttgtgtctgcgtgtctgctctccttattcctcgccgctttgtccgcatcagtttacttcatttcagaatgtcacatctcagatctactcgtattttcagcttcatgctcacctctctcgttgtcgtggcgagccaggaagacagctggatatatttcagacaattcggtttcccatatcccaagccaactctgagctataccattgacctcttcgagcaagctcttcatcatcctaatgcctcccgttctgttcgcttcaacccatttccttctcaaaatgacagtcagtggacatggcgtgtaaacgtgaccgacttctccgcacccaatgccgcgccctacaccctggatgagtacagcaataaatacgtgaatgctaccttcgtcgacccgcatgtcgtcagcacatctttcgagttcatctcgaataacgaatccaacgaaacgagtgtgttcaatagtgcgagagagcagacagcgcccttctgcgtcacaaatttagagctagacactgctatgccgccaaatgtgacggatcgctacacagaggatgacaccaacagtccagattgtgcgcacgcccttggatcagattgtgtcaaagcactcgtaggttcaagcctaggtgggccagataacgactgcccggcgctcaaggactggctcagcatgcccgagtgcgcggatacgattggttatgcccggcagcagtcgctaaatccaaatgcgtcgactcatagcaggaagtggactgttggtgagcgagaccttagcagtgtgctcaacaactacttttatgggttcagcacggcggctttcaatggctctaatactaccgtgtacgagaatgctgcaaacctgctgcatattatgatggtgaacagcggggatggaccaccgcaactgttgtgcatgagagtcaatactacgcagcgggatgtcgggagtggtgcggctgctgtaggcgcaaagagaggcctgttgataggatgggtgttgctggttcttggagtttgtttgttgtagttgtttgtcagcaagcaatgatcgagatgatccaaatcgcatcgtaccttggctagcaaacgctaagtactcggtgtcttatgcaaaatatcatgacaacccgtgaggtacacactgcgacacgaccaccctgtgtttctcaccagggccatctccgagtagagatcaatagcttctagcaatctcagtggacaatgcaccactaggaagaacattgacgaagcaaataaccaatgtgcgaattcgtcaaaactcgtggtattccttcctcgctagttagttgtcgggacgaaggcagacaaaggccgtttcttcgttcataacgggttgagttccatatcaggaaccgtctttgggtttgccttccgtttgatcagattcaaattgcatcgtcaatttttatcgatattcttttctctacgtcgaagacctgatcgtaatgcgtgattgacgaaatatcgattg

SEQ ID NO: 7567 - DNA, 3504 bp, Muscodor strobelii
  misc_feature: SGI cDNA ID NO. 562289
  misc_feature: Encodes the peptide sequence at SEQ ID NO 7568
ttccgcttgaccatctctgcctcttcttccacgctcgtgcactccctttcacccccatcacgaaggccatcttctagcgaggcttcgactgctcttcgtgtctgcagctctggtgccgttgcccacggcgacaccctccagcgctcgaggagttggttggtccttatcccctgcctcacagagctctcctccgcgacttctcaacccccccactccgccctgcctgccaccctcattgcgcatcacactcgtccacccgccgcctcaaccaccatggcgccgaccatcgaggagctcgacctcatggtccagtccttctacgagggccgcggcgagcagcaaaaggctgcccaaactgcgctcaaccagttcaaggaggacccggacgcctggctactcgtcgacaccatccttcgcgaagccaaacacactcagaccaagtacttgggcctgcagatattggacaatgttattatgacgagatggaaggtgctgccccgcgagcagtgcctcggaatccgcaactttgtcgtcaacttcatcatccaagcctccaacgacgaggagtctctgaaggcacaccgcgcactgctgaacaagctgaacctggtcctcgtatccatactcaagcaagaatggcctcacaactggcccaccttcatcaacgagatcatctcggcctgtcgtaccaacctatccatctgcgagaacaacatgatcatcctgcgcctgctgtccgaggaggtcttcgactactctgccgagcagatgacctcgaccaagacgcgaaacctgaagaccaccatgtgcaacgagttctcccagatcttccagctctgccaggaagtcctcacagtgtccaaccaaaccagcctggtcaaggccaccctcgagactctgctccgattctgcaactggatccctctgggctacatcttcgagaccaccctgatcgaaaccttgcgcagccggttcctcgaagtccccgactttcgcaacatcactcttcaagtcttcactgagatcggcggcttagtcaccaacggtcctgggcaacccaacaattacagcgagcagttgatcaagatgtttgtcgacgtcctctcgaccatctccaagataatacctttggagctcgacctcaagagcacctaccctcagagcaattcaaaggaccaagagtttctgcaggacctcgccctgtttctctgcaacttcttcggtcagcatgtagatcttgtcgagaaactacccaaccgagattttctgacccatggccatttctatctcatccggatttcccagatcgaggatcgtgagatcttcaagatcacactagactactggctgaagctggtacaagagctgtatgaagagatgcaagctgccccatcgcaggagatgaaccccctgatgatggctgctggctccgggggcggggctattaacccagctctactggacaagttgccactccgtatgcacaagtacaaggaggtcttatcgaatctccgtgtcgtcatgatcgagaagatggtcagacctgaggaggtcctcatcgttgagaacgacgaaggtgagatagtgcgagaattcgtcaaagaaagcgatacggtacaactctacaagaccatccgtgaatgtcttgtctacttgacacatctggacgtcatcgacaccgagcaaatcatgaccgacaagcttcagaaacaggtcgacggaagtgagtggtcgtggcacaactgcaacgtcctctgttgggctattggatcgatctcattggccatgaacgaggagacagagaagcgcttcttggttacagtgattaaagatctgcttggcctcacggaaatgaaacgcggcaaggacaacaaagccgttgtcgccagcaacatcatgtacattgttggccagtacccccggttcctgaaggctcattggaaatttcttaagacggtggtcaataagcttttcgagtttatgcacgagtcccacgaaggcgtccaggacatggcctgtgacacattcatcaagatcgcccgccaatgccggagacacttcgtagcgatgcagcctagtgagaatgaaccgtttattgaagagatcattcggaacttggggcgaatcacgggcgacctcactccccagcaagtgcataccttttacgaagcttgtgggtacatggtctcctctcaaggcgagaaacatcgtcaagagagattgttggccgagctaatgaatgctcccaatgccgcctgggacgagatcattcgccttgcgacgcaagatcctaccgtcctgcaggatgctgataccatcaagattattggcaacattatgaagacaaacgtgtctgcctgctcctcaattggctcatactttggcccccagatcggacgtatctatctcgacatgctgcagatgtaccgtgcgacaagtcaacttatctcggaagcaatcgctcgtgatggagacttggcgcccaggacacccaaagttcgaggattgcgaacgatcaagaaagagattctgaagttgatcgaaagctacgtcgataaggcggaggatctgcaggccgtacgccaccagatggttcctcaacttctagaatccgtcttgcttgactacaatcgcaacgtgcctggagctcgtgatgctgaagtgctcaaggctatgtcgactatcatcacaaagctcacgggcctcatggaggatcaagttcctgtcatcatgcagaatgtctttgagtgcacgcttgagatgatcaacaaggatttctctgatttccccgaacatcgtgtcgagttcttcaacctgctcagagctatcaaccttcactgcttccctgctctgctcaagctcgataaccggcaattcaagtttgtcatcgatgcgtgcatgtgggcaagcaagcatgacaaccgcgatgttgaaggcgcaggacttaacatgtgcctggagcttattactaacatcgctgagaagactgacgtgcagacagccaattccttcttccagcagttcttcatcacgatcttgcaggatgtgttctatgttttgacggatcctgaccacaaagcgggcttcaagactcagtctctacttcttatgaggatgttctacttcgtcttgcccgccgacggcacgaccccaaagattcaaggaccaatctacacatcccaggcgcctgctggaactagcaacaaagagtttctggcagaatttgtcgccacccttctgcgcaacgcgtttcctaacctccaagttgcgcaaatcactgcattcgttgaatgcttgttcacactcaacaattcctatgagaagttccgactccaagtccgtgacttcctaatctccctcaaagaatttgccggagataacgccgatctcttcgtggttgagaaagagcaggagcagcgtgataagctaacagctgatcatgagcggcgtgccaaggttggtggtctcttgaagccatcggagatcgaggacgacgagctatga

SEQ ID NO: 7568 - protein, 1167 aa, Muscodor strobelii
  misc_feature: SGI Peptide ID NO. 562289
  misc_feature (797)..(1125): Pfam Id: PF08767 Pfam Desc: CRM1 C terminal
  misc_feature (194)..(339): Pfam Id: PF08389 Pfam Desc: Exportin 1-like protein
  misc_feature (117)..(183): Pfam Id: PF03810 Pfam Desc: Importin-beta N-terminal domain
  misc_feature (92)..(1167): NCBI GI: 46138759 Blast Desc: FG10894.1 [Gibberella zeae PH-1]
  misc_feature (92)..(1167): NCBI GI: 164428210 Blast Desc: exportin-1 [Neurospora crassa OR74A] gi|157072056|gb|EAA26681.2| exportin-1 [Neurospora crassa OR74A]
  misc_feature (92)..(1167): NCBI GI: 145606124 Blast Desc: MGG_02526 [Magnaporthe grisea 70-15] gi|145013853|gb|EDJ98494.1| MGG_02526 [Magnaporthe grisea 70-15]
  misc_feature (159)..(1167): NCBI GI: 171689376 Blast Desc: protein product [Podospora anserina] gi|170944650|emb|CAP70761.1| protein product [Podospora anserina]
  misc_feature (92)..(1167): NCBI GI: 121702239 Blast Desc: exportin KapK [Aspergillus clavatus NRRL 1] gi|119397527|gb|EAW07958.1| exportin KapK [Aspergillus clavatus NRRL 1]
  misc_feature (92)..(1167): NCBI GI: 45593682 Blast Desc: exportin 1 [Emericella nidulans] gi|259488259|tpe|CBF87570.1| TPA: Exportin 1 [Source:UniProtKB/TrEMBL;Acc:Q6Q6S4] [Aspergillus nidulans FGSC
  misc_feature (92)..(1167): NCBI GI: 238485119 Blast Desc: exportin KapK [Aspergillus flavus NRRL3357] gi|220701848|gb|EED58186.1| exportin KapK [Aspergillus flavus NRRL3357]
  misc_feature (92)..(1167): NCBI GI: 169768160 Blast Desc: [Aspergillus oryzae RIB40] gi|83766406|dbj|BAE56549.1| protein product [Aspergillus oryzae]
  misc_feature (92)..(1167): NCBI GI: 119496233 Blast Desc: exportin KapK [Neosartorya fischeri NRRL 181] gi|119413052|gb|EAW22993.1| exportin KapK [Neosartorya fischeri NRRL 181]
  misc_feature (92)..(1167): NCBI GI: 115402009 Blast Desc: exportin-1 [Aspergillus terreus NIH2624] gi|114188927|gb|EAU30627.1| exportin-1 [Aspergillus terreus NIH2624]
FRLTISASSSTLVHSLSPPSRRPSSSEASTALRVCSSGAVAHGDTLQRSRSWLVLIPCLTELSSATSQPPHSALPATLIAHHTRPPAASTTMAPTIEELDLMVQSFYEGRGEQQKAAQTALNQFKEDPDAWLLVDTILREAKHTQTKYLGLQILDNVIMTRWKVLPREQCLGIRNFVVNFIIQASNDEESLKAHRALLNKLNLVLVSILKQEWPHNWPTFINEIISACRTNLSICENNMIILRLLSEEVFDYSAEQMTSTKTRNLKTTMCNEFSQIFQLCQEVLTVSNQTSLVKATLETLLRFCNWIPLGYIFETTLIETLRSRFLEVPDFRNITLQVFTEIGGLVTNGPGQPNNYSEQLIKMFVDVLSTISKIIPLELDLKSTYPQSNSKDQEFLQDLALFLCNFFGQHVDLVEKLPNRDFLTHGHFYLIRISQIEDREIFKITLDYWLKLVQELYEEMQAAPSQEMNPLMMAAGSGGGAINPALLDKLPLRMHKYKEVLSNLRVVMIEKMVRPEEVLIVENDEGEIVREFVKESDTVQLYKTIRECLVYLTHLDVIDTEQIMTDKLQKQVDGSEWSWHNCNVLCWAIGSISLAMNEETEKRFLVTVIKDLLGLTEMKRGKDNKAVVASNIMYIVGQYPRFLKAHWKFLKTVVNKLFEFMHESHEGVQDMACDTFIKIARQCRRHFVAMQPSENEPFIEEIIRNLGRITGDLTPQQVHTFYEACGYMVSSQGEKHRQERLLAELMNAPNAAWDEIIRLATQDPTVLQDADTIKIIGNIMKTNVSACSSIGSYFGPQIGRIYLDMLQMYRATSQLISEAIARDGDLAPRTPKVRGLRTIKKEILKLIESYVDKAEDLQAVRHQMVPQLLESVLLDYNRNVPGARDAEVLKAMSTIITKLTGLMEDQVPVIMQNVFECTLEMINKDFSDFPEHRVEFFNLLRAINLHCFPALLKLDNRQFKFVIDACMWASKHDNRDVEGAGLNMCLELITNIAEKTDVQTANSFFQQFFITILQDVFYVLTDPDHKAGFKTQSLLLMRMFYFVLPADGTTPKIQGPIYTSQAPAGTSNKEFLAEFVATLLRNAFPNLQVAQITAFVECLFTLNNSYEKFRLQVRDFLISLKEFAGDNADLFVVEKEQEQRDKLTADHERRAKVGGLLKPSEIEDDEL

SEQ ID NO: 7569 - DNA, 4195 bp, Muscodor strobelii
  misc_feature: SGI EST ID NO. CUFF.18966.0
  misc_feature: Variant of the nucleotide sequence at SEQ ID NO 7567
cgggactgctcgactgcacacacagcctctcccgcattgccttgcgtgctgccatcgtgctatccagccttccgcttgaccatctctgcctcttcttccacgctcgtgcactccctttcacccccatcacgaaggccatcttctagcgaggcttcgactgctcttcgtgtctgcagctctggtgccgttgcccacggcgacaccctccagcgctcgaggagttggttggtccttatcccctgcctcacagagctctcctccgcgacttctcaacccccccactccgccctgcctgccaccctcattgcgcatcacactcgtccacccgccgcctcaaccaccatggcgccgaccatcgaggagctcgacctcatggtccagtccttctacgagggccgcggcgagcagcaaaaggctgcccaaactgcgctcaaccagttcaaggaggacccggacgcctggctactcgtcgacaccatccttcgcgaagccaaacacactcagaccaagtacttgggcctgcagatattggacaatgttattatgacgagatggaaggtgctgccccgcgagcagtgcctcggaatccgcaactttgtcgtcaacttcatcatccaagcctccaacgacgaggagtctctgaaggcacaccgcgcactgctgaacaagctgaacctggtcctcgtatccatactcaagcaagaatggcctcacaactggcccaccttcatcaacgagatcatctcggcctgtcgtaccaacctatccatctgcgagaacaacatgatcatcctgcgcctgctgtccgaggaggtcttcgactactctgccgagcagatgacctcgaccaagacgcgaaacctgaagaccaccatgtgcaacgagttctcccagatcttccagctctgccaggaagtcctcacagtgtccaaccaaaccagcctggtcaaggccaccctcgagactctgctccgattctgcaactggatccctctgggctacatcttcgagaccaccctgatcgaaaccttgcgcagccggttcctcgaagtccccgactttcgcaacatcactcttcaagtcttcactgagatcggcggcttagtcaccaacggtcctgggcaacccaacaattacagcgagcagttgatcaagatgtttgtcgacgtcctctcgaccatctccaagataatacctttggagctcgacctcaagagcacctaccctcagagcaattcaaaggaccaagagtttctgcaggacctcgccctgtttctctgcaacttcttcggtcagcatgtagatcttgtcgagaaactacccaaccgagattttctgacccatggccatttctatctcatccggatttcccagatcgaggatcgtgagatcttcaagatcacactagactactggctgaagctggtacaagagctgtatgaagagatgcaagctgccccatcgcaggagatgaaccccctgatgatggctgctggctccgggggcggggctattaacccagctctactggacaagttgccactccgtatgcacaagtacaaggaggtcttatcgaatctccgtgtcgtcatgatcgagaagatggtcagacctgaggaggtcctcatcgttgagaacgacgaaggtgagatagtgcgagaattcgtcaaagaaagcgatacggtacaactctacaagaccatccgtgaatgtcttgtctacttgacacatctggacgtcatcgacaccgagcaaatcatgaccgacaagcttcagaaacaggtcgacggaagtgagtggtcgtggcacaactgcaacgtcctctgttgggctattggatcgatctcattggccatgaacgaggagacagagaagcgcttcttggttacagtgattaaagatctgcttggcctcacggaaatgaaacgcggcaaggacaacaaagccgttgtcgccagcaacatcatgtacattgttggccagtacccccggttcctgaaggctcattggaaatttcttaagacggtggtcaataagcttttcgagtttatgcacgagtcccacgaaggcgtccaggacatggcctgtgacacattcatcaagatcgcccgccaatgccggagacacttcgtagcgatgcagcctagtgagaatgaaccgtttattgaagagatcattcggaacttggggcgaatcacgggcgacctcactccccagcaagtgcataccttttacgaagcttgtgggtacatggtctcctctcaaggcgagaaacatcgtcaagagagattgttggccgagctaatgaatgctcccaatgccgcctgggacgagatcattcgccttgcgacgcaagatcctaccgtcctgcaggatgctgataccatcaagattattggcaacattatgaagacaaacgtgtctgcctgctcctcaattggctcatactttggcccccagatcggacgtatctatctcgacatgctgcagatgtaccgtgcgacaagtcaacttatctcggaagcaatcgctcgtgatggagacttggcgcccaggacacccaaagttcgaggattgcgaacgatcaagaaagagattctgaagttgatcgaaagctacgtcgataaggcggaggatctgcaggccgtacgccaccagatggttcctcaacttctagaatccgtcttgcttgactacaatcgcaacgtgcctggagctcgtgatgctgaagtgctcaaggctatgtcgactatcatcacaaagctcacgggcctcatggaggatcaagttcctgtcatcatgcagaatgtctttgagtgcacgcttgagatgatcaacaaggatttctctgatttccccgaacatcgtgtcgagttcttcaacctgctcagagctatcaaccttcactgcttccctgctctgctcaagctcgataaccggcaattcaagtttgtcatcgatgcgtgcatgtgggcaagcaagcatgacaaccgcgatgttgaaggcgcaggacttaacatgtgcctggagcttattactaacatcgctgagaagactgacgtgcagacagccaattccttcttccagcagttcttcatcacgatcttgcaggatgtgttctatgttttgacggatcctgaccacaaagcgggcttcaagactcagtctctacttcttatgaggatgttctacttcgtcttgcccgccgacggcacgaccccaaagattcaaggaccaatctacacatcccaggcgcctgctggaactagcaacaaagagtttctggcagaatttgtcgccacccttctgcgcaacgcgtttcctaacctccaagttgcgcaaatcactgcattcgttgaatgcttgttcacactcaacaattcctatgagaagttccgactccaagtccgtgacttcctaatctccctcaaagaatttgccggagataacgccgatctcttcgtggttgagaaagagcaggagcagcgtgataagctaacagctgatcatgagcggcgtgccaaggttggtggtctcttgaagccatcggagatcgaggacgacgagctatgactgggcaaggaactgagaaatgagttcgcacctcgccaaacttcgggcccccgacctgctgagggctccttgactggggagcttgacggctgggacgtctacggattgtgagagtttgctcgcacgggcagatatcactctcagtcggcccaccgtttaccacatgatttgtctgtttactgtacgtgataccagaaaagatagaggaatgagttggtagtcgttgcggtgcactcccgaacgacttggccatcccattcagacaaccaagcaaagggctccttgtcctgcttgttagtccatgttcagaagagtcggcggatacatgatacatgatcacgagtgcatgaaaaagggcttggggagatgagtccatggtcctcgatctgaagctccacgctggagagaggtggccaaaaacagagtaggcattgcttggcttgagctagtcggcaggtatgttgggctcaggcgagccattcttgcatgctagctaagtacatcttgtccacatagtaaagcattcagtccatacaaaatagacggtttgaccaaagttcctgttcctgtgagtaaaaggagcgaacccaattcatcatcgatttgagagatggtaccaaag

SEQ ID NO: 7570 - DNA, 471 bp, Muscodor strobelii
  misc_feature: SGI cDNA ID NO. 562290
  misc_feature: Encodes the peptide sequence at SEQ ID NO 7571
atgtcttccgatccgtcttgggagccacactactgcctctcttgcgacatccgcacagatgatggtctgtactgttcagaatcctgccggctgaaggactgggagaatggctcgtctccaagttctgctgcgacctcacccggcctcgctgaggactcgtcttaccgtttcccgaaacaatcgaccggattctatcttccacctgcttacgacttcaccaatcctgtgccctacggctcgacaccgacggccccgtcttacctgcaacaccgctcgactttctcgtcgtcaaccgcatcgacccgtgtgttgactccctcgagctcccacagcagcttgtgctccttgggcagtacagcatcggggaagagcgacgccggccaggtttcatccacaaacatcaagttgataaaggattactccaactcgttcgagaatgcacgccctcaacagcgacgccgctcttgttag

SEQ ID NO: 7571 - protein, 156 aa, Muscodor strobelii
  misc_feature: SGI Peptide ID NO. 562290
  misc_feature (7)..(153): NCBI GI: 261354854 Blast Desc: conserved [Verticillium albo-atrum VaMs.102]
  misc_feature (1)..(153): NCBI GI: 116199577 Blast Desc: CHGG_07944 [Chaetomium globosum CBS 148.51] gi|88179223|gb|EAQ86691.1| CHGG_07944 [Chaetomium globosum CBS 148.51]
  misc_feature (1)..(153): NCBI GI: 154299287 Blast Desc: BC1G_11129 [Botryotinia fuckeliana B05.10] gi|150857394|gb|EDN32586.1| BC1G_11129 [Botryotinia fuckeliana B05.10]
  misc_feature (1)..(153): NCBI GI: 156044164 Blast Desc: SS1G_10185 [Sclerotinia sclerotiorum 1980] gi|154694574|gb|EDN94312.1| SS1G_10185 [Sclerotinia sclerotiorum 1980]
  misc_feature (6)..(153): NCBI GI: 256732539 Blast Desc: NECHADRAFT_102533 [Nectria haematococca mpVI 77-13-4]
  misc_feature (7)..(153): NCBI GI: 171689378 Blast Desc: protein product [Podospora anserina] gi|170944651|emb|CAP70762.1| protein product [Podospora anserina]
  misc_feature (6)..(153): NCBI GI: 46121615 Blast Desc: FG05186.1 [Gibberella zeae PH-1]
  misc_feature (1)..(153): NCBI GI: 39977507 Blast Desc: MGG_06638 [Magnaporthe grisea 70-15] gi|145013850|gb|EDJ98491.1| MGG_06638 [Magnaporthe grisea 70-15]
  misc_feature (7)..(155): NCBI GI: 85080867 Blast Desc: NCU01835 [Neurospora crassa OR74A] gi|28881236|emb|CAD70474.1| [Neurospora crassa] gi|28917690|gb|EAA27383.1| conserved [Neurospora crassa OR74A]
  misc_feature (7)..(148): NCBI GI: 63087294 Blast Desc: [Sordaria macrospora]
MSSDPSWEPHYCLSCDIRTDDGLYCSESCRLKDWENGSSPSSAATSPGLAEDSSYRFPKQSTGFYLPPAYDFTNPVPYGSTPTAPSYLQHRSTFSSSTASTRVLTPSSSHSSLCSLGSTASGKSDAGQVSSTNIKLIKDYSNSFENARPQQRRRSC

SEQ ID NO: 7572 - DNA, 1833 bp, Muscodor strobelii
  misc_feature: SGI EST ID NO. CUFF.18839.0
  misc_feature: Variant of the nucleotide sequence at SEQ ID NO 7570
ccatagcctctactcccatcataaacactgccttccccctcctcaaccctcccacctcccattctgctcacactctttccaatctctgcttcgactctttcttcaatcgccgtgcgccttgtccaactgtcttccaacacgccaccgccctgtacaccaaccagctggctactgaaactgaacccaccggcctgttgtcgtcaaccatccgccgtctctcttgcacatgaccaccaccgcatcacctcgacagccacccaaactctgtccgacaacgttggattcactcgagtacctgtaaacaagacaccgggctcctcttcagcagttttgtccttctcccactcgggcaccactgccgtgtgccaccctgccttcagcactcctcctcgactcggacgacttggctgctgtcgctgcaaattgtaacattcgcattatatacgtgtatccgacactcacccttgcaccacgatgtcttccgatccgtcttgggagccacactactgcctctcttgcgacatccgcacagatgatggtctgtactgttcagaatcctgccggctgaaggactgggagaatggctcgtctccaagttctgctgcgacctcacccggcctcgctgaggactcgtcttaccgtttcccgaaacaatcgaccggattctatcttccacctgcttacgacttcaccaatcctgtgccctacggctcgacaccgacggccccgtcttacctgcaacaccgctcgactttctcgtcgtcaaccgcatcgacccgtgtgttgactccctcgagctcccacagcagcttgtgctccttgggcagtacagcatcggggaagagcgacgccggccaggtttcatccacaaacatcaagttgataaaggattactccaactcgttcgagaatgcacgccctcaacagcgacgccgctcttgttagacacgatacacctttactgtcatctactattctcctgatagatatgcaccatgtcgactgttttgaaccgtaccaagaacgccagttagcctttgctcatgactcaggcagctcaccacacgactcactcttcgcccttctttaactttcactctatcctcaaatcatttgttattcactgtaccaagagcatctactggagcacagcatcataaaagttgtcttttttctttttctgggagggttatcatgggtttctgtcttcgattatcagctactggcgcaagaaggcgcacgctggctaagaacagggacaccttgcgcaatgtaccattgagatttgttcaagatatcacttattattccacgtctgttcgatacctgggagctcggcgtacattgaaactgggatacgatattacctgacccagattgcgggctcatgcatcggattatttgggcaggcaggaaggagaaccgtcgagagggaacagtacaagcctaccacaattgagaggcatccagactcaagctggattgatgggacttgatctcgtgatgcacgcgagcaacatctactggctacatatacttacagtaaagatgattcattagaggcgagcagcaaatacatcgagacatcaagtccctcacacttcggttcgcgttttctctaaatgaagcgagtgattgtcatctggtgcaaatccgattaatcgtgtgaaccgattactgcttgatattcgggttatacatagcttagtcgcagataaacaatgtcaattcaaagcgacatggttctgcccgtgctgttaggatacaactgcgtgtatgcttcatctgtgcctgacctttaaggtatcgtcagctcggagaggcatcggttca

SEQ ID NO: 7573 - DNA, 426 bp, Muscodor strobelii
  misc_feature: SGI cDNA ID NO. 562291
  misc_feature: Elevated expression when VOC is produced
  misc_feature: Encodes the peptide sequence at SEQ ID NO 7574
atgctgaaccaagacgtttgtaacttctacaacgcccacgctgtctacgcacaatatggaggcatcgtttttggcgcggaagagggtgaaaatattgctactgcactaggagaccacaacaagggtgtgatactcatgaatcacggacttctgagtgtaggctggactgttgatgaggctgggttcatgtttggactacttgaccgggcttgtcagatgcagttgcaagtcgaggccgcagcggccaatggtattcctaagcagatcattagtgatgaggaggctgcgtacaacttcaagatggcgagcgagaagaatgccctttatcgtgaagctcagcctgatctcgaatttgaattcgaaatggctggcggggagaatgttcttggtcgggggtttgaggcgttatcccacctcactccatga

SEQ ID NO: 7574 - protein, 141 aa, Muscodor strobelii
  misc_feature: SGI Peptide ID NO. 562291
  misc_feature (2)..(94): Pfam Id: PF00596 Pfam Desc: Class II Aldolase and Adducin N-terminal domain
  misc_feature (1)..(136): NCBI GI: 39977503 Blast Desc: MGG_06636 [Magnaporthe grisea 70-15] gi|145013852|gb|EDJ98493.1| MGG_06636 [Magnaporthe grisea 70-15]
  misc_feature (1)..(134): NCBI GI: 156044320 Blast Desc: SS1G_10263 [Sclerotinia sclerotiorum 1980] gi|154694652|gb|EDN94390.1| SS1G_10263 [Sclerotinia sclerotiorum 1980]
  misc_feature (1)..(134): NCBI GI: 154305382 Blast Desc: BC1G_08460 [Botryotinia fuckeliana B05.10] gi|150853247|gb|EDN28439.1| BC1G_08460 [Botryotinia fuckeliana B05.10]
  misc_feature (1)..(132): NCBI GI: 85104165 Blast Desc: NCU01072 [Neurospora crassa OR74A] gi|18376203|emb|CAD21319.1| related to novobiocin biosynthesis protein novR [Neurospora crassa] gi|28923232|gb|EAA32448.1|
  misc_feature (1)..(125): NCBI GI: 240273573 Blast Desc: aldolase [Ajellomyces capsulatus H143]
  misc_feature (1)..(125): NCBI GI: 225556468 Blast Desc: aldolase [Ajellomyces capsulatus G186AR]
  misc_feature (1)..(125): NCBI GI: 261193938 Blast Desc: aldolase [Ajellomyces dermatitidis SLH14081] gi|239588388|gb|EEQ71031.1| aldolase [Ajellomyces dermatitidis SLH14081] gi|239607048|gb|EEQ84035.1| aldolase [Ajellomyces ER-3]
  misc_feature (1)..(125): NCBI GI: 189209085 Blast Desc: class II aldolase/adducin domain containing protein [Pyrenophora tritici-repentis Pt-1C-BFP] gi|187976968|gb|EDU43594.1| class II aldolase/adducin domain
  misc_feature (1)..(117): NCBI GI: 154271227 Blast Desc: conserved [Ajellomyces capsulatus NAm1] gi|150409690|gb|EDN05134.1| conserved [Ajellomyces capsulatus NAm1]
  misc_feature (1)..(125): NCBI GI: 169598862 Blast Desc: SNOG_02239 [Phaeosphaeria nodorum SN15] gi|160704485|gb|EAT90451.2| SNOG_02239 [Phaeosphaeria nodorum SN15]
  misc_feature: Useful for introducing or modulating the production of volatile compounds
MLNQDVCNFYNAHAVYAQYGGIVFGAEEGENIATALGDHNKGVILMNHGLLSVGWTVDEAGFMFGLLDRACQMQLQVEAAAANGIPKQIISDEEAAYNFKMASEKNALYREAQPDLEFEFEMAGGENVLGRGFEALSHLTP
